United States Patent Application Publication US 2020/0163878 A1 - sequence listing, part 17

SEQ ID NO: 62152 - RNA, 1401 nt, Artificial Sequence
  derived and/or modified CDS sequence (wt) from neuraminidase__InfluenzaB__AHL93613
augcuaccuucaacuauacaaacguuaacccuauuucucacaucagggggaguauuauuaucacuauaugugucagcuucauuaucauacuuacuauauucggauauauugcuaaaauucucgccaacagaaauaacugcaccaacaaugccauuggauugugcaaacgcaucaaauguucaggcugugaaccguucugcaacaaaaggggugacacuucuucucccagaaccggaguggacauacccgcguuuaucuugcccgggcucaaccuuucagaaagcacuccuaauuagcccucauagauucggagaaaccaaaggaaacucagcucccuugauaauaagggaaccuuuuauugcuuguggaccaaaugaaugcaaacacuuugcucuaacccauuaugcagcccagccagggggauacuacaauggaacaagaggagacagaaacaagcugaggcaucuaauuucagucaaauugggcaaaaucccaacaguagaaaacuccauuuuccacauggcagcauggagcggguccgcgugccaugaugguaaggaauggacauauaucggaguugauggcccugacaauaaugcauugcucaaaguaaaauauggagaagcauauacugacacauaccauuccuaugcaaacaaaauccuaagaacacaagaaagugccugcaauugcaucgggggaaauuguuaucuuaugguaacugauggcucagcuucagguguuagugaaugcagauuucuuaagauucgagagggccgaauaauaaaagaaauauuuccaacaggaagaguaaaacacacugaggaaugcacaugcggauuugcuagcaauaaaaccauagaaugugccuguagagauaacaguuacaccgcaaaaagaccuuuugucaaauuaaacguggagacugauacagcagaaauaagauugaugugcacagauacuuauuuggacacccccagaccagaugauggaagcauaacaggcccuugugaaucuaauggggacaaaggaaguggaggcaucaagggaggauuuguucaucaaagaauggaauccaagauuggaaggugguacucucgaacgaugucuaaaacugaaaggaugggaaugggacuguaugucaaguaugauggagacccaugggcugacagugaugcccuaguuuuuaguggaguaaugguuucaaugaaagaaccugguugguacuccuuuggcuucgaaauaaaagauaagaaaugcgauguccccuguauugggauagagaugguacaugaugguggaaaagagacuuggcacucagcagcaacagccauuuacuguuuaaugggcucaggacagcugcugugggacacugucacagguguugacauggcucuguaa

SEQ ID NO: 62153 - RNA, 1401 nt, Artificial Sequence
  derived and/or modified CDS sequence (wt) from neuraminidase__InfluenzaB__AHL93624
augcuaccuucaacuauacaaauguuaacccuauuucucacaucagggggaguacuauuaucacuauaugugucagcuucauuaucauacuuacuauauucggauauauugcuaaaauucucaccaacagaaauaacugcaccaacaaugccauuggauugugcaaacgcaucaaauguucaugcugugaaccguucugcaacaaaaggggugacauuucuucucccagaaccggaguggacauacccgcguuuaucuugcccgggcucaaccuuucagaaagcacuccuaauuagcccucauagauucggagaaaccaaaggaaacucagcucccuugauaauaagggaaccuuuuauugcuuguggaccaaaugaaugcaaacacuuugcucuaacccauuaugcagcccaaccagggggauacuacaauggaacaagaggagacagaaacaagcugaggcaucuaauuucagucaaauugggcaaaaucccaacaguagaaaacuccauuuuccacauggcagcauggagcggguccgcaugccaugaugguaaggaauggacauauaucggaguugaugguccugacaacaaugcauugcucaaaauaaaauauggagaagcauauacugacacauaucauuccuaugcaaacaacauccuaagaacacaagaaagugccugcaauugcaucgggggaaauuguuaucuuaugauaacugauggcucagcuucagguguuagugaaugcagauuucuuaagauucgagagggccgaauaauaaaagaaauauuuccaacaggaagaguaaaacauacugaggagugcacaugcggauuugccagcaauaaaaccauagaaugugccuguagagauaacaguuacacagcaaaaagacccuuugucaaauuaaacguggaaacugauacagcagaaauaagauugaugugcacagauacuuauuuggacacccccagaccagaugauggaagcauaacaggcccuugugaaucuaauggggacaaagggaguggaggcaucaagggaggauuuguucaucaaagaauggcauccaagauugggaggugguacucucgaacgaugucuaaaacugaaaggaaggggaugggacuguaugucaaguaugauggagacccauggacugacagugaugcccuugcuuuuaggggaguaaugguuucaaugaaagaaccugguugguacuccuuuggcuucgaaauaaaagauaagaaaugcgauguccccuguauugggauagagaugguacaugaugguggaaaagagacuuggcacucagcagcaacagccauuuacuguuuaaugggcucaggacagcugcugugggacacagucacaggugucgacauggcucuauaa

SEQ ID NO: 62154 - RNA, 1401 nt, Artificial Sequence; identical to SEQ ID NO: 62152
  derived and/or modified CDS sequence (wt) from neuraminidase__InfluenzaB__AHL93635

SEQ ID NO: 62155 - RNA, 1401 nt, Artificial Sequence; identical to SEQ ID NO: 62152
  derived and/or modified CDS sequence (wt) from neuraminidase__InfluenzaB__AHL93646

SEQ ID NO: 62156 - RNA, 1401 nt, Artificial Sequence
  derived and/or modified CDS sequence (wt) from neuraminidase__InfluenzaB__AHL93657
augcuaccuucaacuauacaaacguuaaccuuauuucucacaucagggggaguguuauuaucacuauaugugucagcuucauugucauacuuacuauauucggauauauugcuaaaauuuucacgaacagaaauaacugcaccaauaaugccauuggauugugcaaacgcaucaaauguucaggcugugaaccguucugcaacaaaaggggugacacuucuucucccagaaccggaguggacguacccucguuuaucuugcccgggcucaaccuuucagaaagcacuccuaauuagcccccauagauucggagaaaccaaaggaaacucagcucccuugauaauaagggaaccuuuuauugcuuguggaccaaaggaaugcaaacauuuugcucuaacccauuaugcagcucaaccagggggauacuacaauggaacaagagaagacagaaacaagcugaggcaucuaauuucagucaaauugggcaaaaucccaacaguagaaaacucuauuuuccacauggcagcuuggagcggguccgcaugccaugaugguagagaauggacuuauaucggaguugauggcccagacaguaaugcauugcucaaaauaaaauauggagaagcauauacugacacauaccauuccuaugcaaaaaacauccuaaggacacaagaaagugccugcaauugcaucgggggagauuguuaucuuaugauaacugauggcccagcuucagggauuagugaaugcagauuccuuaagauucgagagggccgaauaauaaaagaaauauuuccaacaggaagaguaaaacauacugaggaaugcacaugcggauuugccagcaacaaaaccauagaaugugccuguagagauaacaguuacacagcaaaaagacccuuugucaaauuaaauguggagacugauacagcggaaauaagauugaugugcacagagacuuauuuggacacccccagaccaaaugauggaagcauaacagggccuugcgaaucuaauggggacaaagggaguggaggcaucaagggaggauuuguucaccaaagaauggcauccaagauuggaaggugguacucucggacgaugucuaaaacuaaaagaauggggaugggacuguauguaaaguaugauggagacccauggacugacagugaagcccuugcucuuaguggaguaaugguuucaauggaagaaccugguugguauuccuuuggcuucgaaauaaaagauaagaaaugugauguccccuguauugggauagaaaugguacaugauggugggaaaacgacuuggcacucagcagcaacagccauuuacuguuuaaugggcucaggacaacugcugugggacacugucacagguguuaauaugacucuguaa

SEQ ID NO: 62157 - RNA, 1401 nt, Artificial Sequence; identical to SEQ ID NO: 62151
  derived and/or modified CDS sequence (wt) from neuraminidase__InfluenzaB__AHL93668

SEQ ID NO: 62158 - RNA, 1401 nt, Artificial Sequence
  derived and/or modified CDS sequence (wt) from neuraminidase__InfluenzaB__AHL93679
augcuaccuucaacuauacaaacguuaacccuauuucucacaucagggggaguauuauuaucacuauaugugucagcuuuauuaucauacuuacuauauucggauauauugcuaaaauucucaccaacagaaauaacugcaccaacaaugucauuggauugugcaaacgcaucaaauguucaggcugugaaccguucugcaacaaaaggggugacauuucuucucccagaaccggaguggacauacccgcguuuaucuugcccgggcucaaccuuucagaaagcacuccuaauuagcccucauagauucggagaaaccaaaggaaacucagcucccuugauaauaagggaaccuuuuauugcuuguggaccaaaugaaugcaaacacuuugcucuaacccauuaugcagcccaaccagggggauacuacaauggaacaagaggagacagaaacaagcugaggcaucuaauuucagucaaauugggcaaaaucccaacaguagaaaacuccauuuuccacauggcagcauggagcggguccgcgugccaugaugguaaggaauggacauauaucggaguugauggcccugacaaugaugcauugcucaaaguaaaauauggagaagcauauacugacacauaccauuccuaugcaaacaaaauccuaagaacacaagaaagugccugcaauugcaucgggggaaauuguuaucuuaugauaacugauggcucagcuucagguguuagugaaugcagauuucuuaagauucgagagggccgaauaauaaaagaaauacuuccaacaggaagaguaaaacacacugaggaaugcacaugcggauuugccagcaauaaaaccauagaaugugccuguagagauaacaguuacacagcaaaaagaccuuuugucaaauuaaacguggagacugauacagcagaaauaagauugaugugcacagauacuuauuuggacacccccagaccagaugauggaagcauaacaggcccuugugaaucuaauggagacaaagggaguggaggcaucaagggaggauuuguucaucaaagaauggaauccaagauuggaaggugguacucucgaacgaugucuaagacugaaaggauggggaugggacuguaugucaaguaugauggagacccaugggcugacagugaugcccuagcuuuuaguggaguaaugguuucaaugaaagaaccugguugguacuccuuuggcuucgaaauaaaagauaagaaaugcgauguccccuguauugggauagagaugguacaugaugguggaaaagagacuuggcacucagcagcaacagccauuuacuguuugaugggcucaggacagcugcugugggacacugucacaggcguugacauggcucuguaa

SEQ ID NO: 62159 - RNA, 1401 nt, Artificial Sequence; identical to SEQ ID NO: 62152
  derived and/or modified CDS sequence (wt) from neuraminidase__InfluenzaB__AHL93690

SEQ ID NO: 62160 - RNA, 1401 nt, Artificial Sequence; identical to SEQ ID NO: 62152
  derived and/or modified CDS sequence (wt) from neuraminidase__InfluenzaB__AHL93701

SEQ ID NO: 62161 - RNA, 1401 nt, Artificial Sequence; identical to SEQ ID NO: 62152
  derived and/or modified CDS sequence (wt) from neuraminidase__InfluenzaB__AHL93712

SEQ ID NO: 62162 - RNA, 1401 nt, Artificial Sequence
  derived and/or modified CDS sequence (wt) from neuraminidase__InfluenzaB__AHL93723
augcuaccuucaacuauacaaauguuaacccuauuucucacaucagggggaguacuauuaucacuauaugugucagcuucauuaucauacuuacuauauucggauauauugcuaaaauucucaccaacagaaauaacugcaccaacaaugccauuggauugugcaaacgcaucaaauguucaugcugugaaccguucugcaacaaaaggggugacauuucuucucccagaaccggaguggacauacccgcguuuaucuugcccgggcucaaccuuucagaaagcacuccuaauuagcccucauagauucggagaaaccaaaggaaacucagcucccuugauaauaagggaaccuuuuauugcuuguggaccaaaugaaugcaaacacuuugcucuaacccauuaugcagcccaaccagggggauacuacaauggaacaagaggagacagaaacaagcugaggcaucuaauuucagucaaauugggcaaaaucccaacaguagaaaacuccauuuuccacauggcagcauggagcggguccgcaugccaugaugguaaggaauggacauauaucggaguugaugguccugacaauaaugcauugcucaaaauaaaauauggagaagcauauacugacacauaucauuccuaugcaaacaacauccuaagaacacaagaaagugccugcaauugcaucgggggaaauuguuaucuuaugauaacugauggcucagcuucagguguuagugaaugcagauuucuuaagauucgagagggccgaauaauaaaagaaauauuuccaacaggaagaguaaaacauacugaggagugcacaugcggauuugccagcaauaaaaccauagaaugugccuguagagauaacaguuacacagcaaaaagacccuuugucaaauuaaacguggaaacugauacagcagaaauaagauugaugugcacagauacuuauuuggacacccccagaccagaugauggaagcacaacaggcccuugugaaucuaauggggacaaagggaguggaggcaucaagggaggauuuguucaucaaagaauggcauccaagauugggaggugguacucucgaacgaugucuaaaacugaaaggaaggggaugggacuguaugucaaguaugauggagacccauggacugacagugaugcccuugcuuuuaggggaguaaugguuucaaugaaagaaccugguugguacuccuuuggcuucgaaauaaaagauaagaaaugcgauguccccuguauugggauagagaugguacaugaugguggaaaagagacuuggcacucagcagcaacagccauuuacuguuuaaugggcucaggacagcugcugugggacacagucacaggugucgacauggcucuauaa

SEQ ID NO: 62163 - RNA, 1401 nt, Artificial Sequence; identical to SEQ ID NO: 62150
  derived and/or modified CDS sequence (wt) from neuraminidase__InfluenzaB__AHL93734

SEQ ID NO: 62164 - RNA, 1401 nt, Artificial Sequence
  derived and/or modified CDS sequence (wt) from neuraminidase__InfluenzaB__AHL93745
augcuaccuucaacuauacaaauguuaacccuauuucucacaucagggggaguacuauuaucacuauaugugucagcuucauuaucauacuuacuauauucggauauauugcuaaaauucucaccaacagaaauaacugcaccaacaaugccauuggauugugcaaacgcaucaaauguucaugcugugaaccguucugcaacaaaaggggugacauuucuucucccagaaccggaguggacauacccgcguuuaucuugcccgggcucaaccuuucagaaagcacuccuaauuagcccucauagauucggagaaaccaaaggaaacucagcucccuugauaauaagggaaccuuuuauugcuuguggaccaaaugaaugcaaacacuuugcucuaacccauuaugcagcccaaccagggggauacuacaauggaacaagaggagacagaaacaagcugaggcaucuaauuucagucaaauugggcaaaaucccaacaguagaaaacuccauuuuccacauggcagcauggagcggguccgcaugccaugaugguaaggaauggacauauaucggaguugaugguccugacaauaaugcauugcucaaaauaaaauauggagaagcauauacugacacauaucauuccuaugcaaacaacguccuaagaacacaagaaagugccugcaauugcaucgggggaaauuguuaucuuaugauaacugauggcucagcuucagguguuagugaaugcagauuucuuaagauucgagagggccgaauaauaaaagaaauauuuccaacaggaagaguaaaacauacugaggagugcacaugcggauuugccagcaauaaaaccauagaaugugccuguagagauaacaguuacacagcaaaaagacccuuugucaaauuaaacguggaaacugauacagcagaaauaagauugaugugcacagauacuuauuuggacacccccagaccagaugauggaagcauaacaggcccuugugaaucuaauggggacaaagggaguggaggcaucaagggaggauuuguucaucaaagaauggcauccaagauugggaggugguacucucgaacgaugucuaaaacugaaaggaaggggaugggacuguaugucaaguaugauggagacccauggacugacagugaugcccuugcuuuuaggggaguaaugguuucaaugaaagaaccugguugguacuccuuuggcuucgaaauaaaagauaagaaaugcgauguccccuguauugggauagagaugguacaugaugguggaaaagagacuuggcacucagcagcaacagccauuuacuguuuaaugggcucaggacagcugcugugggacacagucacaggugucgacauggcucuauaa

SEQ ID NO: 62165 - RNA, 1401 nt, Artificial Sequence
  derived and/or modified CDS sequence (wt) from neuraminidase__InfluenzaB__AHL93756
augcuaccuucaacuauacaaacguuaacccuauuucucacaucagggggaguauuauuaucacuauaugugucagcuucauuaucauacuuacuauauucggauauauugcuaaaauucucaccaacagaaauaacugcaccagcaaugccauuggauugugcaaacgcaucaaauguucaggcugugaaccguucugcaacaaaaggggugacacuucuucucccagaaccggaguggacauacccgcguuuaucuugcccaggcucaaccuuucagaaagcacuccuaauuagcccucauagauucggagaaaccaaaggaaacucagcucccuugauaauaagggaaccuuuuauugcuuguggaccaaaugaaugcaaacacuuugcucuaacccauuaugcagcccaaccagggggauacuacaauggaacaagaggagacagaaacaagcugaggcaucuaauuucagucaaauugggcaaaaucccaacaguagaaaacuccauuuuccacauggcagcauggagcggguccgcgugccaugaugguaaggaauggacauauaucggaguugaugguccugacaauaaugcauugcucaaagugaaauauggagaagcauauacugacacauaccauuccuaugcaaacaaaauccuaagaacacaagaaagugccugcaauugcaucgggggaaauuguuaucuuaugauaacugauggcucagcuucagguguuagugaaugcagauuucuuaagauucgagagggccgaauaauaaaagaaauauuuccaacaggaagaguaaaacacacugaggaaugcacaugcggauuugccagcaauaaaaccauagaaugugccuguagagauaacaguuacacagcaaaaagaccuuuugucaaauuaaacguggagacugauacagcagaaauaagauugaugugcacagauacuuauuuggacacccccagaccaaaugauggaagcauaacaggcccuugugaaucugauggggacaaagggaguggaggcaucaagggaggauuuguucaucaaagaauggaauccaagauuggaaggugguacucucgaacgaugucuaaaacugaaaggauggggaugggacuguaugucaaguaugauggagacccaugggcugacagugaugcccuagcuuuuaguggaguaaugguuucaaugaaagaaccugguugguacuccuuuggcuucgaaauaaaagauaagaaaugcgauguccccuguauugggauagagaugguacaugaugguggaaaagagacuuggcacucagcagcaacagccauuuacuguuuaaugggcucaggacagcugcugugggacacugucacagguguugacauggcucuguaa

SEQ ID NO: 62166 - RNA, 1401 nt, Artificial Sequence; identical to SEQ ID NO: 62152
  derived and/or modified CDS sequence (wt) from neuraminidase__InfluenzaB__AHL93767

SEQ ID NO: 62167 - RNA, 1401 nt, Artificial Sequence
  derived and/or modified CDS sequence (wt) from neuraminidase__InfluenzaB__AHL93778
augcuaccuucaacuauacaaacguuaauccuauuucucacaucagggggaguauuauuaucacuauaugugucagcuuuauuaucauacuuacuauauucggauauauugcuaaaauucucaccaacagaaauaacugcaccaacaaugucauuggauugugcaaacgcaucaaauguucaggcugugaaccguucugcaacaaaaggggugacauuucuucucccagaaccggaguggacauacccgcguuuaucuugcccgggcucaaucuuucagaaagcacuccuaauuagcccucauagauucggagaaaccaaaggaaacucagcucccuugauaauaagggaaccuuuuauugcuuguggaccaaaugaaugcaaacacuuugcucuaacccauuaugcagcccaaccagggggauacuacaauggaacaagaggagacagaaacaagcugaggcaucuaauuucagucaaauugggcaaaaucccaacaguagaaaacuccauuuuccacauggcagcauggagcggguccgcgugccaugaugguaaggaauggacauauaucggaguugauggcccugacaaugaugcauugcucaaaguaaaauauggagaagcauauacugacacauaccauuccuaugcaaacaaaauccuaagaacacaagaaagugccugcaauugcaucgggggaaauuguuaucuuaugauaacugauggcucagcuucagguguuagugaaugcagauuucuuaagauucgagagggccgaauaauaaaagaaauauuuccaacaggaagaguaaaacacacugaggaaugcacaugcggauuugccagcaauaaaaccauagaaugugccuguagagauaacaguuacacagcaaaaagaccuuuugucaaauuaaacguggagacugauacagcagaaauaagauugaugugcacagauacuuauuuggacacccccagaccagaugauggaagcauaacaggcccuugugaaucuaauggggacaaagggaguggaggcaucaagggaggauuuguucaucaaagaauggaauccaagauuggaaggugguacucucgaacgaugucuaagacugaaaggauggggaugggacuguaugucaaguaugauggagacccaugggcugacagugaugcccuagcuuuuaguggaguaaugguuucaaugaaagaaccugguugguacuccuuuggcuucgaaauaaaagauaagaaaugcgauguccccuguauugggauagagaugguacaugaugguggaaaagagacuuggcacucagcagcaacagccauuuacuguuugaugggcucaggacagcugcugugggacacugucacaggcguugacauggcucuguaa

SEQ ID NO: 62168 - RNA, 1401 nt, Artificial Sequence
  derived and/or modified CDS sequence (wt) from neuraminidase__InfluenzaB__AHL93789
augcuaccuucaacuauacaaacguuaacccuauuucucacaucagggggaguauuauuaucacuauaugugucagcuucauuaucauacuuacuauauucggauauauugcuaaaauucucgccaacaggaauaacugcaccaacaaugccauuggauugugcaaacgcaucaaauguucaggcugugaaccguucugcaacaaaaggggugacacuucuucucccagaaccggaguggacauacccgcguuuaucuugcccgggcucaaccuuucagaaagcacuccuaauuagcccucauagauucggagaaaccaaaggaaacucagcucccuugauaauaagggaaccuuuuauugcuuguggaccaaaugaaugcaaacacuuugcucuaacccauuaugcagcccagccagggggauacuacaauggaacaagaggagacagaaacaagcugaggcaucuaauuucagucaaauugggcaaaaucccaacaguagaaaacuccauuuuccacauggcagcauggagcggguccgcgugccaugaugguaaggaauggacauauaucggaguugauggcccugacaauaaugcauugcucaaaguaaaauauggagaagcauauacugacacauaccauuccuaugcaaacaaaauccuaagaacacaagaaagugccugcaauugcaucgggggaaauuguuaucuuaugguaacugauggcucagcuucagguguuagugaaugcagauuucuuaagauucgagagggccgaauaauaaaagaaauauuuccaacaggaagaguaaaacacacugaggaaugcacaugcggauuugcuagcaauaaaaccauagaaugugccuguagagauaacaguuacaccgcaaaaagaccuuuugucaaauuaaacguggagacugauacagcagaaauaagauugaugugcacagauacuuauuuggacacccccagaccagaugauggaagcauaacaggcccuugugaaucuaauggggacaaaggaaguggaggcaucaagggaggauuuguucaucaaagaauggaauccaagauuggaaggugguacucucgaacgaugucuaaaacugaaaggaugggaaugggacuguaugucaaguaugauggagacccaugggcugacagugaugcccuaguuuuuaguggaguaaugguuucaaugaaagaaccugguugguacuccuuuggcuucgaaauaaaagauaagaaaugcgauguccccuguauugggauagagaugguacaugaugguggaaaagagacuuggcacucagcagcaacagccauuuacuguuuaaugggcucaggacagcugcugugggacacugucacagguguugacauggcucuguaa

SEQ ID NO: 62169 - RNA, 1401 nt, Artificial Sequence
  derived and/or modified CDS sequence (wt) from neuraminidase__InfluenzaB__AHL93800
augcuaccuucaacuauacaaauguuaacccuauuucucacaucagggggaguacuauuaucacuauaugugucagcuucauuaucauacuuacuauauucggauauauugcuaaaauucucaccaacagaaauaacugcaccaacaaugccauuggauugugcaaacgcaucaaauguucaugcugugaaccguucugcaacaaaaggggugacauuucuucucccagaaccggaguggacauacccgcguuuaucuugcccgggcucaaccuuucagaaagcacuccuaauuagcccucauagauucggagaaaccaaaggaaacucagcucccuugauaauaagggaaccuuuuauugcuuguggaccaaaugaaugcaaacacuuugcucuaacccauuaugcagcccaaccagggggauacuacaauggaacaagaggagacagaaacaagcugaggcaucuaauuucagucaaauugggcaaaaucccaacaguagaaaacuccauuuuccacauggcagcauggagcggguccgcaugccaugaugguaaggaauggacauauaucggaguugaugguccugacaauaaugcauugcucaaaauaaaauauggagaagcauauacugacacauaucauuccuaugcaaacaacauccuaagaacacaagaaagugccugcaauugcaucgggggaaauuguuaucuuaugauaacugauggcucagcuucagguguuagugaaugcagauuucuuaagauucgagagggccgaauaauaaaggaaauauuuccaacaggaagaguaaaacauacugaggagugcacaugcggauuugccagcaauaaaaccauagaaugugccuguagagauaacaguuacacagcaaaaagacccuuugucaaauuaaacguggaaacugauacagcagaaauaagauugaugugcacagauacuuauuuggacacccccagaccagaugauggaagcauaacaggcccuugugaaucuaauggggacaaagggaguggaggcaucaagggaggauuuguucaucaaagaauggcauccaagauugggaggugguacucucgaacgaugucuaaaacugaaaggaaggggaugggacuguaugucaaguaugauggagacccauggacugacagugaugcccuugcuuuuaggggaguaaugguuucaaugaaagaaccugguugguacuccuuuggcuucgaaauaaaagauaagaaaugcgauguccccuguauugggauagagaugguacaugaugguggaaaagagaccuggcacucagcagcaacagccauuuacuguuuaaugggcucaggacagcugcugugggacacagucacaggugucgacauggcucuauaa

SEQ ID NO: 62170 - RNA, 1401 nt, Artificial Sequence
  derived and/or modified CDS sequence (wt) from neuraminidase__InfluenzaB__AHL93811
augcuaccuucaacuauacaaauguuaacccuauuucucacaucagggggaguacuauuaucacuauaugugucagcuucauuaucauacuugcuauauucggauauauugcuaaaauucucaccaacagaaauaacugcaccaacaaugccauuggauugugcaaacgcaucaaacguucaugcugugaaccguucugcaacaaaaggggugacauuucuucucccagaaccggaguggacauacccgcguuuaucuugcccgggcucaaccuuucagaaagcacuccuaauuagcccucauagauucggagaaaccaaaggaaacucagcucccuugauaauaagggaaccuuuuauugcuuguggaccaaaugaaugcaaacacuuugcucuaacccauuaugcagcccaaccagggggauacuacaauggaacaagaggagacagaaacaagcugaggcaucuaauuucagucaaauugggcaaaaucccaacaguagaaaacuccauuuuccacauggcagcauggagcggguccgcaugccaugaugguaaggaauggacauauaucggaguugaugguccugacaauaaugcauugcucaaaauaaaauauggagaagcauauacugacacauaucauuccuaugcaaacaacauccuaagaacacaagaaagugccugcaauugcaucgggggaaauuguuaucuuaugauaacugauggcucagcuucagguguuagugaaugcagauuucuuaagauucgagagggccgaauaauaaaagaaauauuuccaacaggaagaguaaaacauacugaggagugcacaugcggauuugccagcaauaaaaccauagaaugugccuguagagauaacaguuacacagcaaaaagacccuuugucaaauuaaacguggaaacugauacagcagaaauaagauugaugugcacagauacuuauuuggacacccccagaccagaugauggaagcauaacaggcccuugugaaucuaauggggacaaagggaguggaggcaucaagggaggauuuguucaucaaagaauggcauccaagauugggaggugguacucucgaacgaugucuaaaacugaaaggaaggggaugggacuguaugucaaguaugauggagacccauggacugacagugaugcccuugcuuuuaggggaguaaugguuucaaugaaagaaccugguugguacuccuuuggcuucgaaauaaaagauaagaaaugcgauguccccuguauugggauagagaugguacaugaugguggaaaagagacuuggcacucagcagcaacagccauuuacuguuuaaugggcucaggacagcugcugugggacacagucacaggugucgacauggcucuauaa

SEQ ID NO: 62171 - RNA, 1401 nt, Artificial Sequence
  derived and/or modified CDS sequence (wt) from neuraminidase__InfluenzaB__AHL93822
augcuaccuucaacuauacaaacguuaacccuauuucucacaucagggggaguauuauuaucacuauaugugucagcuucauuaucauacuuacuauauucggauauauugcuaaaauucucaccaacagaaauaacugcaccaacaaugccauuggauugugcaaacgcaucaaauguucaggcugugaaccguucugcaacaaaaggggugacacuucuucucccagaaccggaguggacauacccgcguuuaucuugcccgggcucaaccuuucagaaagcacuccuaauuagcccucauagauucggagaaaccaaaggaaacucagcucccuugauaauaagggaaccuuuuauugcuuguggaccaaaugaaugcaaacacuuugcucuaacccauuaugcagcccaaccagggggauacuacaauggaacaagaggagacagaaacaagcugaggcaucuaauuucagucaaauugggcaaaaucccaacaguagaaaacuccauuuuccacauggcagcauggagcggguccgcgugccaugaugguaaggaauggacauauaucggaguugauggcccugacaauaaugcauugcucaaaguaaaauauggagaagcauauacugacacauaccauuccuaugcaaacaaaauccuaagaacacaagaaagugccuguaauugcaucgggggaaauuguuaucuuaugguaacugauggcucagcuucagguguuagugaaugcagauuucuuaagauucgagagggccgaauaauaaaagaaauauuuccaacaggaagaguaaaacacacugaggaaugcacaugcggauuugcuagcaauaaaaccauagaaugugccuguagagauaacaguuacaccgcaaaaagaccuuuugucaaauuaaacguggagacugauacagcagaaauaagauugaugugcacagauacuuauuuggacacccccagaccagaugauggaagcauaacaggcccuugugaaucuaauggggacaaaggaaguggaggcaucaagggaggauuuguucaucaaagaauggaauccaagauuggaaggugguacucucgaacgaugucuaaaacugaaaggaugggaaugggacuguaugucaaguaugauggagacccaugggcugacagugaugcccuagcuuuuaguggaguaaugguuucaaugaaagaaccugguugguacuccuuuggcuucgaaauaaaagauaagaaaugcgauguccccuguauugggauagagaugguacaugaugguggaaaagagacuuggcacucagcagcaacagccauuuacuguuuaaugggcucuggacagcugcugugggacacugucacagguguugacauggcucuguaa

SEQ ID NO: 62172 - RNA, 1401 nt, Artificial Sequence; identical to SEQ ID NO: 62170
  derived and/or modified CDS sequence (wt) from neuraminidase__InfluenzaB__AHL93833

SEQ ID NO: 62173 - RNA, 1401 nt, Artificial Sequence
  derived and/or modified CDS sequence (wt) from neuraminidase__InfluenzaB__AHL93844
augcuaccuucaacuauacaaacguuaacccuauuucucacaucagggggaguauuauuaucacuauaugugucagcuucauuaucauacuuacuauauucggguauauugcuaaaauuuucaccaacagaaauaacugcaccaacaaugccauuggauugugcaaacgcaucaaauguucaggcugugaaccguucugcaacaaaagaggugacacuucuucucccagaaccggaguggacauacccgcguuuaucuugcccgggcucaaccuuucagaaagcacuccuaauuagcccucauagauucggagaaaccaaaggaaacucagcucccuugauaauaagggaaccuuuuauugcuuguggaccaaaugaaugcaaacacuuugcucuaacccauuaugcagcccaaccagggggauacuacaauggaacaagaggagacagaaacaagcugaggcaucuaauuucagucaaauugggcaaaaucccaacaguagaaaacuccauuuuccacauggcagcauggagcggguccgcgugccaugaugguaaggaauggacauauaucggaguugauggcccugacgauaaugcauugcucaaaguaaaauauggagaagcauauacugacacauaccauuccuaugcacacaaaauccuaagaacacaagaaagugccugcaauugcaucgggggaaauuguuaucuuaugauaacugauggcucagcuucagguguuagugaaugcagauuucuuaagauucgagagggccgaauaauaaaagaaauauuuccaacaggaagaguaaaacacacugaggaaugcacaugcggauuugccagcaauaaaaccauagaaugugccuguagagauaacaguuacacagcaaaaagaccuuuugucaaauuaaacguggagacugauacagcagaaauaagauugaugugcacagauacuuauuuggacacccccagaccaaacgauggaagcaucacagguccuugugaaucuaauggggacaaagggaguggaggcaucaagggaggauuuguucaucaaagaauggaauccaagauuggaaggugguacucucgaacgaugucuaaaacugaaaggauggggaugggacuguaugucaaguaugauggagacccaugggcugacagugaugcccuagcuuuuaguggaguaaugguuucaaugaaagaaccugguugguacuccuuuggcuucgaaauaaaagauaagaaaugcgauguccccuguauugggauagagaugguacaugaugguggaaaagagacuuggcacucagcagcaacagccauuuacuguuuaaugggcucaggacagcugcugugggacacugucacagguguugacauggcucuguaa

SEQ ID NO: 62174 - RNA, 1401 nt, Artificial Sequence
  derived and/or modified CDS sequence (wt) from neuraminidase__InfluenzaB__AHL93855
augcuaccuucaacuauacaaauguuaacccuauuucucacaucagggggaguacuauuaucacuauaugugucagcuucauuaucauacuuacuauauucggauauauugcuaaaauucucaccaacagaaauaacugcaccaacaaugccauuggauugugcaaacgcaucaaacguucaugcugugaaccguucugcaacaaaaggggugacauuucuucucccagaaccggaguggacauacccgcguuuaucuugcccgggcucaaccuuucagaaagcacuccuaauuagcccucauagauucggagaaaccaaaggaaacucagcucccuugauaauaagggaaccuuuuauugcuuguggaccaaaugaaugcaaacacuuugcucuaacccauuaugcagcccaaccagggggauacuacaauggaacaagaggagacagaaacaagcugaggcaucuaauuucagucaaauugggcaaaaucccaacaguagaaaacuccauuuuccacauggcagcauggagcggguccgcaugccaugaugguaaggaauggacauauaucggaguugaugguccugacaauaaugcauugcucaaaauaaaauauggagaagcauauacugacacauaucauuccuaugcaaacaacauccuaagaacacaagaaagugccugcaauugcaucgggggaaauuguuaucuuaugauaacugauggcucagcuucagguguuagugaaugcagauuucuuaagauucgagagggccgaauaauaaaagaaauauuuccaacaggaagaguaaaacauacugaggagugcacaugcggauuugccagcaauaaaaccauagaaugugccuguagagauaacaguuacacagcaaaaagacccuuugucaaauuaaacguggaaacugauacagcagaaauaagauugaugugcacagauacuuauuuggacacccccagaccagaugauggaagcauaacaggcccuugugaaucuaauggggacaaagggaguggaggcaucaagggaggauuuguucaucaaagaauggcauccaagauugggaggugguacucucgaacgaugucuaaaacugaaaggaaggggaugggacuguaugucaaguaugauggagacccauggacugacagugaugcccuugcuuuuaggggaguaaugguuucaaugaaagaaccugguugguacuccuuuggcuucgaaauaaaagauaagaaaugcgauguccccuguauugggauagagaugguacaugaugguggaaaagagacuuggcacucagcagcaacagccauuuacuguuuaaugggcucaggacagcugcugugggacacagucacaggugucgacauggcucuauaa

SEQ ID NO: 62175 - RNA, 1401 nt, Artificial Sequence
  derived and/or modified CDS sequence (wt) from neuraminidase__InfluenzaB__AHL93866
augcuaccuucaacuauacaaauguuaacccuauuucucacaucagggggaguacuauuaucacuauaugugucagcuucauuaucauacuuacuauauucggauauauugcuaaaauucucaccaacagaaauaacugcaccaacaaugccauuggauugugcaaacgcaucaaauguucaugcugugaaccguucugcaacaaaaggggugacauuucuucucccagaaccggaguggacauacccgcguuuaucuugcccgggcucaaccuuucagaaagcacuccuaauuagcccucauagauucggagaaaccaaaggaaacucagcucccuugauaauaagggaaccuuuuauugcuuguggaccaaaugaaugcaaacacuuugcucuaacccauuaugcagcccaaccagggggauacuacaauggaacaagaggagacagaaacaagcugaggcaucuaauuucagucaaauugggcaaaaucccaacaguagaaaacuccauuuuccacauggcagcauggagcggguccgcaugccaugaugguaaggaauggacauauaucggaguugaugguccugacaauaaugcauugcucaaaauaaaauauggagaagcauauacugacacauaucauuccuaugcaaacaacauccuaagaacacaagaaagugccugcaauugcaucgggggaaauuguuaucuuaugauaacugauggcucagcuucagguguuagugaaugcagauuucuuaagauucgagagggccgaauaauaaaagaaauauuuccaacaggaagaguaaaacauacugaggagugcacaugcggauuugccagcaauaaaaccauagaaugugccuguagagauaacaguuacacagcaaaaagacccuuugucaaauuaaacguggaaacugauacagcagaaauaagauugaugugcacagauacuuauuuggacacccccagaccggaugauggaagcauaacaggcccuugugaaucuaauggggacaaagggaguggaggcaucaagggaggauuuguucaucaaagaauggcauccaagauugggaggugguauucucgaacgaugucuaaaacugaaaggaaggggaugggacuguaugucaaguaugauggagacccauggacugacagugaugcccuugcuuuuaggggaguaaugguuucaaugaaagaaccugguugguacuccuuuggcuucgaaauaaaagauaagaaaugcgauguccccuguauugggauagagaugguacaugaugguggaaaagagacuuggcacucagcagcaacagccauuuacuguuuaaugggcucaggacagcugcugugggacacagucacaggugucgacauggcucuauaa

SEQ ID NO: 62176 - RNA, 1401 nt, Artificial Sequence; identical to SEQ ID NO: 62151
  derived and/or modified CDS sequence (wt) from neuraminidase__InfluenzaB__AHL93877

SEQ ID NO: 62177 - RNA, 1401 nt, Artificial Sequence; identical to SEQ ID NO: 62150
  derived and/or modified CDS sequence (wt) from neuraminidase__InfluenzaB__AHL93888

SEQ ID NO: 62178 - RNA, 1401 nt, Artificial Sequence
  derived and/or modified CDS sequence (wt) from neuraminidase__InfluenzaB__AHL93899
augcuaccuucaacuauacaaauguuaacccuauuucucacaucagggggaguacuauuaucacuauaugugucagcuucauuaucauacuuacuauauucggauauauugcuaaaauucucaccaacagaaauaacugcaccaacaaugccauuggauugugcaaacgcaucaaauguucaugcugugaaccguucugcaacaaaaggggugacauuucuucucccagaaccggaguggacauacccgcguuuaucuugcccgggcucaaccuuucagaaagcacuccuaauuagcccucauagauucggagaaaccaaaggaaacucagcucccuugauaauaagggaaccuuuuauugcuugugaaccaaaugaaugcaaacacuuugcucuaacccauuaugcagcccaaccagggggauacuacaauggaacaagaggagacagaaacaagcugaggcaucuaauuucagucaaauugggcaaaaucccaacaguagaaaacuccauuuuccacauggcagcauggagcggguccgcaugccaugaugguaaggaauggacauauaucggaguugaugguccugacaauaaugcauugcucaaaauaaaauauggagaagcauauacugacacauaucauuccuaugcaaacaacauccuaagaacacaagaaagugccugcaauugcaucgggggaaauuguuaucuuaugauaacugauggcucagcuucagguguuagugaaugcagauuucuuaagauucgagagggccgaauaauaaaagaaauauuuccaacaggaagaguaaaacauacugaggagugcacaugcggauuugccagcaauaaaaccauagaaugugccuguagagauaacaguuacacagcaaaaagacccuuugucaaauuaaacguggaaacugauacagcagaaauaagauugaugugcacagauacuuauuuggacacccccagaccagaugauggaagcacaacaggcccuugugaaucuaauggggacaaagggaguggaggcaucaagggaggauuuguucaucaaagaauggcauccaagauugggaggugguacucucgaacgaugucuaaaacugaaaggaaggggaugggacuguaugucaaguaugauggagacccauggacugacagugaugcccuugcuuuuaggggaguaaugguuucaaugaaagaaccugguugguacuccuuuggcuucgaaauaaaagauaagaaaugcgauguccccuguauugggauagagaugguacaugaugguggaaaagagacuuggcacucagcagcaacagccauuuacuguuuaaugggcucaggacagcugcugugggacacagucacaggugucgacauggcucuauaa

SEQ ID NO: 62179 - RNA, 1401 nt, Artificial Sequence
  derived and/or modified CDS sequence (wt) from neuraminidase__InfluenzaB__AHL93910
augcuaccuucaacuauacaaauguuaacccuauuucucacaucagggggaguacuauuaucacuauaugugucagcuucauuaucauacuuacuauauucggauauauugcuaaaauucucaccaacagaaauaacugcaccaacaaugccauuggauugugcaaacgcaucaaauguucaugcugugaaccguucugcaacaaaaggggugacauuucuucucccagaaccggaguggacauacccgcguuuaucuugcccgggcucaaccuuucagaaagcacuccuaauuagcccucauagauucggagaaaccaaaggaaacucagcucccuugauaauaagggaaccuuuuauugcuuguggaccaaaugaaugcaaacacuuugcucuaacccauuaugcagcccaaccagggggauacuacaauggaacaagaggagacagaaacaagcugaggcaucuaauuucagucaaauugggcaaaaucccaacaguagaaaacuccauuuuccacauggcagcauggagcggguccgcaugccaugaugguaaggaauggacauauaucggaguugaugguccugacaauaaugcauugcucaaaauaaaauauggagaagcauauacugacacauaucauuccuaugcaaacaacauccuaagaacacaagaaagugccugcaauugcaucgggggaaauuguuaucuuaugauaacugauggcucagcuucagguguuagugaaugcagauuucuuaagauucgagagggccgaauaauaaaagaaauauuuccaacaggaagaguaaaacauacugaggagugcacaugcggauuugccagcaauaaaaccauagaauguaccuguagagauaacaguuacacagcaaaaagacccuuugucaaauuaaacguggaaacugauacagcagaaauaagauugaugugcacagauacuuauuuggacacccccagaccggaugauggaggcauaacaggcccuugugaaucuaauggggacaaagggaguggaggcaucaagggaggauuuguucaucaaagaauggcauccaagauugggaggugguauucucgaacgaugucuaaaacugaaaggaaggggaugggacuguaugucaaguaugauggagacccauggacugacagugaugcccuugcuuuuaggggaguaaugguuucaaugaaagaaccugguugguacuccuuuggcuucgaaauaaaagauaagaaaugcgauguccccuguauugggauagagaugguacaugaugguggaaaagagacuuggcacucagcagcaacagccauuuacuguuuaaugggcucaggacagcugcugugggacacagucacaggugucgacauggcucuauaa

SEQ ID NO: 62180 - RNA, 1401 nt, Artificial Sequence; identical to SEQ ID NO: 62175
  derived and/or modified CDS sequence (wt) from neuraminidase__InfluenzaB__AHL93921

SEQ ID NO: 62181 - RNA, 1401 nt, Artificial Sequence
  derived and/or modified CDS sequence (wt) from neuraminidase__InfluenzaB__AHL93932
augcuaccuucaacuauacaaacguuaacccuauuucucacaucagggggaguauuauuaucacuauaugugucagcuucauuaucauacuuacuauauucggauauauugcuaaaauucucaccaacagaaauaacugcaccaacaaugccauuggauugugcaaacgcaucaaauguucaggcugugaaccguucugcaacaaaaggggugacacuucuucucccagaaccggaguggacauacccgcguuuaucuugcccgggcucaaccuuucagaaagcacuccuaauuagcccucauagauucggagaaaccaaaggaaacucagcucccuugauaauaagggaaccuuuuauugcuuguggaccaaaugaaugcaaacauuuugcucuaacccauuaugcagcccaaccagggggauacuacaauggaacaagaggagacagaaacaagcugaggcaucuaauuucagucaaauugggcaaaaucccaacaguagaaaacuccauuuuccacauggcagcauggagcggguccgcgugccaugaugguaaggaauggacauauaucggaguugauggcccugacaauaaugcauugcucaaaguaaaauauggagaagcauauacugacacauaccauuccuaugcaaacaaaauccuaagaacacaagaaagugccugcaauugcaucgggggaaauuguuaucuuaugguaacugauggcucagcuucagguguuagugaaugcagauuucuuaagauucgagagggccgaauaauaaaagaaauauuuccaacaggaagaguaaaacacacugaggaaugcacaugcggauuugcuagcaauaaaaccauagaaugugccuguagagauaacaguuacaccgcaaaaagaccuuuugucaaauuaaacguggagacugauacagcagaaauaagauugaugugcacagauacuuauuuggacacccccagaccagaugauggaagcauaacaggcccuugugaaucuaauggggacaaaggaaguggaggcaucaagggaggauuuguucaucaaagaauggaauccaagauuggaaggugguacucucgaacgaugucuaaaacugaaaggaugggaauggaacuguaugucaaguaugauggagacccaugggcugacagugaugcccuagcuuuuaguggaguaaugguuucaaugaaagaaccugguugguacuccuuuggcuucgaaauaaaagauaagaaaugcgauguccccuguauugggauagagaugguacaugaugguggaaaagagacuuggcacucagcagcaacagccauuuacuguuuaaugggcucaggacagcugcugugggacacugucacagguguugacauggcucuguaa

SEQ ID NO: 62182 - RNA, 1401 nt, Artificial Sequence; identical to SEQ ID NO: 62165
  derived and/or modified CDS sequence (wt) from neuraminidase__InfluenzaB__AHL93943

SEQ ID NO: 62183 - RNA, 1401 nt, Artificial Sequence; identical to SEQ ID NO: 62153
  derived and/or modified CDS sequence (wt) from neuraminidase__InfluenzaB__AHL93954

SEQ ID NO: 62184 - RNA, 1401 nt, Artificial Sequence
  derived and/or modified CDS sequence (wt) from neuraminidase__InfluenzaB__AHL93965
augcuaccuucaacuauacaaacguuaacccuauuucucacaucagggggaguauuauuaucacuauaugugucagcuucauuaucauacuuacuauauucggauauauugcuaaaauucucaccaacagaaauaacugcaccagcaaugccauuggauugugcaaacgcaucaaauguucaggcugugaacuguucugcaacaaaaggggugacacuucuucucccagaaccggaguggacauacccgcguuuaucuugcccaggcucaaccuuucagaaagcacuccuaauuagcccucauagauucggagaaaccaaaggaaacucagcucccuugauaauaagggaaccuuuuauugcuuguggaccaaaugaaugcaaacacuuugcucuaacccauuaugcagcccaaccagggggauacuacaauggaacaagaggagacagaaacaagcugaggcaucuaauuucagucaaauugggcaaaaucccaacaguagaaaacuccauuuuccacauggcagcauggagcggguccgcgugccaugaugguaaggaauggacauauaucggaguugaugguccugacaauaaugcauugcucaaagugaaauauggagaagcauauacugacacauaccauuccuaugcaaacaaaauccuaagaacacaagaaagugccugcaauugcaucgggggaaauuguuaucuuaugauaacugauggcucagcuucagguguuagugaaugcagauuucuuaagauucgagagggccgaauaauaaaagaaauauuuccaacaggaagaguaaaacacacugaggaaugcacaugcggauuugccagcaauaaaaccauagaaugugccuguagagauaacaguuacacagcaaaaagaccuuuugucaaauuaaacguggagacugauacagcagaaauaagauugaugugcacagauacuuauuuggacacccccagaccaaaugauggaagcauaacaggcccuugugaaucugauggggacaaagggaauggaggcaucaagggaggauuuguucaucaaagaauggaauccaagauuggaaggugguacucucgaacgaugucuaaaacugaaaggauggggaugggacuguaugucaaguaugauggagacccaugggcugacagugaugcccuagcuuuuaguggaguaaugguuucaaugaaagaaccugguugguacuccuuuggcuucgaaauaaaagauaagaaaugcgauguccccuguauugggauagagaugguacaugaugguggaaaagagacuuggcacucagcagcaacagccauuuacuguuuaaugggcucaggacagcugcugugggacacugucacagguguugacauggcucuguaa

SEQ ID NO: 62185 - RNA, 1401 nt, Artificial Sequence
  derived and/or modified CDS sequence (wt) from neuraminidase__InfluenzaB__AHL93976
augcuaccuucaacuauacaaacguuaacccuauuucucacaucagggggaguguuauuaucacuauaugugucagcuucauuaucauacuuacuauauucggauauauugcuaaaauucucaccaaaagaaauaacugcaccaacaaugccauuggauugugcaaacgcaucaaauguucaggcugugaaccauucugcaacaaaaggggugacacuucuucucccagaaccggaguggacauacccgcguuuaucuugcccgggcucaaccuuucagaaagcacuccuaauuagcccucauagauucggagaaaccaaaggaaacucagcucccuugauaauaagggaaccuuuuauugcuugcggaccaaaugaaugcaaacacuuugcucuaacccauuaugcagcccaaccagggggauacuacaauggaacaagaggagacagaaacaagcugaggcaucuaauuucagucaaauugggcaaaaucccaacaguagaaaacuccauuuuccacauggcagcauggagcggguccgcgugccaugaugguaaggaauggacauauaucggaguugauggcccugacaauaaugcauugcucaaaguaaaauauggagaagcauauacugacacauaccauuccuaugcaaacaaaauccuaagaacacaagaaagugccugcaauugcaucgggggaaauuguuaucuuaugauaacugauggcucagcuucagguguuagugaaugcagauuucuuaagauucgagagggccgaauaauaaaagaaauauuuccaacgggaagaguaaaacacacugaggaaugcacaugcggauuugccagcaauaaaaccauagaaugugccuguagagauaacaguuacacagcaaaaagaccuuuugucaaauuaaacguggagacugauacagcagaaauaagacugaugugcacagauacuuauuuggacacccccagaccagaugauggaagcauaacaggcccuugugaaucuaauggggacaaagggaguggaggcaucaagggaggauuuguucaucaaagaauggaauccaagauuggaaggugguacucucgaacgaugucuaaaacugaaaggauggggaugggacuguaugucaaguaugauggagacccaugggcugacagugaugcccuagcuuuuaguggaguaaugguuucaaugaaagaaccugguugguacuccuuuggcuucgaaauaaaagauaagaaaugcgauguccccuguauugggauagagauggugcaugaugguggaaaagagacuuggcacucagcagcaacagccauuuacuguuuaaugggcucaggacagcugcugugggacacugucacagguguugacauggcucuguaa

SEQ ID NO: 62186 - RNA, 1401 nt, Artificial Sequence; identical to SEQ ID NO: 62158
  derived and/or modified CDS sequence (wt) from neuraminidase__InfluenzaB__AHL93987

SEQ ID NO: 62187 - RNA, 1401 nt, Artificial Sequence
  derived and/or modified CDS sequence (wt) from neuraminidase__InfluenzaB__AHL93998
augcuaccuucaacuauacaaacguuaacccuauuucucacaucagggggaguguuauuaucacuauaugugucagcuucauugucauacuuacuauauucggauauauugcuaaaauuuucacagacagaaauaacugcaccaauaaugccauuggauugugcaaacgcaucaaauguucaggcugugaaucguucugcagcaaaaggggugacacuucuucucccagaaccggaguggacauacccucguuuaucuugcccgggcucaaccuuucagaaagcacuccuaauuagcccccauagauucggagaaaucaaaggaaacucagcucccuugauaauaagggaaccuuuuauugcuuguggaccaacggaaugcaaacacuuugcucuaacccauuaugcagcucaaccagggggauacuacaauggaacaagagaagacagaaacaagcugaggcaucuaauuucagucaaauugggcaaaaucccaacaguagaaaacuccauuuuccacauggcagcuuggagcggguccgcaugccaugaugguaaagaauggacauauaucggaguugauggccccgacaguaaugcauugcucaaaauaaaauauggagaagcauauacugacacauaccauuccuaugcaaaaaacauccuaaggacacaagaaagugccugcaauugcaucgggggagauuguuaucuuaugauaacugauggcccagcuucagggguuagugaaugcagauuccuuaagauucgagagggcagaauaauaaaagaaauauuuccaacaggaagagugaaacauacugaggaaugcacaugcggauuugccagcaacaaaaccauagaaugugcuuguagagauaaccguuacacagcaaaaagacccuuugucaaauuaaauguggagacugauacagcggaaauaagauugaugugcacagagacuuauuuggacacccccagaccaaaugauggaagcauaacagggccuugcgaaucugauggagacaaagggaguggaggcaucaagggaggauuuguucaucaaagaauggcauccaaaauuggaaggugguacucucgaacgaugucuaaaaccaaaagaauggggaugggacuguauguaaaguaugauggagacccauggacugacagugaagcccuugcucuuaguggaguaaugguuucaauggaagaaccugguugguauuccuuuggcuucgaaauaaaagauaagaaaugugauguccccuguauugggauagaaaugguacaugauggugggaaaacgacuuggcacucagcagcaacagccauuuauuguuuaaugggcucaggacaacugcugugggacacugucacagguguugauauggcucuguaa

SEQ ID NO: 62188 - RNA, 1401 nt, Artificial Sequence
  derived and/or modified CDS sequence (wt) from neuraminidase__InfluenzaB__AHL94009
augcuaccuucaacuauacaaauguuaacccuauuucucacaucagggggaguacuauuaucacuauaugugucagcuucauuaucauacuuacuauauucggauauauugcuaaaauucucaccaacagaaauaacugcaccaacaaugccauuggauugugcaaacgcaucaaauguucaugcugugaaccguucugcaacaaaaggggugacauuucuucucccagaaccgaaguggacauacccgcguuuaucuugcccgggcucaaccuuucagaaagcacuccuaauuagcccucauagauucggagaaaccaaaggaaacucagcucccuugauaauaagggaaccuuuuauugcuuguggaccaaaugaaugcagacacuuugcucuaacccauuaugcagcccaaccagggggauacuacaauggaacaagaggagacagaaacaagcugaggcaucuaauuucagucaaauugggcaaaaucccaacaguagaaaacuccauuuuccacauggcagcauggagcggguccgcaugccaugaugguaaggaauggacauauaucggaguugaugguccugacaauaaugcauugcucaaaauaaaauauggagaagcauauacugacacauaucauuccuaugcaaacaacauccuaagaacacaagaaagugccugcaauugcaucgggggaaauuguuaucuuaugauaacugauggcucagcuucagguguuagugaaugcagauuucuuaagauucgagagggccgaauaauaaaagaaauauuuccaacaggaagaguaaaacauacugaggagugcacaugcggauuugccagcaauaaaaccauagaaugugccuguagagauaacaguuacacagcaaaaagacccuuugucaaauuaaacguggaaacugauacagcagaaauaagauugaugugcacagauacuuauuuggacacccccagaccagaugauggaagcauaacaggcccuugugaaucuaauggggacaaagggaguggaggcaucaagggaggauuuguucaucaaagaauggcauccaagauugggaggugguacucucgaacgaugucuaaaacugaaaggaaggggaugggacuguaugucaaguaugauggagacccauggacugacagugaugcccuugcuuuuaggggaguaaugguuucaaugaaagaaccugguugguacuccuuuggcuucgaaauaaaagauaagaaaugcgauguccccuguauugggauagagaugguacaugaugguggaaaagagacuuggcacucagcagcaacagccauuuacuguuuaaugggcucaggacagcugcugugggacacagucacaggugucgacauggcucuauaa

SEQ ID NO: 62189 - RNA, 1401 nt, Artificial Sequence; identical to SEQ ID NO: 62150
  derived and/or modified CDS sequence (wt) from neuraminidase__InfluenzaB__AHL94020

SEQ ID NO: 62190 - RNA, 1401 nt, Artificial Sequence; identical to SEQ ID NO: 62151
  derived and/or modified CDS sequence (wt) from neuraminidase__InfluenzaB__AHL94031

SEQ ID NO: 62191 - RNA, 1401 nt, Artificial Sequence; identical to SEQ ID NO: 62165
  derived and/or modified CDS sequence (wt) from neuraminidase__InfluenzaB__AHL94042

SEQ ID NO: 62192 - RNA, 1401 nt, Artificial Sequence
  derived and/or modified CDS sequence (wt) from neuraminidase__InfluenzaB__AHL94053
augcuaccuucaacuauacaaacguuaacccuauuucucacaucagggggaguauuauuaucacuauauuugucagcuuuauuaucauacuuacuauauucggauauauugcuaaaauucucaccaacagaaauaacugcaccaacaaugucauuggauugugcaaacgcaucaaauguucaggcugugaaucguucugcaacaaaaggggugacauuucuucucccagaaccggaguggacauacccgcguuuaucuugcccgggcucaaccuuucagagagcacuccuaauuagcccucauagauucggagaaaccaaaggaaacucagcucccuugauaauaagggaaccuuuuauugccuguggaccaaaugaaugcaaacacuuugcucuaacccauuaugcagcccaaccagggggauacuacaauggaacaagaggagacagaaacaagcugaggcaucuaauuucagucaaauugggcaaaaucccaacaguagaaaacuccauuuuccacauggcagcauggagcggguccgcuugccaugaugguaaggaauggacauauaucggaguugauggcccugacaaugaugcauugcucaaaguaaaauauggagaagcauauacugacacauaccauuccuaugcaaacaaaauccuaagaacacaagaaagugccugcaauugcaucgggggaaauuguuaucuuaugauaacugauggcucagcuucagguguuagugaaugcagauuucuuaagauucgagagggccgaauaauaaaagaaauauuuccaacaggaagaguaaaacacacugaggaaugcacaugcggauuugccagcaauaaaaccauagagugugccuguagagauaacaguuacacagcaaaaagaccuuuugucaaauuaaacguggagacugauacagcagaaauaagauugaugugcacagauacuuauuuggacacccccagaccagaugauggaagcauaacaggcccuugugaaucuaauggagacaaagggaguggaggcaucaagggaggauuuguucaucaaagaauggaauccaagauuggaaggugguacucucgaacgaugucuaagacugaaaggauggggaugggacuguaugucaaguaugauggagacccaugggcugacagugaugcccuagcuuuuaguggaguaaugguuucaaugaaagaaccugguugguacucuuuuggcuucgaaauaaaagauaagaaaugcgauguccccuguauugggauagagaugguacaugaugguggaaaagagacuuggcacucagcagcaacagccauuuacuguuuaaugggcucaggacagcugcugugggacacugucacaggcguugacauggcucuguaa

SEQ ID NO: 62193 - RNA, 1401 nt, Artificial Sequence
  derived and/or modified CDS sequence (wt) from neuraminidase__InfluenzaB__AHL94064
augcuaccuucaacuauacaaauguuaacccuauuucucacaucagggggaguacuauuaucgcuauaugugucagcuucauuaucauacuuacuauauucggauauauugcuaaaauucucaccaacagaaauaacugcaccaacaaugccauuggauugugcaaacgcaucaaauguucaugcugugaaccguucugcaacaaaaggggugacauuucuucucccagaaccggaguggacauacccgcguuuaucuugcccgggcucaaccuuucagaaagcacuccuaauuagcccucauagauucggagaaaccaaaggaaacucagcucccuugauaauaagggaaccuuuuauugcuuguggaccaaaugaaugcaaacacuuugcucuaacccauuaugcagcccaaccagggggauacuacaauggaacaagaggagacagaaacaagcugaggcaucuaauuucagucaaauugggcaaaaucccaacaguagaaaacuccauuuuccacauggcagcauggagcggguccgcaugccaugaugguaaggaauggacauauaucggaguugaugguccugacaauaaugcauugcucaaaauaaaauauggagaagcauauacugacacauaucauuccuaugcaaacaacauccuaagaacacaagaaagugccugcaauugcaucgggggaaauuguuaucuuaugauaacugauggcucagcuucagguguuagugaaugcagauuucuuaagauucgagagggccgaauaauaaaagaaauauuuccaacaggaagaguaaaacauacugaggagugcacaugcggauuugccagcaauaaaaccauagaaugugccuguagagauaacaguuacacagcaaaaagacccuuugucaaauuaaacguggaaacugauacagcagaaauaagauugaugugcacagauacuuauuuggacacccccagaccagaugauggaagcauaacaggcccuugugaaucuaauggggacaaagggaguggaggcaucaagggaggauuuguucaucaaagaauggcauccaagauugggaggugguacucucgaacgaugucuaaaacugaaaggaaggggaugggacuguaugucaaguaugauggagacccauggacugacagugaugcccuugcuuuuaggggaguaaugguuucaaugaaagaaccugguugguacuccuuuggcuucgaaauaaaagauaagaaaugcgauguccccuguauugggauagagaugguacaugaugguggaaaagagacuuggcacucagcagcaacagccauuuacuguuuaaugggcucaggacagcugcugugggacacagucacaggugucgacauggcucuauaa

SEQ ID NO: 62194 - RNA, 1401 nt, Artificial Sequence
  derived and/or modified CDS sequence (wt) from neuraminidase__InfluenzaB__AHL94075
augcuaccuucaacuauacaaauguuaacccuauuucucacaucagggggaguacuauuaucacuauaugugucagcuucauuaucauacuuacuauauucggauauauugcuaaaauucucaccaacagaaauaacugcaccaacaaugccauuggauugugcaaacgcaucaaauguucaugcugugaaccguucugcaacaaaaggggugacauuucuucucccagaaccggaguggacauacccgcguuuaucuugcccgggaucaaccuuucagaaagcacuccuaauuagcccucauagauucggagaaaccaaaggaaacucagcucccuugauaauaagggaaccuuuuauugcuuguggaccaaaugaaugcaaacacuuugcucuaacccauuaugcagcccaaccagggggauacuacaauggaacaagaggagacagaaacaagcugaggcaucuaauuucagucaaauugggcaaaaucccaacaguagaaaacuccauuuuccacauggcagcauggagcggguccgcaugccaugaugguaaggaauggacauauaucggaguugaugguccugacaauaaugcauugcucaaaauaaaauauggagaagcauauacugacacauaucauuccuaugcaaacaacauccuaagaacacaagaaagugccugcaauugcaucgggggaaauuguuaucuuaugauaacugauggcucagcuucagguguuagugaaugcagauuucuuaagauucgagagggccgaauaauaaaagaaauauuuccaacaggaagaguaaaacauacugaggagugcacaugcggauuugccagcaauaaaaccauagaaugugccuguagagauaacaguuacacagcaaaaagacccuuugucaaauuaaacguggaaacugauacagcagaaauaagauugaugugcacagauacuuauuuggacacccccagaccagaugauggaagcauaacaggcccuugugaaucuaauggggacaaagggaguggaggcaucaagggaggauuuguucaucaaagaauggcauccaagauugggaggugguacucucgaacgaugucuaaaacugaaaggaaggggaugggacuguaugucaaguaugauggagacccauggacugacagugaugcccuugcuuuuaggggaguaaugguuucaaugaaagaaccugguugguacuccuuuggcuucgaaauaaaagauaagaaaugcgauguccccuguauugggauagagaugguacaugaugguggaaaagagacuuggcacucagcagcaacagccauuuacuguuuaaugggcucaggacagcugcugugggacacagucacaggugucgacauggcucuauaa

SEQ ID NO: 62195 - RNA, 1401 nt, Artificial Sequence
  derived and/or modified CDS sequence (wt) from neuraminidase__InfluenzaB__AHL94086
augcuaccuucaacuauacaaacguuaaccuuauuucucacaucagggggaguguuauuaucacuauaugugucagcuucauugucauacuuacuauauucggauauauugcuaaaauuuucacgaacagaaauaacugcaccaauaaugccauuggauugugcaaacgcaucaaauguucaggcugugaaccguucugcaacaaaaggggugacauuucuucucccagaaccggaguggacguacccucguuuaucuugcccgggcucaaccuuucagaaagcacuccuaauuagcccccauagauucggagaaaccaaaggaaacucagcucccuugauaauaagggaaccuuuuguugcuuguggaccaaaggaaugcaaacauuuugcucuaacccauuaugcagcucaaccagggggauacuacaauggaacaagagaagacagaaacaagcugaggcaucuaauuucagucaaauugggcaaaaucccaacaguagaaaacucuauuuuccacauggcagcuuggagcggguccgcaugccaugaugguagagaauggacuuauaucggaguugauggccccgacaguaaugcauugcucaaaauaaaauauggagaagcauauacugacacauaccauuccuaugcaaaaaacauccuaaggacacaagaaagugccugcaauugcaucgggggagauuguuaucuuaugauaacugauggcccagcuucagggauuagugaaugcagauuccuuaagauucgagagggccgaauaauaaaagaaauauuuccaacaggaagaguaaaacauacugaggaaugcacauguggauuugccagcaacaaaaccauagaaugugccuguagagauaacaguuacacagcaaaaaggcccuuugucaaauuaaauguggagacugauacagcggaaauaagauugaugugcacagagacuuauuuggacacccccagaccaaaugauggaagcauaacagggccuugcgaaucuaauggggacaaagggaguggaggcaucaagggaggauuuguccaccaaagaauggcauccaagauuggaaggugguacucucgaacgaugucuaaaacuaaaagaauggggaugggacuguauguaaaguaugauggagacccauggacugacagugaagcccuugcucuuaguggaguaaugguuucaauggaagaaccugguugguauuccuuuggcuucgaaauaaaagauaagaaaugugacguccccuguauugggauagaaaugguacaugauggugggaaaacgacuuggcacucagcagcaacagccauuuacuguuuaaugggcucaggacaacugcugugggacacugucacagguguuaauaugacucuguaa

SEQ ID NO: 62196 - RNA, 1401 nt, Artificial Sequence; identical to SEQ ID NO: 62165
  derived and/or modified CDS sequence (wt) from neuraminidase__InfluenzaB__AHL94095

SEQ ID NO: 62197 - RNA, 1401 nt, Artificial Sequence; identical to SEQ ID NO: 62174
  derived and/or modified CDS sequence (wt) from neuraminidase__InfluenzaB__AHL94106

SEQ ID NO: 62198 - RNA, 1401 nt, Artificial Sequence
  derived and/or modified CDS sequence (wt) from neuraminidase__InfluenzaB__AHL94117
augcuaccuucaacuauacaaauguuaacccuauuucucacaucagggggaguacuauuaucacuauaugugucagcuucauuaucauacuuacuauauucggauauauugcuaaaauucucaccaacagaaauaacugcaccaacaaugccauuggauugugcaaacgcaucaaauguucaugcugugaaccguucugcaacaaaaggggugacauuucuucucccagaaccggaguggacauacccgcguuuaucuugcccgggcucaaccuuucagaaagcacuccuaauuagcccucauagauucggagaaaccaaaggaaacucagcucccuugauaauaagggaaccuuuuauugcuuguggaccaaaugaaugcaaacacuuugcucuaacccauuaugcagcccaaccagggggauacuacaauggaacaagaggagacagaaacaagcugaggcaucuaauuucagucaaauugggcaaaaucccaacaguagaaaacuccauuuuccacauggcagcauggagcggguccgcaugccaugaugguaaggaauggacauauaucggaguugaugguccugacaauaaugcauugcucaaaauaaaauauggagaagcauauacugacacauaucauuccuaugcaaacaacauccuaagaacacaagaaagugccugcaauugcaucgggggaaauuguuaucuuaugauaacugauggcucagcuucagguguuagugaaugcagauuucuuaagauucgagagggccgaauaauaaaagaaauauuuccaacaggaagaguaaaacauacugaggagugcacaugcggauuugccagcaauaaaaccauagaaugugccuguagagauaacaguuacacagcaaaaagacccuuugucaaauuaaacguggaaacugauacagcagaaauaagauugaugugcacagauacuuauuuggacacccccagaccagaugauggaagcauaacaggcccuugugaaucuaauggggacaaagggaguggaggcaucaagggaggauuuguucaucaaagaauggcauccaagauugggaggugguacucucgaacgaugucuaaaacugaaaggaaggggaugggacugcaugucaaguaugauggagacccauggacugacagugaugcccuugcuuuuaggggaguaaugguuucaaugaaagaaccugguugguacuccuuuggcuucgaaauaaaagauaagaaaugcgauguccccuguauugggauagagaugguacaugaugguggaaaagagacuuggcacucagcagcaacagccauuuacuguuuaaugggcucaggacagcugcugugggacacagucacaggugucaacauggcucuauaa

SEQ ID NO: 62199 - RNA, 1401 nt, Artificial Sequence
  derived and/or modified CDS sequence (wt) from neuraminidase__InfluenzaB__AHL94128
augcuaccuucaacuauacaaauguuaacccuauuucucacaucagggggaguacuauuaucacuauaugugucagcuucauuaucauacuuacuauauucggauauauugcuaaaauucucaccaacagaaauaacugcaccaacaaugccauuggauugugcaaacgcaucaaauguucaugcugugaaccguucugcaacaaaaggggugacauuucuucucccagaaccggaguggacauacccgcguuuaucuugcccgggcucaaccuuucagaaagcacuccuaauuagcccucauagauucggagaaaccaaaggaaacucagcucccuugauaauaagggaaccuuuuauugcuuguggaccaaaugaaugcaaacacuuugcucuaacccauuaugcagcccaaccagggggauacuacaauggaacaagaggagacagaaacaagcugaggcaucuaauuucagucaaauugggcaaaaucccaacaguagaaaacuccauuuuccacauggcagcauggagcggguccgcaugccaugaugguaaggaauggacauauaucggaguugaugguccugacaauaaugcauugcucaaaauaaaauauggagaagcauauacugacacauaucauuccuaugcaaacaacauccuaagaacacaagaaagugccugcaauugcaucgggggaaauuguuaucuuaugauaacugauggcucagcuucagguguuagugaaugcagauuucuuaagauucgagagggccgaauaauaaaagaaauauuuccaacaggaagaguaaaacauacugaggagugcacaugcggauuugccagcaauaaaaccauagaaugugccuguagagauaacaguuacacagcaaaaagacccuuugucaaauuaaacguggaaacugauacagcagaaauaagauugaugugcacagauacuuauuuggacacccccagaccagaugauggaagcauaacaggcccuugugaaucuaauggggacaaagggaguggaggcaucaagggaggauuuguucaucaaagaauggcauccaagauugggaggugguacucucgaacgaugucuaaaacugaaaggaaggggaugggacuguaugucaaguaugauggagacccauggacugacagugaugcccuugcuuuuaggggagugaugguuucaaugaaagaaccugguugguacuccuuuggcuucgaaauaaaagauaagaaaugcgauguccccuguauugggauagagaugguacaugaugguggaaaagagacuuggcacucagcagcaacagccauuuacuguuuaaugggcucaggacagcugcugugggacacagucacaggugucgacauggcucuauaa

SEQ ID NO: 62200 - RNA, 1401 nt, Artificial Sequence
  derived and/or modified CDS sequence (wt) from neuraminidase__InfluenzaB__AHL94139
augcuaccuucaacuauacaaacguuaacccuauuucucacaucagggggaguauuauuaucacuauaugugucagcuuuauuaucauacuuacuauauucggauauauugcuaaaauucucaccaacagaaauaacugcaccaacaaugucauuggauugugcaaacgcaucaaauguucaggcugugaaccguucugcaacaaaaggggugacauuucuucucccagaaccggaguggacauacccgcguuuaucuugcccgggcucaaccuuucagagagcacuccuaauuagcccucauagauucggagaaaccaaaggaaacucagcucccuugauaauaagggaaccuuuuauugcuuguggaccaaaugaaugcaaacacuuugcucuaacccauuaugcagcccaaccagggggauacuacaauggaacaagaggagacagaaacaagcugaggcaucuaauuucagucaaauugggcaaaaucccaacaguagaaaacuccauuuuccacauggcagcauggagcggguccgcuugccaugaugguaaggaauggacauauaucggaguugauggcccugacaaugaugcauugcucaaaguaaaauauggagaagcauauacugacacauaccauuccuaugcaaacaaaauccuaagaacacaagaaagugccugcaauugcaucgggggaaauuguuaucuuaugauaacugauggcucagcuucagguguuagugaaugcagauuucuuaagauucgagagggccgaauaauaaaagaaauauuuccaacaggaagaguaaaacacacugaggaaugcacaugcggauuugccagcaauaaaaccauagaaugugccuguagagauaacaguuacacagcaaaaagaccuuuugucaaauuaaacguggagacugauacagcagaaauaaaauugaugugcacagauacuuauuuggacacccccagaccagaugauggaagcauaacaggcccuugugaaucuaauggggacaaagggaguggaggcaucaagggaggauuuguucaucaaagaauggaauccaagauuggaaggugguacucucgaacgaugucuaagacugaaaggauggggaugggacuguaugucaaguaugauggagacccaugggcugacagugaugcccuagcuuuuaguggaguaaugguuucaaugaaagaaccugguugguacucuuuuggcuucgaaauaaaagauaagaaaugcgauguccccuguauugggauagagaugguacaugaugguggaaaagagacuuggcacucagcagcaacagccauuuacuguuugaugggcucaggacagcugcugugggacacugucacaggcguugacauggcucuguaa

SEQ ID NO: 62201 - RNA, 1401 nt, Artificial Sequence; identical to SEQ ID NO: 62158
  derived and/or modified CDS sequence (wt) from neuraminidase__InfluenzaB__AHL94150

SEQ ID NO: 62202 - RNA, 1401 nt, Artificial Sequence
  derived and/or modified CDS sequence (wt) from neuraminidase__InfluenzaB__AHL94161
augcuaccuucaacuauacaaauguuaacccuauuucucacaucagggggaguacuauuaucacuauaugugucagcuucauuaucauacuuacuauauucggauauauugcuaaaauucucaccaacagaaauaacugcaccaacaaugccauuggauugugcaaacgcaucaaauguucaugcugugaaccguucugcaacaaaaggggugacauuucuucucccagaaccggaguggacauacccgcguuuaucuugcccgggcucaaccuuucagaaagcacuccuaauuagcccucauagauucggagaaaccaaaggaaacucagcucccuugauaauaagggaaccuuuuauugcuuguggaccaaaugaaugcaaacacuuugcucuaacccauuaugcagcccaaccagggggauacuacaauggaacaagaggagacagaaacaagcugaggcaucuaauuucagucaaauugggcaaaaucccaacaguagaaaacuccauuuuccacauggcagcauggagcggguccgcaugccaugaugguaaggaauggacauauaucggaguugaugguccugacaauaaugcauugcucaaaauaaaauauggagaagcauauacugacacauaucauuccuaugcaaacaacauccuaagaacacaagaaagugccugcaauugcaucgggggaaauuguuaucuuaugauaacugauggcucagcuucagguguuagugaaugcagauuucuuaagauucgagagggccgaauaauaaaagaaauauuuccaacaggaagaguaaaacauacugaggagugcacaugcggauuugccagcaauaaaaccauagaaugugccuguagagauaacaguuacacagcaaaaagacccuuugucaaauuaaacguggaaacugauacagcaaaaauaagauugaugugcacagauacuuauuuggacacccccagaccagaugauggaagcauaacaggcccuugugaaucuaauggggacaaagggaguggaggcaucaagggaggauuuguucaucaaagaauggcauccaagauugggaggugguauucucgaacgaugucuaaaacugaaaggaaggggaugggacuguaugucaaguaugauggagacccauggacugacagugaugcccuugcuuuuaggggaguaaugguuucaaugaaagaaccugguugguacuccuuuggcuucgaaauaaaagauaagaaaugcgauguccccuguauugggauagagaugguacaugaugguggaaaagagacuuggcacucagcagcaacagccauuuacuguuuaaugggcucaggacagcugcugugggacacagucacaggugucgacauggcucuauaa

SEQ ID NO: 62203 - RNA, 1401 nt, Artificial Sequence
  derived and/or modified CDS sequence (wt) from neuraminidase__InfluenzaB__AHL94183
augcuaccuucaacuauacaaacguuaacccuauuucucacaucagggggaguauuauuaucacuauaugugucagcuuuauuaucauacuuacuauauucggauauauugcuaaaauucucaccaacagaaauaacugcaccaacaaugucauuggauugugcaaacgcaucaaauguucaggcugugaaccguucugcaacaaaaggggugacauuucuucucccagaaccggaguggacauacccgcguuuaucuugcccgggcucaaccuuucagaaagcacuccuaauuagcccucauagauucggagaaaccaaaggaaacucagcucccuugauaauaagggaaccuuuuauugcuuguggaccaaaugaaugcaaacacuuugcucuaacccauuaugcagcccaaccagggggauacuacaauggaacaagaggagacagaaacaagcugaggcaucuaauuucagucaaauugggcaaaaucccaacaguagaaaacuccauuuuccacauggcagcauggaguggguccgcgugccaugaugguaaggaauggacauauaucggaguugauggcccugacaaugaugcauugcucaaaguaaaauauggagaagcauauacugacacauaccauuccuaugcaaacaaaauccuaagaacacaagaaagugccugcaauugcaucgggggaaauuguuaucuuaugauaacugauggcucagcuucagguguuagugaaugcagauuucuuaagauucgagagggccgaauaauaaaagaaauacuuccaacaggaagaguaaaacacacugaggaaugcacaugcggauuugccagcaauaaaaccauagaaugugccuguagagauaacaguuacacagcaaaaagaccuuuugucaaauuaaacguggagacugauacagcagaaauaagauugaugugcacagauacuuauuuggacacccccagaccagaugauggaagcauaacaggcccuugugaaucuaauggagacaaagggaguggaggcaucaagggaggauuuguucaucaaagaauggaauccaagauuggaaggugguacucucgaacgaugucuaagacugaaaggauggggaugggacuguaugucaaguaugauggagacccaugggcugacagugaugcccuagcuuuuaguggaguaaugguuucaaugaaagaaccugguugguacuccuuuggcuucgaaauaaaagauaagaaaugcgauguccccuguauugggauagagaugguacaugaugguggaaaagagacuuggcacucagcagcaacagccauuuacuguuugaugggcucaggacagcugcugugggacacugucacaggcguugacauggcucuguaa

SEQ ID NO: 62204 - RNA, 1404 nt, Artificial Sequence
  derived and/or modified CDS sequence (wt) from neuraminidase__InfluenzaB__AHL94194
augcuaccuucaacuauacaaacguuaacccuauuucucacaucagggggaguauuauuaucacuauaugugucagcuuuauuaucauacuuacuauauucggauauauugcuaaaauucucaccaacagaaauaacugcaccaacaaugucauuggauugugcaaacgcaucaaauguucaggcugugaaccguucugcaacaaaaggggugacauuucuucuucucccagaaccggaguggacauacccgcguuuaucuugcccgggcucaaccuuucagagagcacuccuaauuagcccucauagauucggagaaaccaaaggaaacucagcucccuugauaauaagggaaccuuuuauugcuuguggaccaaaugaaugcaaacacuuugcucuaacccauuaugcagcccaaccagggggauacuacaauggaacaagaggagacagaaacaagcugaggcaucuaauuucagucaaauugggcaaaaucccaacaguagaaaacuccauuuuccacauggcagcauggagcggguccgcuugccaugaugguaaggaauggacauauaucggaguugauggcccugacaaugaugcauugcucaaaguaaaauauggagaagcauauacugacacauaccauuccuaugcaaacaaaauccuaagaacacaagaaagugccugcaauugcaucgggggaaauuguuaucuuaugauaacugauggcucagcuucagguguuagugaaugcagauuucuuaagauucgagagggccgaauaauaaaagaaauauuuccaacaggaagaguaaaacacacugaggaaugcacaugcggauuugccagcaauaaaaccauagaaugugccuguagagauaacaguuacacagcaaaaagaccuuuugucaaauuaaacguggagacugauacagcagaaauaagauugaugugcacagauacuuauuuggacacccccagaccagaugauggaagcauaacaggcccuugugaaucuaauggggacaaggggaguggaggcaucaagggaggauuuguucaucaaagaauggaauccaagauuggaaggugguacucucgaacgaugucuaagacugaaaggauggggaugggacuguaugucaaguaugauggagacccaugggcugacagugaugcccuagcuuuuaguggaguaaugguuucaaugaaagaaccugguugguacucuuuuggcuucgaaauaaaagauaagaaaugcgauguccccuguauugggauagagaugguacaugaugguggaaaagagacuuggcacucagcagcaacagccauuuacuguuuaaugggcucaggacagcugcugugggacacugucacaggcguugacauggcucuguaa

SEQ ID NO: 62205 - RNA, 1401 nt, Artificial Sequence; identical to SEQ ID NO: 62151
  derived and/or modified CDS sequence (wt) from neuraminidase__InfluenzaB__AHL94205

SEQ ID NO: 62206 - RNA, 1401 nt, Artificial Sequence; identical to SEQ ID NO: 62165
  derived and/or modified CDS sequence (wt) from neuraminidase__InfluenzaB__AHL94214

SEQ ID NO: 62207 - RNA, 1401 nt, Artificial Sequence
  derived and/or modified CDS sequence (wt) from neuraminidase__InfluenzaB__AHL94224
augcuaccuucaacuauacaaauguuaacccuauuucucacaucagggggaguacuauuaucacuauaugugucagcuucauuaucauacuuacuauauucggauauauugcuaaaauucucaccaacagaaauaacugcaccaacaaugccauuggauugugcaaacgcaucaaauguucaugcugugaaccguucugcaacaaaaggggugacauuucuucucccagaaccggaguggacauacccgcguuuaucuugcccgggcucaaccuuucagaaagcacuccuaauuagcccucauagauucggagaaaccaaaggaaacucagcucccuugauaauaagggaaccuuuuauugcuuguggaccaaaugaaugcaaacacuuugcucuaacccauuaugcagcccaaccagggggauacuacaauggaacaagaggagacagaaacaagcugaggcaucuaauuucagucaaauugggcaaaaucccaacaguagaaaacuccauuuuccacauggcagcauggagcggguccgcaugccaugaugguaaggaauggacauauaucggaguugaugguccugacaauaaugcauugcucaaaauaaaauauggagaagcauauacugacacauaucauuccuaugcaaacaacauccuaagaacacaagaaagugccugcaauugcaucgggggaaauuguuaucuuaugauaacugauggcucagcuucagguguuagugaaugcagauuucuuaagauucgagagggccgaauaauaaaagaaauauuuccaacaggaagaguaaaacacacugaggagugcacaugcggauuugccagcaauaaaaccauagaaugugccuguagagauaacaguuacacagcaaaaagacccuuugucaaauuaaacguggaaacugauacagcagaaauaagauugaugugcacagauacuuauuuggacacccccagaccagaugauggaagcauaacaggcccuugugaaucuaauggggacaaagggaguggaggcaucaagggaggauuuguucaucaaagaauggcauccaagauugggaggugguacucucgaacgaugucuaaaacugaaaggaaggggaugggacuguaugucaaguaugauggagacccauggauugacagugaugcccuugcuuuuaggggaguaaugguuucaaugaaagaaccugguugguacuccuuuggcuucgaaauaaaagauaagaaaugcgauguccccuguauugggauagagaugguacaugaugguggaaaagagacuuggcacucagcagcaacagccauuuacuguuuaaugggcucaggacagcugcugugggacacagucacaggugucgacauggcucuauaa

SEQ ID NO: 62208 - RNA, 1401 nt, Artificial Sequence; identical to SEQ ID NO: 62151
  derived and/or modified CDS sequence (wt) from neuraminidase__InfluenzaB__AHL94235

SEQ ID NO: 62209 - RNA, 1401 nt, Artificial Sequence; identical to SEQ ID NO: 61131
  derived and/or modified CDS sequence (wt) from neuraminidase__InfluenzaB__AHL94246

SEQ ID NO: 62210 - RNA, 1401 nt, Artificial Sequence; identical to SEQ ID NO: 62165
  derived and/or modified CDS sequence (wt) from neuraminidase__InfluenzaB__AHL94257

SEQ ID NO: 62211 - RNA, 1401 nt, Artificial Sequence
  derived and/or modified CDS sequence (wt) from neuraminidase__InfluenzaB__AHL94267
augcuaccuucaacuauacaaacguuaaccuuauuucucacaucagggggaguguuauuaucacuauaugugucagcuucauugucauacuuacuauauucggauauauugcuaaaauuuucacgaacagaaauaacugcaccaauaaugccauuggauugugcaaacgcaucaaauguucaggcugugaaccguucugcaacaaaaggggugacacuucuucucccagaaccggaguggacguacccccguuuaucuugcccgggcucaaccuuucagaaagcacuccuaauuagcccccauagauucggagaaaccaaaggaaacucagcucccuugauaauaagggaaccuuuuauugcuuguggaccaaaggaaugcaaacauuuugcucuaacccauuaugcagcucaaccagggggauacuacaauggaacaagagaagacagaaacaaguugaggcaucuaauuucagucaaauugggcaaaaucccgacaguagaaaacucuauuuuccacauggcagcuuggagcggguccgcaugccaugaugguagagaauggacuuauaucggaguugauggccccgacaguaaugcauugcucaaaauaaaauauggagaagcauauacugacacauaccauuccuaugcaaaaaacauccuaaggacacaagaaagugccugcaauugcaucgggggagauuguuaucuuaugauaacugauggcccagcuucagggauuagugaaugcagauuccuuaagauucgagagggccgaauaauaaaagaaauauuuccaacaggaagaguaaaacauacugaggaaugcacaugcggauuugccagcaacaaaaccauagaaugugccuguagagauaacaguuacacagcaaaaagacccuuugucaaauuaaauguggagacugauacagcggaaauaagauugaugugcacagagacuuauuuggacacccccagaccaaaugauggaagcauaacagggccuugcgaaucuaauggggacaaagggaguggaggcaucaagggaggauuuguucaccaaagaauggcauccaagauuggaaggugguacucucgaacgaugucuaaaacuaaaagaauggggaugggacuguauguaaaguaugauggagacccauggacugacagugaagcccuugcucuuaguggagugaugguuucaauggaagaaccugguugguauuccuuuggcuucgaaauaaaagauaagaaaugugauguccccuguauugggauagaaaugguacaugauggugggaaaacgacuuggcacucagcagcaacagccauuuacuguuuaaugggcucaggacaacugcugugggacacugucacagguguuaauaugacucuguaa

SEQ ID NO: 62212 - RNA, 1401 nt, Artificial Sequence; identical to SEQ ID NO: 62211
  derived and/or modified CDS sequence (wt) from neuraminidase__InfluenzaB__AHL94278

SEQ ID NO: 62213 - RNA, 1401 nt, Artificial Sequence; identical to SEQ ID NO: 62211
  derived and/or modified CDS sequence (wt) from neuraminidase__InfluenzaB__AHL94299

SEQ ID NO: 62214 - RNA, 1401 nt, Artificial Sequence
  derived and/or modified CDS sequence (wt) from neuraminidase__InfluenzaB__AHL94310
augcuaccuucaacuauacaaacguuaaccuuauuucucacaucagggggaguguuauuaucacuauaugugucagcuucauugucauacuuacuauauucggauauauugcuaaaauuuucacgaacagaaauaacugcaccaauaaugccauuggauugugcaaaugcaucaaauguucaggcugugaaccguucugcaacaaaaggggugacaccucuucucccagaaccggaguggacguacccucguuuaucuugcccgggcucaaccuuucagaaagcacuccuaauuagcccccauagauucggagaaaccaaaggaaacucagcucccuugauaauaagggaaccuuuuauugcuuguggaccaaaggaaugcaaacauuuugcucuaacccauuaugcagcucaaccagggggauacuacaauggaacaagagaagacagaaacaagcugaggcaucuaauuucagucaaauugggcaaaaucccaacaguagaaaacucuauuuuccacauggcagcuuggagcggguccgcaugccaugaugguagagaauggacuuauaucggaguugauggcccagacaguaaugcauugcucaaaauaaaguauggagaagcauauacugacacauaccauuccuaugcaaaaaacauccuaaggacacaagaaagugccugcaauugcaucgggggagauuguuaucuuaugauaacugauggcucagcuucagggauuagugaaugcagauuccuuaagauucgagagggccgaauaauaaaagaaauauuuccaacaggaagaguaaaacauacugaggaaugcacaugcggauuugccagcaacaaaaccauagaaugugccuguagagauaacaguuacacagcaaaaagacccuuugucaaauuaaauguggagacugauacagcggaaauaagauugaugugcacagagacuuauuuggacacccccagaccaaaugauggaagcauagcagggccuugcgaaucuaauggggacgaagggaguggaggcaucaagggaggauuuguucaccaaagaauggcauccaagauuggaaggugguacucucggacgaugucuaaaacuaaaagaauggggaugggacuguauguaaaguaugauggagacccauggacugacagugaagcccuugcucuuaguggaguaaugguuucaauggaagaaccugguugguauuccuuuggcuucgaaauaaaagauaagaaaugugauguccccuguauugggauagaaaugguacaugauggugggaaaacgacuuggcacucagcagcaacagccauuuacuguuuaaugggcucaggacaacugcugugggacacugucacagguguuaauaugacucuguaa

SEQ ID NO: 62215 - RNA, 1401 nt, Artificial Sequence; identical to SEQ ID NO: 62214
  derived and/or modified CDS sequence (wt) from neuraminidase__InfluenzaB__AHL94321

SEQ ID NO: 62216 - RNA, 1401 nt, Artificial Sequence
  derived and/or modified CDS sequence (wt) from neuraminidase__InfluenzaB__AHL94332
augcuaccuucaacuauacaaacguuaaccuuauuucucacaucagggggaguguuauuaucacuauaugugucagcuucauugucauacuuacuauauucggauauauugcuaaaauuuucacgaacagaaauaacugcaccaauaaugccauuggauugugcgaaugcaucaaauguucaggcugugaaccguucugcaacaaaaggggugacaccucuucucccagaaccggaguggacguacccucguuuaucuugcccgggcucaaccuuucagaaagcacuccuaauuagcccccauagauucggagaaaccaaaggaaacucagcucccuugauaauaagggaaccuuuuauugcuuguggaccaaaggaaugcaaacauuuugcucuaacccauuaugcagcucaaccagggggauauuacaauggaacaagagaagacagaaacaagcugaggcaucuaauuucagucaaauugggcaaaaucccaacaguagaaaacucuauuuuccacauggcagcuuggagcggguccgcaugccaugaugguagagaauggacuuauaucggaguugauggcccagacaguaaugcauugcucaaaauaaaguauggagaagcauauacugacacauaccauuccuaugcaaaaaacauccuaaggacacaagaaagugccugcaauugcaucgggggagauuguuaucuuaugauaacugauggcccagcuucagggauuagugaaugcagauuccuuaagauucgagagggccgaauaauaaaagaaauauuuccaacaggaagaguaaaacauacugaggaaugcacaugcggauuugccagcaacaaaaccauagaaugugccuguagagauaacaguuacacagcaaaaagacccuuugucaaauuaaauguggagacugauacagcggaaauaagauugaugugcacagagacuuauuuggacacccccagaccaaaugauggaagcauaacagggccuugcgaaucuaauggggacgaagggaguggaggcaucaagggaggauuuguucaccaaagaauggcauccaagauuggaaggugguacucucggacgaugucuaaaacuaaaagaauggggaugggacuguauguaaaguaugauggagacccauggacugacagugaagcccuugcucuuaguggaguaaugguuucaauggaagaaccugguugguauuccuuuggcuucgaaauaaaagauaagaaaugugauguccccuguauugggauagaaaugguacaugauggugggaaaacgacuuggcacucagcagcaacagccauuuacuguuuaaugggcucaggacaacugcugugggacacugucacagguguuaauaugacucuguaa

SEQ ID NO: 62217 - RNA, 1401 nt, Artificial Sequence; identical to SEQ ID NO: 62211
  derived and/or modified CDS sequence (wt) from neuraminidase__InfluenzaB__AHL94343

SEQ ID NO: 62218 - RNA, 1401 nt, Artificial Sequence
  derived and/or modified CDS sequence (wt) from neuraminidase__InfluenzaB__AHL94354
augcuaccuucaacuauacaaacguuaacccuauuucucacaucagggggaguauuauuaucacuauaugugucagcuucauuaucauacuuacuauauucggauauauugcuaaaauucucaccaacagaaauaacugcaccaacaaugccauuggauugugcaaacgcaucaaauguucaggcugugaaccguucugcaacaaaaggggugacacuucuucucccagaaccggaguggacauacccgcguuuaucuugcccgggcucaaccuuucagaaagcacuccuaauuagcccucauagauucggagaaaccaaaggaaacucagcucccuugauaauaagggaaccuuuuauugcuuguggaccaaaugaaugcaaacacuuugcucuaacccauuaugcagcccaaccagggggauacuacaauggaacaagaggagacagaaacaagcugaggcaucuaauuucagucaaauugggcaaaaucccaacaguagaaaacuccauuuuccacauggcagcauggagcggguccgcgugccaugaugguaaggaauggacauauaucggaguugauggcccugacaauaaugcauugcucaaaguaaaauauggagaagcauauacugacacauaccacuccuaugcaaacaaaauccuaagaacacaagaaagugccugcaauugcaucgggggaaauuguuaucuaaugauaacugauggcucagcuucagguguuagugaaugcagauuucuuaagauucgagagggccgaauaauaaaagaaauauuuccaacaggaagaguaaaacacacugaggaaugcacaugcggauuugccagcaauaaaaccauagaaugugccuguagagacaacagguacacagcaaaaagaccuuuugucaaauuaaacguggagacugauacagcagaaauaagauugaugugcacagauacuuauuuggacacccccagaccaaaugauggaagcauaacaggcccuugugaaucugauggggacaaagggaguggaggcaucaagggaggauuuguucaucaaagaaugaaauccaagauuggaaggugguacucucgaacgaugucuaaaacugaaaggauggggaugggacuguaugucaaguaugauggagacccaugggcugacagugaugcccuagcuuuuaguggaguaaugguuucaaugaaagaaccugguugguacuccuuuggcuucgaaauaaaagauaagaaaugcgauguccccuguauugggauagagaugguacaugaugguggaaaagagacuuggcacucagcagcaacagccauuuacuguuuaaugggcucaggacagcuucugugggacacugucacagguguugacauggcucuguaa

SEQ ID NO: 62219 - RNA, 1401 nt, Artificial Sequence
  derived and/or modified CDS sequence (wt) from neuraminidase__InfluenzaB__AHL94365
augcuaccuucaacuauacaaacguuaacccuauuucucacaucagggggaguauuauuaucacuauaugugucagcuucauuaucauacuuacuauauucggauauauugcuaaaauucucaccaacagaaauaacugcaccaacaaugccauuggauugugcaaacgcaucaaauguucaggcugugaaccguucugcaacaaaaggggugacacuucuucucccagaaccggaguggacauacccgcguuuaucuugcccgggcucaaccuuucagaaagcacuccuaauuagcccucauagauucggagaaaccaaaggaaacucagcucccuugauaauaagggaaccuuuuauugcuuguggaccaaaugaaugcaaacacuuugcucuaacccauuaugcagcccaaccagggggauacuacaauggaacaagaggagacagaaacaagcugaggcaucuaauuucagucaaauugggcaaaaucccaacaguagaaaacuccauuuuccacauggcagcauggagcggguccgcgugccaugaugguaaggaauggacauauaucggaguugauggcccugacaauaaugcauugcucaaaguaaaauauggagaagcauauacugacacauaccacuccuaugcaaacaaaauccuaagaacacaagaaagugccugcaauugcaucgggggaaauuguuaucuaaugauaacugauggcucagcuucagguguuagugaaugcagauuucuuaagauucgagagggccgaauaauaaaagaaauauuuccaacaggaagaguaaaacacacugaggaaugcacaugcggauuugccagcaauaaaaccauagaaugugccuguagagacaacagguacacagcaaaaagaccuuuugucaaauuaaacguggagacugauacagcagaaauaagauugaugugcacagauacuuauuuggacacccccagaccaaaugauggaagcauaacaggcccuugugaaucugauggggacaaagggaguggaggcaucaagggaggauuuguucaucaaagaaugaaauccaagauuggaaggugguacucucgaacgaugucuaaaacugaaaggauggggaugggacuguaugucaaguaugauggagacccaugggcugacagugaugcccuagcuuuuaguggaguaaugguuucaaugaaagaaccugguugguacuccuuuggcuucgaaauaaaagauaagaaaugcgauguccccuguauugggauagagaugguacaugaugguggaaaagagacuuggcacucagcagcaacagccauuuacuguuuaaugggcucaggacagcugcugugggacacugucacagguguugacauggcucuguaa

SEQ ID NO: 62220 - RNA, 1401 nt, Artificial Sequence
  derived and/or modified CDS sequence (wt) from neuraminidase__InfluenzaB__AHL94387
augcuaccuucaacuauacaaacguuaacccuauuucucacaucagggggaguauuauuaucacuauaugugucagcuucauuaucauacuuacuauauucggauauauugcuaaaauucucaccaacagaaauaacugcaccaacaaugccauuggauugugcaaacgcaucaacuguucaggcugugaaccguucugcaacaaaaggggugacacuucuucucccagaaccggaguggacauacccgcguuuaucuugcccgggcucaaccuuucagaaagcacuccuaauuagcccucauagauucggagaaaccaaaggaaacucagcucccuugauaauaagggaaccuuuuauugcuuguggaccaaaugaaugcaaacacuuugcucuaacccauuaugcagcccaaccagggggauacuacaauggaacaagaggagacagaaacaagcugaggcaucuaauuucagucaaauugggcaaaaucccaacaguagaaaacuccauuuuccacauggcagcauggagcggguccgcgugccaugaugguaaggaauggacauaucucggaguugauggcccugacaauaaugcauugcucaaaguaaaauauggagaagcauauacugacacauaccauuccuaugcaaacaaaauccuaagaacacaagaaagugccugcaauugcaucgggggaaauuguuaucuaaugauaacugauggcucagcuucagguguuagugaaugcagauuucuuaagauucgagagggccgaauaauaaaagaaauauuuccaacaggaagaguaaaacacacugaggaaugcacaugcggauuugccagcaauaaaaccauagaaugugccuguagagacaacagguacacagcaaaaagaccuuuugucaaauuaaacguggagacugauacagcagaaauaagauugaugugcacagauacuuauuuggacacccccagaccaaaugauggaagcauaacaggcccuugugaaucugauggggacaaagggaguggaggcaucaagggaggauuuguucaucaaagaaugaaauccaagauuggaaggugguacucucgaacgaugucuaaaacugaaaggauggggaugggacuguaugucaaguaugauggagacccaugggcugacagugaugcccuagcuuuuaguggaguaaugguuucaaugaaagaaccugguugguacuccuuuggcuucgaaauaaaagauaagaaaugcgauguccccuguauugggauagagaugguacaugaugguggaaaagagauuuggcacucagcagcaacagccauuuacuguuuaaugggcucaggacagcugcugugggacacugucacagguguugacauggcucuguaa

SEQ ID NO: 62221 - RNA, 1404 nt, Artificial Sequence
  derived and/or modified CDS sequence (wt) from neuraminidase__InfluenzaB__AHL94398
augcuaccuucaacuauacaaacguuaacccuauuucucacaucagggggaguauuauuaucacuauaugugucagcuucauuaucauacuuacuauauucggauauauugcuaaaauucucaccaacagaaauaacugcaccaacaaugccauuggauugugcaaacgcaucaaauguucaggcugugaaccguucugcaacaaaaggggugacacuucuucuucucccagaaccggaguggacauacccgcguuuaucuugcccgggcucaaccuuucagaaagcacuccuaauuagcccucauagauucggagaaaccaaaggaaacucagcucccuugauaauaagggaaccuuuuauugcuuguggaccaaaugaaugcaaacacuuugcucuaacccauuaugcagcccaaccagggggauacuacaauggaacaagaggagacagaaacaagcugaggcaucuaauuucagucaaauugggcaaaaucccaacaguagaaaacuccauuuuccacauggcagcauggagcggguccgcgugccaugaugguaaggaauggacauauaucggaguugauggcccugacaauaaugcauugcucaaaguaaaauauggagaagcauauacugacacauaccauuccuaugcaaacaaaauccuaagaacacaagaaagugccugcaauugcaucgggggaaauuguuaucuaaugauaacugauggcucagcuucagguguuagugaaugcagauuucuuaagauucgagagggccgaauaauaaaagaaauauuuccaacaggaagaguaaaacacacugaggaaugcacaugcggauuugccagcaacaaaaccauagaaugugccuguagagacaacagguacacagcaaaaagaccuuuugucaaauuaaacguggagacugauacagcagaaauaagauugaugugcacagauacuuauuuggacacccccagaccaaaugauggaagcauaacaggcccuugugaaucugauggggacaaagggaguggaggcaucaagggaggauuuguucaucaaagaaugaaauccaagauuggaaggugguacucucgaacgaugucuaaaacugaaaggauggggaugggacuguaugucaaguaugauggagacccaugggcugacagugaugcccuagcuuuuaguggaguaaugguuucaaugaaagaaccugguugguacuccuuuggcuucgaaauaaaagauaagaaaugcgauguccccuguauugggauagagaugguacaugaugguggaaaagagacuuggcacucagcagcaacagccauuuacuguuuaaugggcucaggacagcugcugugggacacugucacagguguugacauggcucuguaa

SEQ ID NO: 62222 - RNA, 1401 nt, Artificial Sequence
  derived and/or modified CDS sequence (wt) from neuraminidase__InfluenzaB__AHL94409
augcuaccuucaacuauacaaacguuaacccuauuucucacaucagggggaguauuauuaucacuauaugugucagcuucauuaucauacuuacuauauucggauauauugcuaaaauucucaccaacagaaauaacugcaccaacaaugccauuggauugugcaaacgcaucaaauguucaggcugugaaccguucugcaacaaaaggggugacacuucuucucccagaaccggaguggacauacccgcguuuaucuugcccgggcucaaccuuucagaaagcacuccuaauuagcccucauagauucggagaaaccaaaggaaacucagcucccuugauaauaagggaaccuuuuauugcuuguggaccaaaugaaugcaaacacuuugcucuaacccauuaugcagcccaaccagggggauacuacaauggaacaagaggagacagaaacaagcugaggcaucuaauuucagucaaauugggcaaaaucccaacaguagaaaacuccauuuuccacauggcagcauggagcggguccgcgugccaugaugguaaggaauggacauauaucggaguugauggcccugacaauaaugcauugcucaaaguaaaauauggagaagcauauacugacacauaccauuccuaugcaaacaaaauccuaagaacacaagaaagugccugcaauugcaucgggggaaauuguuaucuaaugauaacugauggcucagcuucagguguuagugaaugcagauuucuuaagauucgagagggcagaauaauaaaagaaauauuuccaacaggaagaguaaaacacacugaggaaugcacaugcggauuugccagcaauaaaaccauagaaugugccuguagagacaacagguacacagcaaaaagaccuuuugucaaauuaaacguggagacugauacagcagaaauaagauugaugugcacagauacuuauuuggacacccccagaccaaaugauggaagcauaacaggcccuugugaaucugauggggacaaagggaguggaggcaucaagggaggauuuguucaucaaagaaugaaauccaagauuggaaggugguacucucgaacgaugucuaaaacugaaaggauggggaugggacuguaugucaaguaugauggagacccaugggcugacagugaugcccuagcuuuuaguggaguaaugguuucaaugaaagaaccugguugguacuccuuuggcuucgaaauaaaagauaagaaaugcgauguccccuguauugggauagagaugguacaugaugguggaaaagagacuuggcacucagcagcaacagccauuuacuguuuaaugggcucaggacagcugcugugggacacugucacagguguugacauggcucuguaa

SEQ ID NO: 62223 - RNA, 1401 nt, Artificial Sequence
  derived and/or modified CDS sequence (wt) from neuraminidase__InfluenzaB__AHL94431
augcuaccuucaacuauacaaacguuaacccuauuucucacaucagggggaguguuauuaucacuauaugugucagcuucauugucauacuuacuauauucggauauauugcuaaaauuuucacagacagaaauaacugcaccaauaaugccauuggauugugcaaacgcaucaaauguucaggcugugaaucauucugcagcaaaaggggugacacuuauucucccagaaccggaauggacauacccucguuuaucuugcccgggcucaaccuuucagaaagcacuccuaauuagcccccauagauucggagaaaucaaaggaaacucagcucccuugauaauaagggaaccuuuuauugcuuguggaccaacggaaugcaaacacuuugcucuaacccauuaugcagcucaaccagggggauacuacaauggaacaagagaagacagaaacaagcugaggcaucuaauuucagucaaauugggcaaaaucccaacaguagaaaacuccauuuuccacauggcagcuuggagcggguccgcaugccaugaugguaaagaauggacauauaucggaguugauggccccgacaguaaugcauugcucaaaauaaaauauggagaagcauauacugacacauaccauuccuaugcaaaaaacauccuaaggacacaagaaagugccugcaauugcaucgggggagauuguuaucuuaugauaacugauggcccagcuucagggguuagugaaugcagauuccuuaagauucgagagggcagaauaauaaaagaaauauuuccaacaggaagaguaaaacauacugaggaaugcacaugcggauuugccagcaacaaaaccauagaaugugcuuguagagauaaccguuacacagcaaaaagacccuuugucaaauuaaauguggagacugauacagcggaaauaagauugaugugcacagagacuuauuuggacacccccagaccaaaugauggaagcauaacagggccuugcgaaucugauggggacaaagggaguggaggcaucaagggaggauuuguucaucaaagaauggcauccaagauuggaaggugguacucucgaacgaugucuaaaaccaaaagaauggggaugggacuguauguaaaauaugauggagacccauggacugacagugaagcccuugcucuuaguggaguaaugauuucaauggaagaaccugguugguauuccuuuggcuucgaaauaaaagauaagaaaugugauguccccuguauugggauagaaaugguacaugauggugggaaaacgacuuggcacucagcagcaacagccauuuauuguuuaaugggcucaggacaauugcugugggacacugucacagguguugauauggcucuguaa

SEQ ID NO: 62224 - RNA, 1401 nt, Artificial Sequence
  derived and/or modified CDS sequence (wt) from neuraminidase__InfluenzaB__AHL94442
augcuaccuucaacuauacaaacguuaaccuuauuucucacaucagggggaguguuauuaucacuauauaugucagcuucauugucauacuuacuauauucggauauauugcuaaaauuuucacgaacagaaauaacugcaccaauaaugccauuggauugugcaaaugcaucaaauguucaggcugugaaccguucugcaacaaaaggggugacaccucuucucccagaaccggaguggacguacccucguuuaucuugcccgggcucaaccuuucagaaagcacuccuaauuagcccccauagauucggagaaaccaaaggaaacucagcucccuugauaauaagggaaccuuuuauugcuuguggaccaaaggaaugcaaacauuuugcucuaacccauuaugcagcucaaccagggggauacuacaauggaacaagagaagacagaaacaagcugaggcaucuaauuucagucaaauugggcaaaaucccaacaguagaaaacucuauuuuccacauggcagcuuggagcggguccgcaugccaugaugguagagaauggacuuauaucggaguugauggcccagacaguaaugcauugcucaaaauaaaguauggagaagcauauacugacacauaccauuccuaugcaaaaaacauccuaaggacacaagaaagugccugcaauugcaucgggggagauuguuaucuuaugauaacugauggcucagcuucagggauuagugaaugcagauuccuuaagauucgagagggccgaauaauaaaagaaauauuuccaacaggaagaguaaaacauacugaggaaugcacaugcggauuugccagcaacaaaaccauagaaugugccuguagagauaacaguuacacagcaaaaagacccuuugucaaauuaaauguggagacugauacagcggaaauaagauugaugugcacagagacuuauuuggacacccccagaccaaaugauggaagcauagcagggccuugcgaaucuaauggggacgaagggaguggaggcaucaagggaggauuuguucaccaaagaauggcauccaagauuggaaggugguacucucggacgaugucuaaaacuaaaagaauggggaugggacuguauguaaaguaugauggagacccauggacugacagugaagcccuugcucuuaguggaguaaugguuucaauggaagaaccugguugguauuccuuuggcuucgaaauaaaagauaagaaaugugauguccccuguauugggauagaaaugguacaugauggugggaaaacgacuuggcacucagcagcaacagccauuuacuguuuaaugggcucaggacaacugcugugggacacugucacagguguuaauaugacucuguaa

SEQ ID NO: 62225 - RNA, 1401 nt, Artificial Sequence
  derived and/or modified CDS sequence (wt) from neuraminidase__InfluenzaB__AHL94464
augcuaccuucaacuauacaaacguuaaccuuauuucucacaucagggggaguguuauuaucacuauaugugucagcuucauugucauacuuacuauauucggauauauugcuaaaauuuucacgaacagaaauaacugcaccaauaaugccauuggauugugcaaaugcaucaaauguucaggcugugaaccguucugcgacaaaaggggugacaccucuucucccagaaccggaguggacguacccucguuuaucuugcccgggcucaaccuuucagaaagcacuccuaauuagcccccauagauucggagaaaccaaaggaaacucagcucccuugauaauaagggaaccuuuuauugcuuguggaccaaaggaaugcaaacauuuugcucuaacccauuaugcagcucaaccagggggauacuacaauggaacaagagaagacagaaacaagcugaggcaucuaauuucagucaaauugggcaaaaucccaacaguagaaaacucuauuuuccacauggcagcuuggagcggguccgcaugccaugaugguagagaauggacuuauaucggaguugauggcccagacaguaaugcauugcucaaaauaaaguauggagaagcauauacugacacauaccauuccuaugcaaaaaacauccuaaggacacaagaaagugccugcaauugcaucgggggagauuguuaucuuaugauaacugauggcucagcuucagggauuagugaaugcagauuccuuaagauucgagagggccgaauaauaaaagaaauauuuccaacaggaagaguaaaacauacugaggaaugcacaugcggauuugccagcaacaaaaccauagaaugugccuguagagauaacaguuacacagcaaaaagacccuuugucaaauuaaauguggagacugauacagcggaaauaagauugaugugcacagagacuuauuuggacacccccagaccaaaugauggaagcauagcagggccuugcgaaucuaauggggacgaagggaguggaggcaucaagggaggauuuguucaccaaagaauggcauccaagauuggaaggugguacucucggacgaugucuaaaacuaaaagaauggggaugggacuguauguaaaguaugauggagacccauggacugacagugaagcccuugcucuuaguggaguaaugguuucaauggaagaaccugguugguauuccuuuggcuucgaaauaaaagauaagaaaugugauguccccuguauugggauagaaaugguacaugauggugggaaaacgacuuggcacucagcagcaacagccauuuacuguuuaaugggcucaggacaacugcugugggacacugucacagguguuaauaugacucuguaa

SEQ ID NO: 62226 - RNA, 1401 nt, Artificial Sequence; identical to SEQ ID NO: 62211
  derived and/or modified CDS sequence (wt) from neuraminidase__InfluenzaB__AHL94475

SEQ ID NO: 62227 - RNA, 1401 nt, Artificial Sequence
  derived and/or modified CDS sequence (wt) from neuraminidase__InfluenzaB__AHL94486
augcuaccuucaacuauacaaacguuaacccuauuucucacaucagggggaguauuauuaucacuauaugugucagcuucauuaucauacuuacuauauucggauauauugcuaaaauucucaccaacagaaauaacugcaccaacaaugccauuggauugugcaaacgcaucaaauguucaggcugugaaccguucugcaacaaaaggggugacacuucuucucccagaaccggaguggacauacccgcguuuaucuugcccgggcucaaccuuucagaaagcacuccuaauuagcccucauagauucggagaaaccaaaggaaacucagcucccuugauaauaagggaaccuuuuauugcuuguggaccaaaugaaugcaaacacuuugcucuaacccauuaugcagcccaaccagggggauacuacaauggaacaagaggagacagaaacaagcugaggcaucuaauuucagucaaauugggcaaaaucccaacaguagaaaacuccauuuuccacauggcagcauggagcggguccgcgugccaugaugguaaggaauggacauauaucggaguugauggcccugacaauaaugcauugcucaaaguaaaauauggagaagcauauacugacacauaccauuccuaugcaaacaaaauccuaagaacacaagaaagugccugcaauugcaucgggggaaauuguuaucuaaugauaacugauggcucagcuucagguguuagugaaugcagauuucuuaagauucgagagggccgaauaauaaaagaaauauuuccaacaggaagaguaaaacacacugaggaaugcacaugcggauuugccagcaauaaaaccauagaaugugccuguagagacaacagguacacagcaaaaagaccuuuugucaaauuaaacguggagacugauacagcagaaauaagauugaugugcacagauacuuauuuggacacccccagaccaaaugauggaagcauaacaggcccuugugaaucugauggggacaaagggaguggaggcaucaagggaggguuuguucaucaaagaaugaaauccaagauuggaaggugguacucucgaacgaugucuaaaacugaaaggauggggaugggacuguaugucaaguaugauggagacccaugggcugacagugaugcccuagcuuuuaguggaguaaugguuucaaugaaagaaccugguugguauuccuuuggcuucgaaauaaaagauaagaaaugcgauguccccuguauugggauagagaugguacaugaugguggaaaagagacuuggcacucagcagcaacagccauuuacuguuuaaugggcucaggacagcugcugugggacacugucacagguguugacauggcucuguaa

SEQ ID NO: 62228 - RNA, 1401 nt, Artificial Sequence; identical to SEQ ID NO: 62211
  derived and/or modified CDS sequence (wt) from neuraminidase__InfluenzaB__AHL94497

SEQ ID NO: 62229 - RNA, 1401 nt, Artificial Sequence; identical to SEQ ID NO: 62214
  derived and/or modified CDS sequence (wt) from neuraminidase__InfluenzaB__AHL94508

SEQ ID NO: 62230 - RNA, 1401 nt, Artificial Sequence
  derived and/or modified CDS sequence (wt) from neuraminidase__InfluenzaB__AHL94519
augcuaccuucaacuauacaaacguuaacccuauuucucacaucagggggaguauuauuaucacuauauguaucagcuucauuaucauacuuauuauauucggauauauugcuaaaauucucaccaacagaaauaacugcaccaacaaugccauuggauugugcaaacgcaucaaauguucaggcugugaaccguucugcaacaaaaggggugacacuucuucucccagaaccggaguggacauacccgcguuuaucuugcccgggcucaaccuuucagaaagcacuccuaauuagcccucauagauucggagaaaccaaaggaaacucagcucccuugauaauaagggaaccuuuuauugcuuguggaccaaaugaaugcaaacacuuugcgcuaacccauuaugcagcccaaccagggggauacuacaauggaacaagaggagacagaaacaagcugaggcaucuaauuucagucaaauugggcaaaaucccaacaguagaaaacuccauuuuccacauggcagcauggagcggguccgcgugccaugaugguaaggaauggacauauaucggaguugauggcccugacaauaaugcauugcucaaaguaaaauauggagaagcauacacugacacauaccauuccuaugcaaacaaaauccuaagaacacaagaaagugccugcaauugcaucgggggaaauuguuaucuuaugauaacugauggcucagcuucagguguuagugaaugcagauuucuuaagauucgagagggccgaauaauaaaagaaauauuuccaacaggaagaguaaaacacacugaggaaugcacaugcggauuugccagcaauaaaaccauagaaugugccuguagagauaacaguuacacagcaaaaagaccuuuugucaaauuaaacguggagacugauacagcagaaauaagauugaugugcacagauacuuauuuggacacccccagaccaaaugauggaagcauaacaggcccuugugaaucugauggggacaaagggaguggaggcaucaagggaggauuuguucaucaaagaauggaauccaagauuggaaggugguacucucgaacgaugucuaaaacugaaaggauggggaugggacuguaugucaaguaugauggagacccauggacugacagugaugcucuagcuuuuaguggaguaaugguuucaaugaaagaaccugguugguacuccuuuggcuucgaaauaaaagauaagaaaugcgauguccccuguauugggauagagauggugcaugaugguggaaaagagacuuggcacucagcugcaacagccauuuacuguuuaaugggcucaggacagcugcugugggacacugucacagguguugacauggcucuguaa

SEQ ID NO: 62231 - RNA, 1401 nt, Artificial Sequence; identical to SEQ ID NO: 62214
  derived and/or modified CDS sequence (wt) from neuraminidase__InfluenzaB__AHL94530

SEQ ID NO: 62232 - RNA, 1401 nt, Artificial Sequence
  derived and/or modified CDS sequence (wt) from neuraminidase__InfluenzaB__AHL94541
augcuaccuucaacuauacaaacguuaacccuauuucucacaucagggggaguauuauuaucacuauaugugucagcuucauuaucauacuuacuauauucggauauauugcuaaaauucucaccaacagaaauaacugcaccaacaaugccauuggauugugcaaacgcaucaaauguucaggcugugaaccguucugcaacaaaaggggugacacuucuucucccagaaccggaguggacauacccgcguuuaucuugcccgggcucaaccuuucagaaagcacuccuaauuagcccucauagauucggagaaaccaaaggaaacucagcucccuugauaauaagggaaccuuuuauugcuuguggaccaaaugaaugcaaacacuuugcucuaacccauuaugcagcccaaccagggggauacuacaauggaacaagaggagacagaaacaagcugaggcaucuaauuucagucaaauugggcaaaaucccaacaguagaaaacuccauuuuccacauggcagcauggagcggguccgcgugccaugaugguaaggaauggacauauaucggaguugauggcccugacaauaaugcauugcucaaaguaaaauauggagaagcauauacugacacauaccacuccuaugcaaacaaaauccuaagaacacaagaaagugccugcaauugcaucgggggaaauuguuaucuaaugauaacugauggcucagcuucagguguuagugaaugcagauuucuuaagauucgagagggccgaauaauaaaagaaauauuuccaacaggaagaguaaaacacacugaggaaugcacaugcggauuugccagcaauaaaaccauagaaugugccuguagagacaacagguacacagcaaaaagaccuuuugucaaauuaaacguggagacugauacagcagaaauaagauugaugugcacagauacuuauuuggacacccccagaccaaaugauggaagcauaacaggcccuugugaaucugauggggacaaagggaguggaggcaucaagggaggauuuguucaucaaagaaugaaauccaagauuggaaggugguacucucgaacgaugucuaaaacugaaaggaugggaaugggacuguaugucaaguaugauggagacccaugggcugacagugaugcccuagcuuuuaguggaguaaugguuucaaugaaagaaccugguugguacuccuuuggcuucgaaauaaaagauaagaaaugcgauguccccuguauugggauagagaugguacaugaugguggaaaagagacuuggcacucagcagcaacagccauuuacuguuuaaugggcucaggacagcugcugugggacacugucacagguguugacauggcucuguaa

SEQ ID NO: 62233 - RNA, 1401 nt, Artificial Sequence
  derived and/or modified CDS sequence (wt) from neuraminidase__InfluenzaB__AHL94563
augcuaccuucaacuauacaaacguuaaccuuauuucucacauuagggggaguguuauuaucacuauaugugucagcuucauugucauacuuacuauauucggauauauugcuaaaauuuucacgaacagaaauaacugcaccaauaaugccauuggauugugcaaacgcaucaaauguucaggcugugaaccguucugcaacaaaaggggugacacuucuucucccagaaccggaguggacguacccccguuuaucuugcccgggcucaaccuuucagaaagcacuccuaauuagcccccauagauucggagaaaccaaaggaaacucagcucccuugauaauaagggaaccuuuuauugcuuguggaccaaaggaaugcaaacauuuugcucuaacccauuaugcagcucaaccagggggauacuacaauggaacaagagaagacagaaacaaguugaggcaucuaauuucagucaaauugggcaaaaucccgacaguagaaaacucuauuuuccacauggcagcuuggagcggguccgcaugccaugaugguagagaauggacuuauaucggaguugauggccccgacaguaaugcauugcucaaaauaaaauauggagaagcauauacugacacauaccauuccuaugcaaaaaacauccuaaggacucaagaaagugccugcaauugcaucgggggagauuguuaucuuaugauaacugauggcccagcuucagggauuagugaaugcagauuccuuaagauucgagagggccgaauaauaaaagaaauauuuccaacaggaagaguaaaacauacugaggaaugcacaugcggauuugccagcaacaaaaccauagaaugugcuuguagagauaacaguuacacagcaaaaagacccuuugucaaauuaaauguggagacugauacagcggaaauaagauugaugugcacagagacuuauuuggacacccccagaccaaaugauggaagcauaacagggccuugcgaaucuaauggggacaaagggaguggaggcaucaagggaggauuuguucaccaaagaauggcauccaagauuggaaggugguacucucgaacgaugucuaaaacuaaaagaauggggaugggacuguauguaaaguaugauggagacccauggacugacagugaagcccuugcucuuaguggagugaugguuucaauggaagaaccugguugguauuccuuuggcuucgaaauaaaagauaagaaaugugauguccccuguauugggauagaaaugguacaugauggugggaaaacgacuuggcacucagcagcaacagccauuuacuguuuaaugggcucaggacaacugcugugggacacugucacagguguuaauaugacucuguaa

SEQ ID NO: 62234 - RNA, 1401 nt, Artificial Sequence
  derived and/or modified CDS sequence (wt) from neuraminidase__InfluenzaB__AHL94574
augcuaccuucaacuauacaaacguuaacccuauuucucacaucagggggaguguuauuaucacuauaugugucagcuucauugucauacuuacuauauucggauauauugcuaaaauuuucacagacagaaauaacugcaccaauaaugccauuggauugugcaaacgcaucaaauguucaggcugugaaucguucugcagcaaaaggggugacacuucuucucccagaaccggaguggacauacccucguuuaucuugcccgggcucaaccuuucagaaagcacuccuaauuagcccccauagauucggagaaaucaaaggaaacucagcucccuugauaauaagggaaccuuuuauugcuuguggaccaacggaaugcaaacacuuugcucuaacccauuaugcagcucaaccagggggauacuacaauggaacaagagaagacagaaacaagcugaggcaucuaauuucagucaaauugggcaaaaucccaacaguagaaaacuccauuuuccacauggcagcuuggagcggguccgcaugccaugaugguaaagaauggacauauaucggaguugauggccccgacaguaaugcauugcucaaaauaaaauauggagaagcauauacugacacguaccauuccuaugcaaaaaacauccuaaggacacaagaaagugccugcaauugcaucgggggagauuguuaucuuaugauaacugauggcccagcuucagggguuagugaaugcagauuccuuaagauucgagagggcagaauaauaaaagaaauauuuccaacaggaagaguaaaacauacugaggaaugcacaugcggauuugccagcaacaaaaccauagaaugugcuuguagagauaaccguuacacagcaaaaagacccuuugucaaauuaaauguggagacugauacagcggaaauaagauugaugugcacagagacuuauuuggacacccccagaccaaaugauggaagcauaacagggccuugcgaaucugauggggacaaagggaguggaggcaucaagggaggauuuguucaucaaagaauggcauccaagauuggaaggugguacucucgaacgaugucuaaaaccaaaagaauggggaugggacuguauguaaaguaugauggagacccauggacugacagugaagcccuugcucuuaguggaguaaugguuucaauggaagaaccugguugguauuccuuuggcuucgaaauaaaagauaagaaaugugauguccccuguauugggauagaaaugguacaugauggugggaaaacgacuuggcacucagcagcaacagccauuuauuguuuaaugggcucaggacaauugcugugggacacugucacagguguugauauggcucuguaa

SEQ ID NO: 62235 - RNA, 1401 nt, Artificial Sequence
  derived and/or modified CDS sequence (wt) from neuraminidase__InfluenzaB__AHL94585
augcuaccuucaacuauacaaacguuaacccuauuucucacaucagggggaguguuauuaucacuauaugugucagcuucauugucauacuuacuauauucggauauauugcuaaaauuuucacagacagaaauaacugcaccaauaaugccauuggauugugcaaacgcaucaaauguucaggcugugaaucguucugcagcaaaaggggugacacuucuucucccagaaccggaguggacauacccucguuuaucuugcccgggcucaaccuuucagaaagcacuccuaauuagcccccauagauucggagaaaucaaaggaaacucagcucccuugauaauaagggaaccuuuuauugcuuguggaccaacggaaugcaaacacuuugcucuaacccauuaugcagcucaaccagggggauacuacaauggaacaagagaagacagaaacaagcugaggcaucuaauuucagucaaauugggcaaaaucccaacaguagaaaacuccauuuuccacauggcagcuuggagcggguccgcaugccaugaugguaaagaauggacauauaucggaguugauggccccgacaguaaugcauugcucaaaauaaaauauggagaagcauauacugacacguaccauuccuaugcaaaaaacauccuaaggacacaagaaagugccugcaauugcaucgggggagauuguuaucuuaugauaacugauggcccagcuucagggguuagugaaugcagauuccuuaagauucgagagggcagaauaauaaaagaaauauuuccaaaaggaagaguaaaacauacugaggaaugcacaugcggauuugccagcaacaaaaccauagaaugugcuuguagagauaaccguuacacagcaaaaagacccuuugucaaauuaaauguggagacugauacagcggaaauaagauugaugugcacagagacuuauuuggacacccccagaccaaaugauggaagcauaacagggccuugcgaaucugauggggacaaagggaguggaggcaucaagggaggauuuguucaucaaagaauggcauccaagauuggaaggugguacucucgaacgaugucuaaaaccaaaagaauggggaugggacuguauguaaaguaugauggagacccauggacugacagugaagcccuugcucuuaguggaguaaugguuucaauggaagaaccugguugguauuccuuuggcuucgaaauaaaagauaagaaaugugauguccccuguauugggauagaaaugguacaugauggugggaaaacgacuuggcacucagcagcaacagccauuuauuguuuaaugggcucaggacaauugcugugggacacugucacagguguugauauggcucuguaa

SEQ ID NO: 62236 - RNA, 1401 nt, Artificial Sequence; identical to SEQ ID NO: 62234
  derived and/or modified CDS sequence (wt) from neuraminidase__InfluenzaB__AHL94596

SEQ ID NO: 62237 - RNA, 1401 nt, Artificial Sequence
  derived and/or modified CDS sequence (wt) from neuraminidase__InfluenzaB__AHL94607
augcuaccuucaacuauacaaacguuaacccuauuucucacaucagggggaguauuauuaucacuauaugugucagcuucauuaucauacuuacuauauucggauauauugcuaaaauucucaccaacagaaauaacugcaccaacaaugccauuggauugugcaaacgcaucaaauguucaggcugugaaccguucugcaacaaaaggggugacacuucuucucccagaaccggaguggacauacccgcguuuaucuugcccgggcucaaccuuucagaaagcacuccuaauuagcccucauagauucggagaaaccaaaggaaacucagcucccuugauaauaagggaaccuuuuauugcuuguggaccaaaugaaugcaaacacuuugcucugacccauuaugcagcccaaccagggggauacuacaauggaacaagaggagacagaaacaagcugaggcaucuaauuucagucaaauugggcaaaaucccaacaguagaaaacuccauuuuccacauggcagcauggagcggguccgcgugccaugaugguaaggaauggacauauaucggaguugauggcccugacaauaaugcauugcucaaaguaaaauauggagaagcauauacugacacauaccauuccuaugcaaacaaaauccuaagaacacaagaaagugccugcaauugcaucgggggaaauuguuaucuaaugauaacugauggcucagcuucagguguuagugaaugcagauuucuuaagauucgagagggccgaauaauaaaagaaauauuuccaacaggaagaguaaaacacacugaggaaugcacaugcggauuugccagcaauaaaaccauagaaugugccuguagagacaacagguacacagcaaaaagaccuuuugucaaauuaaacguggagacugauacagcagaaauaagauugaugugcacagauacuuauuuggacacccccagaccaaaugauggaagcauaacaggcccuugugaaucugauggggacaaagggaguggaggcaucaagggaggauuuguucaucaaagacugaaauccaagauuggaaggugguacucucgaacgaugucuaaaacugaaaggauggggaugggacuguaugucaaguaugauggagacccaugggcugacagugaugcccuaacuuuuaguggaguaaugguuucaaugaaagaaccugguugguacuccuuuggcuucgaaauaaaagauaagaaaugcgauguccccuguauugggauagagaugguacaugaugguggaaaagagacuuggcacucagcagcaacagccauuuacuguuuaaugggcucaggacagcugcugugggacacugucacagguguugacauggcucuguaa

SEQ ID NO: 62238 - RNA, 1401 nt, Artificial Sequence
  derived and/or modified CDS sequence (wt) from neuraminidase__InfluenzaB__AHL94618
augcuaccuucaacuauacaaacguuaacccuauuucucacaucagggggaguauuauuaucacuauaugugucagcuucauuaucauacuuacuauauucggauauauugcuaaaauucucaccaacagaaauaacugcaccaacaaugccauuggauugugcaaacgcaucaaauguucaggcugugaaccguucugcaacaaaaggggugacacuucuucucccagaaccggaguggacauacccgcguuuaucuugcccgggcucaaccuuucagaaagcacuccuaauuagcccucauagauucggagaaaccaaaggaaacucagcucccuugauaauaagggaaccuuuuauugcuuguggaccaaaugaaugcaaacacuuugcucuaacccauuaugcagcccaaccagggggauacuacaauggaacaagaggagacagaaacaagcugaggcaucuaauuucagucaaauugggcaaaaucccaacaguagaaaacuccauuuuccacauggcagcauggagcggguccgcgugccaugaugguaaggaauggacauauaucggaguugauggcccugacaauaaugcauugcucaaaguaaaauauggagaagcauauacugacacauaccauuccuaugcaaacaaaauccuaagaacacaagaaagugccugcaauugcaucgggggaaauuguuaucuaaugauaacugauggcucagcuucagguguuagugaaugcagauuucuuaagauucgagagggccgaauaauaaaagaaauauuuccaacaggaagaguaaaacacacugaggaaugcacaugcggauuugccagcaauaaaaccauagaaugugccuguagagacaacagguacacagcaaaaagaccuuuugucaaauuaaacguggagacugauacagcagaaauaagauugaugugcacagauacuuauuuggacacccccagaccaaaugauggaagcauaacaggcccuugugaaucugauggggacaaagggaguggaggcaucaagggaggauuuguucaucaaagaaugaaauccaagauuggaaggugguacucucgaacgaugucuaaaacugaaaggauggggaugggacuguaugucaaguaugauggagacccaugggcugacagugaugcccuagcuuuuaguggaguaaugguuucaaugaaagaaccugguugguauuccuuuggcuucgaaauaaaagauaagaaaugcgauguccccuguauugggauagagaugguacaugaugguggaaaagagacuuggcacucagcagcaacagccauuuacuguuuaaugggcucaggacagcugcugugggacacugucacagguguugacauggcucuguaa

SEQ ID NO: 62239 - RNA, 1401 nt, Artificial Sequence; identical to SEQ ID NO: 62214
  derived and/or modified CDS sequence (wt) from neuraminidase__InfluenzaB__AHL94628

SEQ ID NO: 62240 - RNA, 1401 nt, Artificial Sequence
  derived and/or modified CDS sequence (wt) from neuraminidase__InfluenzaB__AHL94639
augcuaccuucaacuauacaaacguuaacccuauuucucacaucagggggaguauuauuaucacuauaugugucagcuucauuaucauacuuacuauauucggauauauugcuaaaauucucaccaacagaaauaacugcaccaacaaugccauuggauugugcaaacgcaucaaauguucaagcugugaaccguucugcaacaaaaggggugacacuucuucucccagaaccggaguggacauacccgcguuuaucuugcccgggcucaaccuuucagaaagcacuccuaauuagcccucauagauucggagaaaccaaaggaaacucagcucccuugauaauaagggaaccuuuuauugcuuguggaccaaaugaaugcaaacacuuugcucuaacccauuaugcagcccaaccagggggauacuacaauggaacaagaggagacagaaacaagcugaggcaucuaauuucagucaaauugggcaaaaucccaacaguagaaaacuccauuuuccacauggcagcauggagcggguccgcgugccaugaugguaaggaauggacauauaucggaguugauggcccugacaauaaugcauugcucaaaguaaaauauggagaagcauauacugacacauaccauuccuaugcaaacaaaauccuaagaacacaagaaagugccugcaauugcaucgggggaaauuguuaucuaaugauaacugauggcucagcuucagguguuagugaaugcagauuucuuaagauucgagagggccgaauaauaaaagaaauauuuccaacaggaagaguaaaacacacugaggaaugcacaugcggauuugccagcaauaaaaccauagaaugugccuguagagacaacagguacacagcaaaaagaccuuuugucaaauuaaacguggagacugauacagcagaaauaagauugaugugcacagauacuuauuuggacacccccagaccaaaugauggaagcauaacaggcccuugugaaucugauggggacaaagggaguggaggcaucaagggaggauuuguucaucaaagaaugaaauccaagauuggaaggugguacucucgaacgaugucuaaaacugaaaggauggggaugggacuguaugucaaguaugauggagacccaugggcugacagugaugcccuagcuuuuaguggaguaaugguuucaaugaaagaaccugguugguacuccuuuggcuucgaaauaaaagauaagaaaugcgauguccccuguauugggauagagaugguacaugaugguggaaaagagacuuggcacucagcagcaacagccauuuacuguuuaaugggcucaggacagcugcugugggacacugucacagguguugacauggcucuguaa

SEQ ID NO: 62241 - RNA, 1401 nt, Artificial Sequence
  derived and/or modified CDS sequence (wt) from neuraminidase__InfluenzaB__AHL94650
augcuaccuucaacuauacaaacguuaacccuauuucucacaucagggggaguauuauuaucacuauaugugucagcuucauuaucauacuuacuauauucggauauauugcuaaaauucucaccaacagaaauaacugcaccaacaaugccauuggauugugcaaacgcaucaaauguucaggcugugaaccguucugcaacaaaaggggugacacuucuucucccagaaccggaguggacauacccgcguuuaucuugcccgggcucaaccuuucagaaagcacuccuaauuagcccucauagauucggagaaaccaaaggaaacucagcucccuugauaauaagggaaccuuuuauugcuuguggaccaaaugaaugcaaacacuuugcucuaacccauuaugcagcccaaccagggggauacuacaauggaacaagaggagacagaaacaagcugaggcaucuaauuucagucaaauugggcaaaaucccaacaguagaaaacuccauuuuccacauggcagcauggagcggguccgcgugccaugaugguaaggaauggacauauaucggaguugauggcccugacaauaaugcauugcucaaaguaaaauauggagaagcauauacugacacauaccauuccuaugcaaacaaaauccuaagaacacaagaaagugccugcaauugcaucgggggaaauuguuaucuaaugauaacugauggcucagcuucagguguuagugaaugcagauuucuuaagauucgagagggccgaauaauaagagaaauauuuccaacaggaagaguaaaacacacugaggaaugcacaugcggauuugccagcaauaaaaccauagaaugugccuguagagacaacagguacacagcaaaaagaccuuuugucaaauuaaacguggagacugauacagcagaaauaagauugaugugcacagauacuuauuuggacacccccagaccaaaugauggaagcauaacaggcccuugugaaucugauggggacaaagggaguggaggcaucaagggaggauuuguucaucaaagaaugaaauccaagauuggaaggugguacucucgaacgaugucuaaaacugaaaggauggggaugggacuguaugucaaguaugauggagacccaugggcugacagugaugcccuagcuuuuaguggaguaaugguuucaaugaaagaaccugguugguacuccuuuggcuucgaaauaaaagauaagaaaugcgauguccccuguauugggauagagaugguacaugaugguggaaaagagacuuggcacucagcagcaacagccauuuacuguuuaaugggcucaggacagcugcugugggacacugucacagguguugacauggcucuguaa

SEQ ID NO: 62242 - RNA, 1401 nt, Artificial Sequence
  derived and/or modified CDS sequence (wt) from neuraminidase__InfluenzaB__AHL94661
augcuacccucaacuauacaaacguuaacccuauuucucacaucagggggaguauuauuaucacuauaugugucagcuucauugucauacuuacuauauucggauauauugcuaaaauucccaucaacagaaauuacugcaccaacaaugccauuagauugugcaaacgcaucaaauguucaggcugugaaccguucugcaacaaaaggggugacacuucuucucccagaaccggaguggacauacccgcguuuaucuugcccgggcucaaccuuucagaaagcacuccuaauuagcccucauagauucggagagaccaaaggaaacucagcucccuugauaauaagggaaccuuuuauugcuuguggaccaaaggaaugcaaacacuuugcucuaacccacuaugcagcccaaccagggggauacuacaauggaacaagaggagacagaaacaagcugaggcaucuaauuucagucaaauugggcaaaaucccaacaguagaaaacuccauuuuccacauggcagcauggagcggguccgcaugucaugaugguaaggaauggacauauaucggaguugauggcccugacaauaaugcauugcucaaaauaaaauauggggaagcauauacugacacauaccauuccuaugcaaacaacauccuaagaacacaagaaagugccugcaauugcaucggaggaaauuguuaucuuaugauaacugauggcucagcuucagguguuagugaaugcagauuucuuaagauucgagagggccgaauaauaaaagaaauauuuccaacaggaagaauacaacauacugaagaaugcacaugcggauuugcuagcaauaaaaccauagaaugugccuguagagauaacaguuacacagcaaaaagacccuuugucaaauuaaacguggagacugauacagcagaaauaagauugaugugcacaaagacuuauuuggacacccccagaccagaggauggaagcauaacugggccuugugaaucuaauggaggcaaagggaguggaggcaucaagggaggauuuguccaucaaagaauggcauccaagauuggaaggugguacucucgaacgaugucuaaaacugaaaggaaggggauggggcuguaugucaaguauaauggagacccaugggcugacagugaugcccuuguuuuuaguggaguaaugguuucaauggaagaaccugguugguacuccuuuggcuucgaaauaaaagacaagaaaugugauguccccuguauugggauagagaugguacaugaugguggaaaagagacuuggcacucagcagcuacagccauuuacuguuuaaugggcucaggacagcugcugugggacacugucacagguguuaauaugacucuguaa

SEQ ID NO: 62243 - RNA, 1401 nt, Artificial Sequence
  derived and/or modified CDS sequence (wt) from neuraminidase__InfluenzaB__AHL94672
augcuaccuucaacuauacaaacguuaaccuuauuucucacaucagggggaguguuauuaucacuauaugugucagcuucauugucauacuuacuauauucggauauauugcuaaaauuuucacgaacagaaauaacugcaccaauaaugccauuggauugugcaaaugcaucaaauguucaggcugugaaccguucugcaacaaaaggggugacaccucuucucccagaaccggaguggacguacccucguuuaucuugcccgggcucaaccuuucagaaagcacuccuaauuagcccccauagauucggagaaaccaaaggaaacucagcucccuugauaauaagggaaccuuuuauugcuuguggaccaaaggaaugcaaacauuuugcucuaacccauuaugcagcucaaccagggggauacuacaauggaacaagagaagacagaaacaagcugaggcaucuaauuucagucaaauugggcaaaaucccaacaguagaaaacucuauuuuccacauggcagcuuggagcggguccgcaugccaugaugguagagaauggacuuauaucggaguugauggcccagacaguaaugcauugcucaaaauaaaguauggagaagcauauacugacacauaccauuccuaugcaaaaaacauccuaaggacacaagaaagugccugcaauugcaucgggggagauuguuaucuuaugauaacugauggcucagcuucagggauuagugaaugcagauuccuuaagauucgagagggccgaauaauaaaagaaauauuuccaacaggaagaguaaaacauacugaggaaugcacaugcggauuugccagcaacaaaaccauagaaugugccuguagagauaacaguuacacagcaaaaagacccuuugucaaauuaaauguggagacugauacagcggaaauaagauugaugugcacagagacuuauuuggacacccccagaccaaaugauggaagcauaucagggccuugcgaaucuaauggggacgaagggaguggaggcaucaagggaggauuuguucaccaaagaauggcauccaagauuggaaggugguacucucggacgaugucuaaaacuaaaagaauggggaugggacuguauguaaaguaugauggagacccauggacugacagugaagcccuugcucuuaguggaguaaugguuucaauggaagaaccugguugguauuccuuuggcuucgaaauaaaagauaagaaaugugauguccccuguauugggauagaaaugguacaugauggugggaaaacgacuuggcacucagcagcaacagccauuuacuguuuaaugggcucaggacaacugcugugggacacugucacagguguuaauaugacucuguaa

SEQ ID NO: 62244 - RNA, 1401 nt, Artificial Sequence
  derived and/or modified CDS sequence (wt) from neuraminidase__InfluenzaB__AHL94683
augcuaccuucaacuauacaaacguuaaccuuauuucucacaucagggggaguguuauuaucacuauaugugucagcuucauugucauacuuacuauauucggauauauugcuaaaauuuucacgaacagaaauaacugcaccaauaaugccauuggauugugcaaaugcaucaaauguucaggcugugaaccguucugcaacaaaaggggugacaccucuucucccagaaccggaguggacguacccucguuuaucuugcccgggcucaaccuuucagaaagcacuccuaauuaguccccauagauucggagaaaccaaaggaaacucagcucccuugauaauaagggaaccuuuuauugcuuguggaccaaaggaaugcaaacauuuugcucuaacccauuaugcagcucaaccagggggauacuacaauggaacaagagaagacagaaacaagcugaggcaucuaauuucagucaaauugggcaaaaucccaacaguagaaaacucuauuuuccacauggcagcuuggagcggguccgcaugccaugaugguagagaauggacuuauaucggaguugauggcccagacaguaaugcauugcucaaaauaaaguauggagaagcauauacugacacauaccauuccuaugcaaaaaacauccuaaggacacaagaaagugccugcaauugcaucgggggagauuguuaucuuaugauaacugauggcucagcuucagggauuagugaaugcagauuccuuaagauucgagagggccgaauaauaaaagaaauauuuccaacaggaagaguaaaacauacugaggaaugcacaugcggauuugccagcaacaaaaccauagaaugugccuguagagacaacaguuacacagcaaaaagacccuuugucaaauuaaauguggagacugauacagcggaaauaagauugaugugcacagagacuuauuuggacacccccagaccaaaugauggaagcauaacagggccuugcgaaucuaaugggggcgaagggaguggaggcaucaagggaggauuuguucaccaaagaauggcauccaagauuggaaggugguacucucggacgaugucuaaaacuaaaagaauggggaugggacuguauguaaaguaugauggagacccauggacugacagugaagcccuugcucuuaguggaguaaugguuucaauggaagaaccugguugguauuccuuuggcuucgaaauaaaagauaagaaaugugauguccccuguauugggauagaaaugguacaugauggugggaaaacgacuuggcacucagcagcaacagccauuuacuguuuaaugggcucaggacaacugcugugggacacugucacagguguuaauaugacucuguaa

SEQ ID NO: 62245 - RNA, 1401 nt, Artificial Sequence
  derived and/or modified CDS sequence (wt) from neuraminidase__InfluenzaB__AHL94694
augcuaccuucaacuauacaaacguuaacccuauuucucacaucagggggaguauuauuaucacuauaugugucagcuucauuaucauacuuacuauauucggauauauugcuaaaauucucaccaacagaaauaacugcaccaacaaugccauuggauugugcaaacgcaucaaauguucaggcugugaaccguucugcaacaaaaggggugacacuucuucucccagaaccggaguggacauacccgcguuuaucuugcccgggcucaaccuuucagaaagcacuccuaauuagcccucauagauucggagaaaccaaaggaaacucagcucccuugauaauaagggaaccuuuuauugcuuguggaccaaaugaaugcaaacacuuugcucugacccauuaugcagcccaaccagggggauacuacaauggaacaagaggagacagaaacaagcugaggcaucuaauuucagucaaauugggcaaaaucccaacaguagaaaacuccauuuuccacauggcagcauggagcggguccgcgugccaugaugguaaggaauggacauauaucggaguugauggcccugacaauaaugcauugcucaaaguaaaauauggagaagcauauacugacacauaccauuccuaugcaaacaaaauccuaagaacacaagaaagugccugcaauugcaucggaggaaauuguuaucuaaugauaacugauggcucagcuucagguguuagugaaugcagauuucuuaagauucgagagggccgaauaauaaaagaaauauuuccaacaggaagaguaaaacacacugaggaaugcacaugcggauuugccagcaauaaaaccauagaaugugccuguagagacaacagguacacagcaaaaagaccuuuugucaaauuaaacguggagacugauacagcagaaauaagauugaugugcacagauacuuauuuggacacccccagaccaaaugauggaagcauaacaggcccuugugaaucugauggggacaaagggaguggaggcaucaagggaggauuuguucaucaaagaaugaaauccaagauuggaaggugguacucucgaacgaugucuaaaacugaaaggauggggaugggacuguaugucaaguaugauggagacccaugggcugacagugaugcccuaacuuuuaguggaguaaugguuucaaugaaagaaccugguugguacuccuuuggcuucgaaauaaaagauaagaaaugcgauguccccuguauugggauagagaugguacaugaugguggaaaagagacuuggcacucagcagcaacagccauuuacuguuuaaugggcucaggacagcugcugugggacacugucacagguguugacauggcucuguaa

SEQ ID NO: 62246 - RNA, 1401 nt, Artificial Sequence
  derived and/or modified CDS sequence (wt) from neuraminidase__InfluenzaB__AHL94705
augcuaccuucaacuauacaaacguuaacccuauuucucacaucagggggaguauuauuaucacuauaugugucagcuucauuaucauacuuacuauauucggauauauugcuaaaauucucaccaacagaaauaacugcaccaacaaugccauuggauugugcaaacgcaucaaauguucaagcugugaaccguucugcaacaaaaggggugacacuucuucucccagaaccggaguggacauacccgcguuuaucuugcccgggcucaaccuuucagaaagcacuccuaauuagcccucauagauucggagaaaccaaaggaaacucagcucccuugauaauaagggaaccuuuuauugcuugugggccaaaugaaugcaaacacuuugcucuaacccauuaugcagcccaaccagggggauacuacaauggaacaagaggagacagaaacaagcugaggcaucuaauuucagucaaauugggcaaaaucccaacaguagaaaacuccauuuuccacauggcagcauggagcggguccgcgugccaugaugguaaggaauggacauauaucggaguugauggcccugacaauaaugcauugcucaaaguaaaauauggagaagcauauacugacacauaccauuccuaugcaaacaaaauccuaagaacacaagaaagugccugcaauugcaucgggggaaauuguuaucuaaugauaacugauggcucagcuucagguguuagugaaugcagauuucuuaagauucgagagggccgaauaauaaaagaaauauuuccaacaggaagaguaaaacacacugaggaaugcacaugcggauuugccagcaauaaaaccauagaaugugccuguagagacaacagguacacagcaaaaagaccuuuugucaaauuaaacguggagacugauacagcagaaauaagauugaugugcacagauacuuauuuggacacccccagaccaaaugauggaagcauaacaggcccuugugaaucugauggggacaaagggaguggaggcaucaagggaggauuuguucaucaaagaaugaaauccaagauuggaaggugguacucucgaacgaugucuaaaacugaaaggauggggaugggacuguaugucaaguaugauggagacccaugggcugacagugaugcccuagcuuuuaguggaguaaugguuucaaugaaagaaccugguugguacuccuuuggcuucgaaauaaaagauaagaaaugcgauguccccuguauugggauagagaugguacaugaugguggaaaagagacuuggcacucagcagcaacagccauuuacuguuuaaugggcucaggacagcugcugugggacacugucacagguguugacauggcucuguaa

SEQ ID NO: 62247 - RNA, 1401 nt, Artificial Sequence; identical to SEQ ID NO: 62211
  derived and/or modified CDS sequence (wt) from neuraminidase__InfluenzaB__AHL94716

SEQ ID NO: 62248 - RNA, 1401 nt, Artificial Sequence
  derived and/or modified CDS sequence (wt) from neuraminidase__InfluenzaB__AHL94727
augcuacccucaacuauacaaacguuaacccuauuucucacaucagggggaguauuauuaucacuauaugugucagcuucauugucauacuuacuauauucggauauauugcuaaaauucccaucaacagaaauuacugcaccaacaaugccauuagauugugcaaacacaucaaauguucaggcugugaaccguucugcaacaaaaggggugacacuucuucucccagaaccggaguggacauacccgcguuuaucuugcccgggcucaaccuuucagaaagcacuccuaauuagcccucauagauucggagagaccaaaggaaacucagcucccuugauaauaagggaaccuuuuauugcuuguggaccaaaggaaugcaaacacuuugcucuaacccacuaugcagcccaaccagggggauacuacaauggaacaagaggagacagaaacaagcugaggcaucuaauuucagucaaauugggcaaaaucccaacaguagaaaacuccauuuuccacauggcagcauggagcggguccgcaugucaugaugguaaggaauggacauauaucggaguugauggcccugacaauaaugcauugcucaaaauaaaauauggggaagcauauacugacacauaccauuccuaugcaaacaacauccuaagaacacaagaaagugccugcaauugcaucggaggaaauuguuaucuuaugauaacugauggcucagcuucagguguuagugaaugcagauuucuuaagauucgagagggccgaauaauaaaagaaauauuuccaacaggaagaauacaacauacugaagaaugcacaugcggauuugcuagcaauaaaaccauagaaugugccuguagagauaacaguuacacagcaaaaagacccuuugucaaauuaaacguggagacugauacagcagaaauaagauugaugugcacaaagacuuauuuggacacccccagaccagaggauggaagcauaacugggccuugugaaucuaauggaggcaaagggaguggaggcaucaagggaggauuuguccaucaaagaauggcauccaagauuggaaggugguacucucgaacgaugucuaaaacugaaaggaaggggauggggcuguaugucaaguauaauggagacccaugggcugacagugaugcccuuguuuuuaguggaguaaugguuucaauggaagaaccugguugguacuccuuuggcuucgaaauaaaagacaagaaaugugauguccccuguauugggauagagaugguacaugaugguggaaaagagacuuggcacucagcagcuacagccauuuacuguuuaaugggcucaggacagcugcugugggacacugucacagguguuaauaugacucuguaa

SEQ ID NO: 62249 - RNA, 1401 nt, Artificial Sequence
  derived and/or modified CDS sequence (wt) from neuraminidase__InfluenzaB__AHL94738
augcuaccuucaacuauacaaacguuaaccuuauuucucacaucagggggaguguuauuaucacuauaugugucagcuucauugucauacuuacuauauucggauauauugcuaaaauuuucacgaacagaaauaacugcaccaauaaugccauuggauugugcaaacgcaucaaauguucaggcugugaaccguucugcaacaaaaggggugacacuucuucucccagaaccggaguggacguacccccguuuaucuugcccgggcucaaccuuucagaaagcacuccuaauuagcccccauagauucggagaaaccaaaggaaacucagcucccuugauaauaagggaaccuuuuauugcuuguggaccaaaggaaugcaaacauuuugcucuaacccauuaugcagcucaaccagggggauacuacaauggaacaagagaagacagaaacaaguugaggcaucuaauuucagucaaauugggcaaaaucccgacaguagaaaacucuauuuuccacauggcagcuuggagcggguccgcaugccaugaugguagagaauggacuuauaucggaguugauggccccgacaguaaugcauugcucaaaauaaaauauggagaagcauauacugacacauaccauuccuaugcaaaaaacauccuaaggacacaagaaagugccugcaauugcaucgggggagauuguuaucuuaugauaacugauggcccagcuucagggauuagugaaugcagauuccuuaagauucgagagggccgaauaauaaaagaaauauuuccaacaggaagaguaaaacauacugaggaaugcacaugcggauuugccagcaacaaaaccauagaaugugccuguagagauaacaguuacacagcaaaaagacccuuugucaaauuaaauguggagacugauacagcggaaauaagauugaugugcacagagacuuauuuggacacccccagaccaaaugauggaagcauaacagggccuugcgaaucuaauggggacaaagggaguggaggcaucaagggaggauuuguucaccaaagaauggcauccaagauuggaaggugguacucucgaacgauguccaaaacuaaaagaauggggaugggacuguauguaaaguaugauggagacccauggacugauagugaagcccuugcucuuaguggagugaugguuucaauggaagaaccugguugguauuccuuuggcuucgaaauaaaagauaagaaaugugauguccccuguauugggauagaaaugguacaugauggugggaaaacgacuuggcacucagcagcaacagccauuuacuguuuaaugggcucaggacaacugcugugggacacugucacagguguuaauaugacucuguaa

SEQ ID NO: 62250 - RNA, 1401 nt, Artificial Sequence
  derived and/or modified CDS sequence (wt) from neuraminidase__InfluenzaB__AHL94749
augcuaccuucaacuauacaaacguuaacccuauuucucacaucagggggaguauuauuaucacuauaugugucagcuucauuaucauacuuacuauauucggauauauugcuaaaauucucaccaacagaaauaacugcaccaacaaugccauuggauugugcaaacgcaucaaauguucaagcugugaaccguucugcaacaaaaggggugacacuucuucucccagaaccggaguggacauacccgcguuuaucuugcccgggcucaaccuuucagaaagcacuccuaauuagcccucauagauucggagaaaccaaaggaaacucagcucccuugauaauaagggaaccuuuuauugcuuguggaccaaaugaaugcaaacacuuugcucuaacccauuaugcagcccaaccagggggauacuacaauggaacaagaggagacagaaacaagcugaggcaucuaauuucagucaaauugggcaaaaucccaacaguagaaaacuccauuuuccacauggcagcauggagcgggucugcgugccaugaugguaaggaauggacauauaucggaguugauggcccugacaauaaugcauugcucaaaguaaaauauggagaagcauauacugacacauaccauuccuaugcaaacaaaauccuaagaacacaagaaagugccugcaauugcaucgggggaaauuguuaucuaaugauaacugauggcucagcuucagguguuagugaaugcagauuucuuaagauucgagagggccgaauaauaaaagaaauauuuccaacaggaagaguaaaacacacugaggaaugcacaugcggauuugccagcaauaaaaccauagaaugugccuguagagacaacagguacacagcaaaaagaccuuuugucaaauuaaacguggagacugauacagcagaaauaagauugaugugcacagauacuuauuuggacacccccagaccaaaugauggaagcauaacaggcccuugugaaucugauggggacaaagggaguggaggcaucaagggaggauuuguucaucaaagaaugaaauccaagauuggaaggugguacucucgaacgaugucuaaaacugaaaggauggggaugggacuguaugucaaguaugauggagacccaugggcugacagugaugcccuagcuuuuaguggaguaaugguuucaaugaaagaaccugguugguacuccuuuggcuucgaaauaaaagauaagaaaugcgauguccccuguauugggguagagaugguacaugaugguggaaaagagacuuggcacucagcagcaacagccauuuacuguuuaaugggcucaggacagcugcugugggacacugucacagguguugacauggcucuguaa

SEQ ID NO: 62251 - RNA, 1401 nt, Artificial Sequence
  derived and/or modified CDS sequence (wt) from neuraminidase__InfluenzaB__AHL94760
augcuaccuucaacuauacaaacguuaacccuauuucucacaucagggggaguguuauuaucacuauaugugucagcuucauugucauacuuacuauauucggauauauugcuaaaauuuucacagacagaaauaacugcaccaauaaugccauuggauugugcaaacgcaucaaauguucaggcugugaaucauucugcagcaaaaggggugacacuucuucucccagaaccggaauggacauacccucguuuaucuugcccgggcucaaccuuucagaaagcacuccuaauuagcccccauagauucggagaaaucaaaggaaacucagcucccuugauaauaagggaaccuuuuauugcuuguggaccaacggaaugcaaacacuuugcucuaacccauuaugcagcucaaccagggggauacuacaauggaacaagagaagacagaaacaagcugaggcaucuaauuucagucaaauugggcaaaaucccaacaguagaaaacuccauuuuccacauggcagcuuggagcggguccgcaugccaugaugguaaagaauggacauauaucggaguugauggccccgacaguaaugcauugcucaaaauaaaauauggagaagcauauacugacacauaccauuccuaugcaaaaaacauccuaaggacacaagaaagugccugcaauugcaucgggggagauuguuaucuuaugauaacugauggcccagcuucagggguuagugaaugcagauuccuuaagauucgagagggcagaauaauaaaagaaauauuuccaacaggaagaguaaaacauacugaggaaugcacaugcggauuugccagcaacaaaaccauagaaugugcuuguagagauaaucguuacacagcaaaaagacccuuugucaaauuaaauguggagacugauacagcggaaauaagauugaugugcacagagacuuauuuggacacccccagaccaaaugauggaagcauaacagggccuugcgaaucugauggggacaaagggaguggaggcaucaagggaggauuuguucaucaaagaauggcauccaagauuggaaggugguacucucgaacgaugucuaaaaccaaaagaauggggaugggacuguauguaaaauaugauggagacccauggacugacagugaagcccuugcucuuaguggaguaaugguuucaauggaagaaccugguugguauuccuuuggcuucgaaauaaaagauaagaaaugugauauccccuguauugggauagaaaugguacaugauggugggaaaacgacuuggcacucagcagcaacagccauuuauuguuuaaugggcucaggacaauugcugugggacacugucacagguguugauauggcucuguaa

SEQ ID NO: 62252 - RNA, 1401 nt, Artificial Sequence
  derived and/or modified CDS sequence (wt) from neuraminidase__InfluenzaB__AHL94770
augcuaccuucaacuauacaaacguuaacccuauuucucacaucagggggaguauuauuaucacuauaugugucagcuucauuaucauacuuacuauauucggauauauugcuaaaauucucaccaacagaaauaacugcaccaacaaugccauuggauugugcaaacgcaucaaauguucaggcugugaaccguucugcaacaaaaggggugacacuucuucucccagaaccggaguggacauacccgcguuuaucuugcccgggcucaaccuuucagaaagcacuccuaauuagcccucauagauucggagaaaccaaaggaaacucagcucccuugauaauaagggaaccuuuuauugcuuguggaccaaaugaaugcaaacacuuugcucuaacccauuaugcagcccaaccagggggauacuacaauggaacaagaggagacagaaacaagcugaggcaucuaauuucagucaaauugggcaaaaucccaacaguagaaaacuccauuuuccacauggcagcauggagcggguccgcgugccaugaugguaaggaauggacauauaucggaguugauggcccugacaauaaugcauugcucaaaguaaaauauggggaagcauauacugacacauaccauuccuaugcaaacaaaauccuaagaacacaagaaagugccugcaauugcaucgggggaaauuguuaucuaaugauaacugauggcucagcuucagguguuagugaaugcagauuucuuaagauucgagagggccgaauaauaaaagaaauauuuccaacaggaagaguaaaacacacugaggaaugcacaugcggauuugccagcaauaaaaccauagaaugugccuguagagacaacagguacacagcaaaaagaccuuuugucaaauuaaacguggagacugauacagcagaaauaagauugaugugcacagauacuuauuuggacacccccagaccaaaugauggaagcauaacaggcccuugugaaucugauggggacaaagggaguggaggcaucaagggaggauuuguucaucaaagaaugaaauccaagauuggaaggugguacucucgaacgaugucuaaaacugaaaggauggggaugggacuguaugucaaguaugauggagacccaugggcugacagugaugcccuagcuuuuaguggaguaaugguuucaaugaaagaaccugguugguacuccuuuggcuucgaaauaaaagauaagaaaugcgauguccccuguauugggauagagaugguacaugaugguggaaaagagacuuggcacucagcagcaacagccauuuacuguuuaaugggcucaggacagcugcugugggacacugucacagguguugacauggcucuguaa

SEQ ID NO: 62253 - RNA, 1401 nt, Artificial Sequence
  derived and/or modified CDS sequence (wt) from neuraminidase__InfluenzaB__AHL94781
augcuaccuucaacuauacaaacguuaaccuuauuucucacaucagggggaguguuauuaucacuauaugugucagcuucauugucauacuuacuauauucggauauauugcuaaaauuuucacgaacagaaauaacugcaccaauaaugccauuggauugugcaaacgcaucaaauguucaggcugugaaccguucugcaacaaaaggggugacaccucuucucccagaaccggaguggacguacccucguuuaucuugcccgggcucaaccuuucagaaagcacuccuaauuagcccccauagauucggagaaaccaaaggaaacucagcucccuugauaauaagggaaccuuuuauugcuuguggaccaaaggaaugcaaacauuuugcucuaacccauuaugcagcucaaccagggggauacuacaauggaacaagagaagacagaaacaagcugaggcaucuaauuucagucaaauugggcaaaaucccaacaguagaaaacucuauuuuccacauggcagcuuggagcggguccgcaugccaugaugguagagaauggacuuauaucggaguugauggcccagacaguaaugcauugcucaaaauaaaauauggagaagcauauacugacacauaccauuccuaugcaaaaaacauccuaaggacacaagaaagugccugcaauugcaucgggggagauuguuaucuuaugauaacugauggcccagcuucagggauuagugaaugcagauuccuuaagauucgagagggccgaauaauaaaagaaauauuuccaacagggagaguaaaacauacugaggaaugcacaugcggauuugccagcaacaaaaccauagaaugugccuguagagauaacaguuacacagcaaaaagacccuuugucaaauuaaauguggagacugauacagcggaaauaagauugaugugcacagagacuuauuuggacacccccagaccaaaugauggaagcauaacagggccuugcgaaucuaauggggacgaagggaguggaggcaucaagggaggauuuguucaccaaagaauggcauccaagauuggaaggugguacucucggacgaugucuaaaacuaaaagaauggggauggggcuguauguaaaguaugauggagacccauggacugacagugaagcccuugcucuuaguggaguaaugguuucaauggaagaaccugguugguauuccuuuggcuucgagauaaaagauaagaaaugugauguccccuguauugggauagaaaugguacaugauggugggaaaacgacuuggcacucagcagcaacagccauuuacuguuuaaugggcucaggacaacugcugugggacacugucacagguguuaauaugacucuguaa

SEQ ID NO: 62254 - RNA, 1401 nt, Artificial Sequence; identical to SEQ ID NO: 62214
  derived and/or modified CDS sequence (wt) from neuraminidase__InfluenzaB__AHL94791

SEQ ID NO: 62255 - RNA, 1401 nt, Artificial Sequence
  derived and/or modified CDS sequence (wt) from neuraminidase__InfluenzaB__AHL94801
augcuaccuucaacuauacaaacguuaacccuauuucucacaucagggggaguauuauuaucacuauaugugucagcuucauuaucauacuuacuauauucggauauauugcuaaaauucucaccaacagaaauaacugcaccaacaaugccauuggauugugcaaacgcaucaaauguucaggcugugaaccguucugcaacaaaaggggugacacuucuucucccagaaccggaguggacauacccgcguuuaucuugcccgggcucaaccuuucagaaagcacuccuaauuagcccucauagauucggagaaaccaaaggaaacucagcucccuugauaauaagggaaccuuuuauugcuuguggaccaaaugaaugcaaacacuuugcucugacccauuaugcagcccaaccagggggauacuacaauggaacaagaggagacagaaacaagcugaggcaucuaauuucagucaaauugggcaaaaucccaacaguagaaaacuccauuuuccacauggcagcauggagcggguccgcgugccaugaugguaaggaauggacauauaucggaguugauggcccugacaauaaugcauugcucaaaguaaaauauggagaagcauauacugacacauaccauuccuaugcaaacaaaauccuaagaacacaagaaagugccugcaauugcaucgggggaaauuguuaucuaaugauaacugauggcucagcuucagguguuagugaaugcagauuucuuaagauucgagagggccgaauaauaaaagaaauauuuccaacaggaagaguaaaacacacugaggaaugcacaugcggauuugccagcaauaaaaccauagaaugugccuguagagacaacagguacacagcaaaaagaccuuuugucaaauuaaacguggagacugauacagcagaaauaagauugaugugcacagauacuuauuuggacacccccagaccaaaugauggaagcauaacaggcccuugugaaucugauggggacaaagggaguggaggcaucaagggaggauuuguucaucaaagaaugaaauccaagauuggaaggugguacucucgaacgaugucuaaaacugaaaggauggggaugggacuguaugucaaguaugauggagacccaugggcugacagugaugcccuaacuuuuaguggaguaaugguuucaaugaaagaaccugguugguacuccuuuggcuucgaaauaaaagauaagaaaugcgauguccccuguauugggauagagaugguacaugaugguggaaaagagacuuggcacucagcagcaacagccauuuacuguuuaaugggcucaggacagcugcugugggacacugucacagguguugacauggcucuguaa

SEQ ID NO: 62256 - RNA, 1401 nt, Artificial Sequence; identical to SEQ ID NO: 62214
  derived and/or modified CDS sequence (wt) from neuraminidase__InfluenzaB__AHL94812

SEQ ID NO: 62257 - RNA, 1401 nt, Artificial Sequence; identical to SEQ ID NO: 62214
  derived and/or modified CDS sequence (wt) from neuraminidase__InfluenzaB__AHL94821

SEQ ID NO: 62258 - RNA, 1401 nt, Artificial Sequence; identical to SEQ ID NO: 62219
  derived and/or modified CDS sequence (wt) from neuraminidase__InfluenzaB__AHL94831

SEQ ID NO: 62259 - RNA, 1401 nt, Artificial Sequence
  derived and/or modified CDS sequence (wt) from neuraminidase__InfluenzaB__AHL94840
augcuaccuucaacuauacaaacguuaaccuuauuucucacaucagggggaguguuauuaucacuauaugugucagcuucauugucauacuuacuauauucggguauauuacuaaaauucucacgaacagaaauaacugcaccaauaaugccauuggauugugcaaaugcaucaaauguucaggcugugaaccguucugcaacaaaaggggugacacuucuucucccagaaccggaguggacguacccucguuuaucuugcccgggcucaaccuuucagaaagcacuccuaauuagcccccauagauucggagaaaccaaaggaaacucagcucccuugauaauaagggaaccuuuuauugcuuguggaccaaaggaaugcaaacauuuugcucuaacccacuaugcagcucaaccagggggauacuacaauggaacaagagaagacagaaacaagcugaggcaucuaauuucagucaaauugggcaaaaucccaacaguagaaaacucuauuuuccacauggcagccuggagcggguccgcaugccaugaugguagagaauggacuuauaucggaguugauggccccgacaguaaugcauugcucaaaauaaaauauggagaagcauauacugacacauaccauuccuaugcaaaaaacauccuaaggacacaagaaagugccugcaauugcaucgggggagauuguuaucuuaugauaacugauggcccagcuucagggauuagugaaugcagauuccuuaagauucgagaaggccgaauaauaaaagaaauauuuccaacaggaagaguaaagcauacugaggaaugcacaugcggauuugccagcaacaaaaccauagaaugugccuguagagauaacaguuacacagcaaaaagacccuuugucaaauuaaauguggagacugauacagcggaaauaagauugauguguacagagacuuauuuggacacccccagaccaaaugauggaagcauaacagggccuugcgaaucuaauggggacaaagggaguggaggcaucaagggaggauuuguucaccaaaggauggcauccaagauuggaaggugguacucucgaacgaugucuaaaacuaaaagaauggggaugggacuguauguaaaguaugauggagacccauggacugacagugaagcccuugcucuuaguggaguaaugguuucaauggaagaaccugguugguauuccuuuggcuucgaaauaaaagauaagaaaugugauguccccuguauugggauagaaaugguacaugauggugggaaaacgacuuggcacucagcagcaacagccauuuacuguuuaaugggcucaggacaacugcugugggacacugucacagguguuaauaugacucuguaa

SEQ ID NO: 62260 - RNA, 1401 nt, Artificial Sequence
  derived and/or modified CDS sequence (wt) from neuraminidase__InfluenzaB__AHL94851
augcuaccuucaacuauacaaacguuaacccuauuucucacaucagggggaguguuauuaucacuauaugugucagcuucauugucauacuuacuauauucggauauauugcuaaaauuuucacagacagaaauaacugcaccaauaaugccauuggauuguacaaacgcaucaaauguucaggcugugaaucguucugcagcaaaaggggugacacuucuucucccagaaccggaguggacauacccucguuuaucuugcccgggcucaaccuuucagaaagcacuccuaauuagcccccauagauucggagaaaucaaaggaaacucagcucccuugauaauaagggaaccuuuuauugcuuguggaccaacggaaugcaaacacuuugcucuaacccauuaugcagcucaaccagggggauacuacaauggaacaagagaagacagaaacaagcugaggcaucuaauuucagucaaauugggcaaaaucccaacaguagaaaacuccauuuuccacauggcagcuuggagcggguccgcaugccaugaugguaaagaauggacauauaucggaguugauggccccgacaguaaugcauugcucaaaauaaaauauggagaagcauauacugacacguaccauuccuaugcaaaaaauauccuaaggacacaagaaagugccugcaauugcaucgggggagauuguuaucuuaugauaacugauggcccagcuucagggguuagugaaugcagauuccuuaagauucgagaaggcagaauaauaaaagaaauauuuccaacaggaagaguaaaacauacugaggaaugcacaugcggauuugccagcaacaaaaccauagaaugugcuuguagagauaaccguuacacagcaaaaagacccuuugucaaauuaaauguggagacugauacagcggaaauaagauugaugugcacagagacuuauuuggacacccccagaccaaaugauggaagcauaacagggccuugcgaaucugauggggacaaagggaguggaggcaucaagggaggauuuguucaucaaagaaugacauccaagauuggaaggugguacucucgaacgaugucuaaaaccaaaagaauggggaugggacuguauguaaaguaugauggagacccauggacugacagugaagcccuugcucuuaguggaguaaugguuucaauggaagaaccugguugguauuccuuuggcuucgaaauaaaagauaagaaaugugauguccccuguauugggauagaaaugguacaugauggugggaaaacgacuuggcacucagcagcaacagccauuuauuguuuaaugggcucaggacaauugcugugggacacugucacagguguugauauggcucuguaa

SEQ ID NO: 62261 - RNA, 1401 nt, Artificial Sequence; identical to SEQ ID NO: 60782
  derived and/or modified CDS sequence (wt) from neuraminidase__InfluenzaB__AHL94862

SEQ ID NO: 62262 - RNA, 1401 nt, Artificial Sequence; identical to SEQ ID NO: 60829
  derived and/or modified CDS sequence (wt) from neuraminidase__InfluenzaB__AHL94873

SEQ ID NO: 62263 - RNA, 1401 nt, Artificial Sequence
  derived and/or modified CDS sequence (wt) from neuraminidase__InfluenzaB__AHL94884
augcuaccuucaacuauacaaacguuaacccuauuucucacaucagggggaguauuauuaucacuauaugugucagcuucauuaucauacuuacuauauucggauauauugcuaaaauucucaccaacagaaauaacugcaccaacaaugccauuggauugugcaaacgcaucaaauguucaggcugugaaccguucugcaacaaaaggggugacacuccuucucccagaaccggaguggacauacccgcguuuaucuugcccgggcucaaccuuucagaaagcacuccuaauuagcccucauagauucggagaaaccaaaggaaacucagcucccuugauaauaagggaaccuuuuauugcuuguggaccaaaugaaugcaaacacuuugcucuaacccauuaugcagcccaaccagggggauacuacaauggaacaagaggagacagaaacaagcugaggcaucuaauuucagucaaauugggcaaaaucccaacaguagaaaacuccauuuuccacauggcagcauggagcggguccgcgugccaugaugguaaagaauggacauauaucggaguugauggcccugacaauaaugcauugcucaaaguaaaauauggagaagcauauacugacacauaccauuccuaugcaaacaaaauccuaagaacacaagaaagugccugcaauugcaucgggggaaauuguuaucuuaugauaacugauggcucagcuucagguguuagugaaugcagauuucuuaagauucgagagggccgaauaauaaaagaaauauuuccaacaggaagaguaaaacacacugaggaaugcacaugcggauuugccagcaauaaaaccauagaaugugccuguagagauaacaguuacacagcaaaaagaccuuuugucaaauuaaacguggagacugauacagcagaaauaagauugaugugcacagauacuuauuuggacacccccagaccaaaugauggaagcauaacaggcccuugugaaucuaauggggacaaagggaguggaggcaucaagggaggauuuguucaucaaagaauggaauccaagauuggaaggugguacucucgaacgaugucuaaaacugaaaggauggggauggaacuguaugucaaguaugauggagacccaugggcugacagugaugcccuagcuuuuaguggaguaaugguuucaaugaaagaaccugguugguacuccuuuggcuucgaaauaaaagauaagaaaugcgauguccccuguauugggauagagaugguacaugaugguggaaaagagacuuggcacucagcagcaacagccauuuacuguuuaaugggcucaggacagcugcugugggacacugucacagguguuaacauggcucuguaa

SEQ ID NO: 62264 - RNA, 1401 nt, Artificial Sequence; identical to SEQ ID NO: 62136
  derived and/or modified CDS sequence (wt) from neuraminidase__InfluenzaB__AHL94893

SEQ ID NO: 62265 - RNA, 1401 nt, Artificial Sequence; identical to SEQ ID NO: 61111
  derived and/or modified CDS sequence (wt) from neuraminidase__InfluenzaB__AHL94904

SEQ ID NO: 62266 - RNA, 1401 nt, Artificial Sequence
  derived and/or modified CDS sequence (wt) from neuraminidase__InfluenzaB__AHL94915
augcuaccuucaacuauacaaacguuaacccuauuucucacaucagggggaguauuauuaucacuauaugugucagcuucauuaucauacuuacuauauucggauauauugcuaaaauucucaccaacagaaauaacugcaccaacaaugccauuggauugugcaaacgcaucaaauguucagguugugaaccguucugcaacaaaaggggugacacuucuucucccagaaccggaguggacauacccgcguuuaucuugcccgggcucaaccuuucagaaagcacuccuaauuagcccucauagauucggagaaaccaaaggaaacucagcucccuugauaauaagggaaccuuuuauugcuuguggaccaaaugaaugcaaacacuuugcucuaacccauuaugcagcccaaccagggggauacuacaauggaacaagaggagacagaaacaagcugaggcaucuaauuucagucaaauugggcaaaaucccaacaguagaaaacuccauuuuccacauggcagcauggagcggguccgcgugccaugaugguaaggaauggacauauaucggaguugauggcccugacaauaaugcauugcucaaaguaaaauauggagaagcauauacugacacauaccauuccuaugcaaacaaaauccuaagaacacaagaaagugccugcaauugcaucgggggaaauuguuaucuuaugauaacugauggcucagcuucagguguuagugaaugcagauuucuuaagauucgagagggccgaauaauaaaagaaauauuuccaacaggaagaguaaaacacacugaggaaugcacaugcggauuugccagcaauaaaaccauagaaugugccuguagagauaacaguuacacagcaaaaagaccuuuugucaaauuaaacguggagacugauacagcagaaauaagauugaugugcacagauacuuauuuggacacccccagaccagaugauggaagcauaacaggcccuugugaaucuaauggggacaaagggaguggaggcaucaagggaggauuuguucaucaaagaauggaauccaagauuggaaggugguacucucgaacgaugucuaaaacugaaaggauggggaugggacuguaugucaaguaugauggagacccaugggcugacagugaugcccuagcuuuuaguggaguaaugguuucaaugaaagaaccugguugguacuccuuuggcuucgaaauaaaagauaagaaaugcgauguccccuguauugggauagagaugguacaugaugguggaaaagagacuuggcacucagcagcaacagccauuuacuguuuaaugggcucaggacagcugcugugggacacugucacagguguugacauggcucuguaa

SEQ ID NO: 62267 - RNA, 1401 nt, Artificial Sequence; identical to SEQ ID NO: 62139
  derived and/or modified CDS sequence (wt) from neuraminidase__InfluenzaB__AHL94926

SEQ ID NO: 62268 - RNA, 1401 nt, Artificial Sequence
  derived and/or modified CDS sequence (wt) from neuraminidase__InfluenzaB__AHL94937
augcuaccuucaacuauacaaacguuaacccuauuucucacaucagggggaguauuauuaucacuauauguuucagcuucauuaucauacuuacuauauucggauauauugcuaaaauucucaccaacagaaauaacugcaccaacacugccauuggauugugcaaacgcaucaaauguucaggcugugaaccguucugcaacaaaaggggugacacuucuucucccagaaccggaguggacauacccgcguuuaucuugcccgggcucaaccuuucagaaagcacuccuaauuagcccucauagauucggagaaaccaaaggaaacucagcucccuugauaauaagggaaccuuuuauugcuuguggaccaaaugaaugcaaacacuuugcucuaacccauuaugcagcccaaccagggggauacuacaauggaacaagaggagacagaaacaagcugaggcaucuaauuucagucaaauugggcaaaaucccaacaguagaaaacuccauuuuccacauggcagcauggagcggguccgcgugccaugaugguaaggaauggacauauaucggaguugauggcccugacaauaaugcauugcucaaaguaaaauauggagaagcauauacugacacauaccauuccuaugcaaacaaaauccuaagaacacaagaaagugccugcaauugcauagggggaaauuguuaucuuaugauaacugauggcucagcuucagguguuagugaaugcagauuucuuaagauucgagagggccgaauaauaaaagaaauauuuccaacaggaagaguaaaacacacugaggaaugcacaugcggauuugccagcaauaaaaccauagaaugugccuguagagauaacaguuacacagcaaaaagaccuuuugucaaauuaaacguggagacugauacagcagaaauaagauugaugugcacagauacuuauuuggacacccccagaccaaacgauggaagcauaacaggcccuugugaaucuaacggggacaaagggaguggaggcaucaagggaggauuuguucaucaaagaauggaauccaagauuggaaggugguacucucgaacgaugucuaaaacugaaaggauggggaugggacuguaugucaaguaugauggagacccaugggcugacagugaugcccuagcuuuuaguggaguaaugguuucaaugaaagaaccugguugguacuccuuuggcuucgaaauaaaagauaagaaaugcgauguccccuguauugggauagagaugguacaugaugguggaaaagagacuuggcacucagcagcaacagccauuuacuguuuaaugggcucaggacagcugcugugggacacugucacagguguugacauggcucuguaa

SEQ ID NO: 62269 - RNA, 1401 nt, Artificial Sequence; identical to SEQ ID NO: 62152
  derived and/or modified CDS sequence (wt) from neuraminidase__InfluenzaB__AHL94948

SEQ ID NO: 62270 - RNA, 1401 nt, Artificial Sequence; identical to SEQ ID NO: 62151
  derived and/or modified CDS sequence (wt) from neuraminidase__InfluenzaB__AHL94959

SEQ ID NO: 62271 - RNA, 1401 nt, Artificial Sequence; identical to SEQ ID NO: 62150
  derived and/or modified CDS sequence (wt) from neuraminidase__InfluenzaB__AHL94969

SEQ ID NO: 62272 - RNA, 1401 nt, Artificial Sequence; identical to SEQ ID NO: 62150
  derived and/or modified CDS sequence (wt) from neuraminidase__InfluenzaB__AHL94978

SEQ ID NO: 62273 - RNA, 1401 nt, Artificial Sequence
  derived and/or modified CDS sequence (wt) from neuraminidase__InfluenzaB__AHM00990
augcuaccuucaacuauacaaacguuaacccuauuucucacaucagggggaguguuauuaucacuauaugugucagcuucauugucauacuuacuauauucggauauauugcuaaaauuuucacagacagaaauaacugcaccaauaaugccauuggauuguacaaacgcaucaaauguucaggcugugaaucauucugcagcaaaaggggugacacuucuucucccagaaccggaguggacauacccucguuuaucuugcccgggcucaaccuuucagaaagcacuccuaauuagcccccauagauucggagaaaucaaaggaaacucagcucccuugauaauaagggaaccuuuuauugcuuguggaccaacggaaugcaaacacuuugcucuaacccauuaugcagcucaaccagggggauacuacaauggaacaagagaagacagaaacaagcugaggcaucuaauuucagucaaauugggaaaaaucccaacaguagaaaacuccauuuuccacauggcagcuuggagcggguccgcaugccaugaugguaaagaauggacauauaucggaguugauggccccgacaguaaugcauugcucaaaauaaaauauggagaagcauauacugacacguaccauuccuaugcaaaaaacauccuaaggacacaagaaagugccugcaauugcaucgggggagauuguuaucuuaugauaacugauggcccagcuucagggguuagugaaugcagauuccuuaagauucgagaaggcagaauaauaaaagaaauauuuccaacaggaagaguaaaacauacugaggaaugcacaugcggauuugccagcaacaaaaccauagaaugugcuuguagagauaaccguuacacagcaaaaagacccuuugucaaauuaaauguggagacugauacagcggaaauaagauugaugugcacagagacuuauuuggacacccccagaccaaaugauggaagcauaacagggccuugcgaaucugauggggacaaagggaguggaggcaucaagggaggauuuguucaucaaagaauggcauccaagauuggaaggugguacucucgaacgaugucuaaaaccaaaagaauggggaugggacuguauguaaaguaugauggagacccauggacugacagugaggcccuugcucuuaguggaguaaugguuucaauggaagaaccugguugguauuccuuuggcuucgaaauaaaagauaagaaaugugauguccccuguauugggauagaaaugguacaugauggugggaaaacgacuuggcacucagcagcaacagccauuuauuguuuaaugggcucaggacaauugcugugggacacugucacagguguugauauggcucuguaa

SEQ ID NO: 62274 - RNA, 1401 nt, Artificial Sequence
  derived and/or modified CDS sequence (wt) from neuraminidase__InfluenzaB__AHM01001
augcuaccuucaacuauacaaacguuaacccuauuucucacaucagggggaguauuauuaucacuauaugugucagcuucauuaucauacuuacuauauucggauauauugcuaaaauucucaccaacagaaauaacugcaccaacaaugccauuggauugugcaaacgcaucaaauguucaggcugugaaccguucugcaacaaaaggggugacacuucuucucccagaaccggaguggacauacccgcguuuaucuugcccgggcucaaccuuucagaaagcacuccuaauuagcccucauagauucggagaaaccaaaggaaacucagcucccuuaauaauaagggaaccuuuuauugcuuguggaccaaaugaaugcaaacacuuugcucuaacccauuaugcagcccaaccagggggauacuacaauggaacaagaggagacagaaacaagcugaggcaucuaauuucagucaaauugggcaaaaucccaacaguagagaacuccauuuuccacauggcagcauggagcggguccgcgugccaugaugguaaggaauggacauauaucggaguugauggcccugacaauaaugcauugcucaaaguaaaauauggagaagcauauacugacacauaccauuccuaugcaaacaaaauccuaagaacacaagaaagugccugcaauugcaucgggggaaauuguuaucuaaugauaacugauggcucagcuucagguguuagugaaugcagauuucuuaagauucgagagggccgaauaauaaaagaaauauuuccaacaggaagaguaaaacacacugaggaaugcacaugcggauuugccagcaauaaaaccauagaaugugccuguagagacaacagguacacagcaaaaagaccuuuugucaaauuaaacguggagacugauacagcagaaauaagauugaugugcacagauacuuauuuggacacccccagaccaaaugauggaagcauaacaggcccuugugaaucugauggggacaaagggaguggaggcaucaagggaggauuuguucaucaaagaaugaaauccaagauuggaaggugguacucucgaacgaugucuaaaacugaaaggauggggaugggacuguaugucaaguaugauggagacccaugggcugacagugaugcccuagcuuuuaguggaguaaugguuucaaugaaagaaccugguugguauuccuuuggcuucgaaauaaaagauaagaaaugcgauguccccuguauugggauagagaugguacaugaugguggaaaagagacuuggcacucagcagcaacagccauuuacuguuuaaugggcucaggacagcugcugugggacacugucacagguguugacauggcucuguaa

SEQ ID NO: 62275 - RNA, 1401 nt, Artificial Sequence
  derived and/or modified CDS sequence (wt) from neuraminidase__InfluenzaB__AHM01012
augcuaccuucaacuauacaaacguuaacccuauuucucacaucagggggaguauuauuaucacuauaugugucagcuucauuaucauacuuacuauauucggauauauugcuaaaauucucaccaacagaaauaacugcaccaacaaugccauuggauugugcaaacgcaucaaauguucaggcugugaaccguucugcaacaaaaggggugacacuucuucucccagaaccggaguggacauacccgcguuuaucuugcccgggcucaaccuuucagaaagcacuccuaauuagcccucauagauucggagaaaccaaaggaaacucagcucccuuaauaauaagggaaccuuuuauugcuuguggaccaaaugaaugcaaacacuuugcucuaacccauuaugcagcccaaccagggggauacuacaauggaacaagaggagacagaaacaagcugaggcaucuaauuucagucaaauugggcaaaaucccaacaguagagaacuccauuuuccacauggcagcauggagcggguccgcgugccaugaugguaaggaauggacauauaucggaguugauggcccugacaauaaugcauugcucaaaguaaaauauggagaagcauauacugacacauaccauuccuaugcaaacaaaauccuaagaacacaagaaagugccugcaauugcaucgggggaaauuguuaucuaaugauaacugauggcucagcuucagguguuagugaaugcagauuucuuaagauucgagagggccgaauaauaaaagaaauauuuccaacaggaagaguaaaacacacugaggaaugcacaugcggauuugccagcaauaaaaccauagaaugugccuguagagacaacagguacacagcaaaaagaccuuuugucaaauuaaacguggagacugauacagcagaaauaagauugaugugcacagauacuuauuuggacacccccagaccaaaugauggaagcauaacaggcccuugugaaucugauggggacaaagggaguggaggcaucaagggaggauuuguucaucaaagaaugaaauccaagauuggaaggugguacucucgaacgaugucuaaaacugaaaggauggggaugggacuguaugucaaguaugauggagacccauggacugacagugaugcccuagcuuuuaguggaguaaugguuucaaugaaagaaccugguugguauuccuuuggcuucgaaauaaaagauaagaaaugcgauguccccuguauugggauagagaugguacaugaugguggaaaagagacuuggcacucagcagcaacagccauuuacuguuuaaugggcucaggacagcugcugugggacacugucacagguguugacauggcucuguaa

SEQ ID NO: 62276 - RNA, 1401 nt, Artificial Sequence; identical to SEQ ID NO: 62274
  derived and/or modified CDS sequence (wt) from neuraminidase__InfluenzaB__AHM01023

SEQ ID NO: 62277 - RNA, 1401 nt, Artificial Sequence; identical to SEQ ID NO: 62274
  derived and/or modified CDS sequence (wt) from neuraminidase__InfluenzaB__AHM01034

SEQ ID NO: 62278 - RNA, 1401 nt, Artificial Sequence
  derived and/or modified CDS sequence (wt) from neuraminidase__InfluenzaB__AHM01045
augcuaccuucaacuauacaaacguuaacccuauuucucacaucagggggaguauuauuaucacuauaugugucagcuucauuaucauacuuacuauauucggauauauuguuaaaauucucaccaacagaaauaacugcaccaacaaugccauuggauugugcaaacgcaucaaauguucaggcugugaaccguucugcaacaaaaggggugacacuucuucucccagaaccgggguggacauacccgcguuuaucuugcccgggcucaaccuuucagaaagcacuccuaauuagcccucauagauucggagaaaccaaaggaaacucagcucccuuaauaauaagggaaccuuuuauugcuuguggaccaaaugaaugcaaacacuuugcucuaacccauuaugcagcccaaccagggggauacuacaauggaacaagaggagacagaaacaagcugaggcaucuaauuucagucaaauugggcaaaaucccaacaguagagaacuccauuuuccacauggcagcauggagcggguccgcgugccaugaugguaaggaauggacauauaucggaguugauggcccugacaauaaugcauugcucaaaguaaaauauggagaagcauauacugacacauaccauuccuaugcaaacaaaauccuaagaacacaagaaagugccugcaauugcaucgggggaaauuguuaucuaaugauaacugauggcucagcuucagguguuagugaaugcagauuucuuaagauucgagagggccgaauaauaaaagaaauauuuccaacaggaagaguaaaacacacugaggaaugcacaugcggauuugccagcaauaaaaccauagaaugugccuguagagacaacagguacacagcaaaaagaccuuuugucaaauuaaacguggagacugauacagcagaaauaagauugaugugcacagauacuuauuuggacacccccagaccaaaugauggaagcauaacaggcccuugugaaucugauggggacaaagggaguggaggcaucaagggaggauuuguucaucaaagaaugaaauccaagauuggaaggugguacucucgaacgaugucuaaaacugaaaggauggggaugggacuguaugucaaguaugauggagacccaugggcugacagugaugcccuagcuuuuaguggaguaaugguuucaaugaaagaaccugguugguauuccuuuggcuucgaaauaaaagauaagaaaugcgauguccccuguauugggauagagaugguacaugaugguggaaaagagacuuggcacucagcagcaacagccauuuacuguuuaaugggcucaggacagcugcugugggacacugucgcagguguugacauggcucuguaa

SEQ ID NO: 62279 - RNA, 1401 nt, Artificial Sequence
  derived and/or modified CDS sequence (wt) from neuraminidase__InfluenzaB__AHM01056
augcuaccuucaacuacacaaacguuaacccuauuucucacaucagggggaguauuauuaucacuauaugugucagcuucauuaucauacuuacuauauucggauauauugcuaaaauucucaccaacagaaauaacugcaccaacaaugccauuggauugugcaaacgcaucaaauguucaggcugugaaccguucugcaacaaaaggggugacacuucuucucccagaaccggaguggacauacccacguuuaucuugcccgggcucaaccuuucagaaagcacuccuaauuagcccucauagauucggagaaaccaaaggaaacucagcucccuugauaauaagggaaccuuuuauugcuuguggaccaaaugaaugcaaacacuuugcucuaacccauuaugcagcccaaccagggggauacuacaauggaacaagaggagacagaaacaagcugaggcaucuaauuucagucaaauugggcaaaaucccaacaguagaaaacuccauuuuccacauggcagcauggagcggguccgcaugccaugaugguaaggaauggacauauaucggaguugauggcccugacaauaaugcauugcucaaaguaaaauauggagaagcauauacugacacauaccauuccuaugcaaacaaaauccuaagaacacaagaaagugccugcaauugcaucgggggaaauuguuaucuaaugauaacugauggcucagcuucagguguuagugaaugcagauuucuuaagauucgagagggccgaauaauaaaagaaauauuuccaacaggaagaguaaaacacacugaggaaugcacaugcggauuugccagcaauaaaaccauagaaugugccuguagagacaacagguacacagcaaaaagaccuuuugucaaauuaaacguggagacugauacagcagaaauaagauugaugugcacagauacuuauuuggacacccccagaccaaaugauggaagcauaacaggcccuugugaaucugauggggacaaagggaguggaggcaucaagggaggauuuguucaucaaagaaugaaauccaagauuggaaggugguacucucgaacgaugucuaaaacugaaaggauggggaugggacuguaugucaaguaugauggagacccaugggcugacagugaugcccuaguuuuuaguggaguaaugguuucaaugaaagaaccugguugguauuccuuuggcuucgaaauaaaagauaagaaaugcgauguccccuguauugggauagagaugguacaugaugguggaaaagagacuuggcacucagcagcaacagccauuuacuguuuaaugggcucaggacagcugcugugggacacugucacagguguugacauggcucuguaa

SEQ ID NO: 62280 - RNA, 1401 nt, Artificial Sequence
  derived and/or modified CDS sequence (wt) from neuraminidase__InfluenzaB__AHM01067
augcuaccuucaacuauacaaacguuaacccuauuucucacaucagggggaguauuauuaucacuguaugugucagcuucauuaucauacuuacuauauucggauauauugcuaaaauucucaccaacagaaauaacugcaccaacaaugccauuggauugugcaaacgcaucaaauguucaggcugugaaccguucugcaacaaaaggggugacacuucuucucccagaaccggaguggacauacccgcguuuaucuugcccgggcucaaccuuucagaaagcacuccuaauuagcccucauagauucggagaaaccaaaggaaacucagcucccuuaauaauaagggaaccuuuuauugcuuguggaccaaaugaaugcaaacacuuugcucuaacccauuaugcagcccaaccagggggauacuacaauggaacaagaggagacagaaacaagcuaaggcaucuaauuucagucaaauugggcaaaaucccaacaguagagaacuccauuuuccacauggcagcauggagcggguccgcgugccaugaugguaaggaauggacauauaucggaguugauggcccugacaauaaugcauugcucaaaguaaaauauggagaagcauauacugacacauaucauuccuaugcaaacaaaauccuaagaacacaagaaagugccugcaauugcaucgggggaaauuguuaucuaaugauaacugauggcucagcuucagguguuagugaaugcagauuucuuaagauucgagagggccgaauaauaaaagaaauauuuccaacaggaagaguaaaacacacugaggaaugcacaugcggauuugccagcaauaaaaccauagaaugugccuguagagacaacagguacacagcaaaaagaccuuuugucaaauuaaacguggagacugauacagcagaaauaagauugaugugcacagauacuuauuuggacacccccagaccaaaugauggaagcauaacaggcccuugugaaucugauggggacaaagggaguggaggcaucaagggaggauuuguucaucaaagaaugaaauccaagauuggaaggugguacucucgaacgaugucuaaaacugaaaggauggggaugggacuguaugucaaguaugauggagacccaugggcugacagugaugcccuagcuuuuaguggaguaaugguuucaaugaaagaaccugguugguauuccuuuggcuucgaaauaaaagauaagaaaugcgauguccccuguauugggauagagaugguacaugaugguggaaaagagacuuggcacucagcagcaacagccauuuacuguuuaaugggcucaggacagcugcugugggacacugucacagguguugacauggcucuguaa

SEQ ID NO: 62281 - RNA, 1401 nt, Artificial Sequence
  derived and/or modified CDS sequence (wt) from neuraminidase__InfluenzaB__AHM01078
augcuaccuucaacuauacaaacguuaacccuauuucucacaucagggggaguguuauuaucacuauaugugucagcuucauugucauacuuacuauauucggauauauugcuaaaauuuucacagacagaaauaacugcaccaauaaugccauuggauugugcaaacgcaucaaauguucaggcugugaaucguucugcagcaaaaggggugacacuucuucucccagaaccggaguggacauacccucguuuaucuugcccgggcucaaccuuucagaaagcacuccuaauuagcccccauagauucggagaaaucaaaggaaacucagcucccuugauaauaagggaaccuuuuauugcuuguggaccaacggaaugcaaacacuuugcucuaacccauuaugcagcucaaccagggggauacuacaauggaacaagagaagacagaaacaagcugaggcaucuaauuucagucaaauugggcaaaaucccaacaguagaaaacuccauuuuccacauggcagcuuggagcggguccgcaugccaugaugguaaagaauggacauauaucggaguugauggccccgacaguaaugcauugcucaaaauaaaauauggagaagcauauacugacacguaccauuccuaugcaaaaaacauccuaaggacacaagaaagugccugcaauugcaucgggggagauuguuaucuuaugauaacugauggcccagcuucagggguuagugaaugcagauuccuuaagauucgagagggcagaauaauaaaagaaauauuuccaacaggaagaguaaaacauacugaggaaugcacaugcggauuugccagcaacaaaaccauagaaugugcuuguagagauaaccguuacacagcaaaaagacccuuugucaaauuaaauguggagacugauacagcggaaauaagguugaugugcacagagacuuauuuggacacccccagaccaaaugauggaagcauaacagggccuugcgaaucugauggggacaaagggaguggaggcaucaagggaggauuuguucaucaaagaauggcauccaagauuggaaggugguacucucgaacgaugucuaaaaccaaaagaauggggaugggacuguauguaaaguaugauggagacccauggacugacagugaagcccuugcucuuaguggaguaaugguuucaauggaagaaccugguugguauuccuuuggcuucgaaauaaaagauaagaaaugugauguccccuguauugggauagaaaugguacaugauggugggaaaacgacuuggcacucagcagcaacagccauuuauuguuuaaugggcucaggacaauugcugugggacacugucacagguguugauauggcucuguaa

SEQ ID NO: 62282 - RNA, 1401 nt, Artificial Sequence
  derived and/or modified CDS sequence (wt) from neuraminidase__InfluenzaB__AHM01089
augcuaccuucaacuauacaaacguuaacccuauuucucacaucagggggaguauuauuaucacuauaugugucagcuucauuaucauacuuacuauauucggauauauugcuaaaauucucaccaacagaaauaacugcaccaacaaugccauuggauugugcaaacgcaucaaauguucaggcugugaaccguucugcagcaaaaggggugacacuucuucucccagaaccggaguggacauacccgcguuuaucuugcccgggcucaaccuuucagaaagcacuccuaauuagcccucauagauucggagaaaccaaaggaaacucagcucccuugauaauaagggaaccuuuuauugcuuguggaccaaaugaaugcaaacacuuugcucuaacccauuaugcagcccaaccagggggauacuacaauggaacaagaggagacagaaacaagcugaggcaucuaauuucagucaaauugggcaaaaucccaacaguagaaaacuccauuuuccacauggcagcauggagcggguccgcgugccaugaugguaaggaauggacauauaucggaguugauggcccugacaauaaugcauugcucaaaguaaaauauggagaagcauauacugacacauaccauuccuaugcaaacaaaauccuaagaacacaagaaagugccugcaauugcaucgggggaaauuguuaucuaaugauaacugauggcucagcuucagguguuagugaaugcagauuucuuaagauucgagagggccgaauaauaaaagaaauauuuccaacaggaagaguaaaacacacugaggaaugcacaugcggauuugccagcaauaaaaccauagaaugugccuguagagacaacagguacacagcaaaaagaccuuuugucaaauuaaacguggagacugauacagcagaaauaagauugaugugcacagauacuuauuuggacacccccagaccaaaugauggaagcauaacaggcccuugugaaucugauggggacaaagggaguggaggcaucaagggaggauuuguucaucaaagaaugaaauccaagauuggaaggugguacucucgaacgaugucuaaaacugaaaggauggggaugggacuguaugucaaguaugauggagacccaugggcugacagugaugcccuagcuuuuaguggaguaaugguuucaaugaaagaaccugguugguacuccuuuggcuucgaaauaaaagauaagaaaugcgauguccccuguauugggauagagaugguacaugaugguggaaaagagacuuggcacucagcagcaacagccauuuacuguuuaaugggcucaggacagcugcugugggacacugucacagguguugacauggcucuguaa

SEQ ID NO: 62283 - RNA, 1401 nt, Artificial Sequence
  derived and/or modified CDS sequence (wt) from neuraminidase__InfluenzaB__AHM01100
augcuaccuucaacuauacaaacguuaacccuauuucucacaucagggggaguguuauuaucacuauaugugucagcuucauugucauacuuacuauauucggauauauugcuaaaauuuucacagacagaaauaacugcaccaauaaugccauuggauugugcaaacgcaucaaauguucaggcugugaaucguucugcagcaaaaggggugacacuucuucucccagaaccggaguggacauacccucguuuaucuugcccgggcucaaccuuucagaaagcacuccuaauuagcccccauagauucggagaaaucaaaggaaacucagcucccuugauaauaagggaaccuuuuauugcuuguggaccaacggaaugcaaacacuuugcucuaacccauuaugcagcucaaccagggggauacuacaauggaacaagagaagacagaaacaagcugaggcaucuaauuucagucaaauugggcaaaaucccaacaguagaaaacuccauuuuccacauggcagcuuggagcggguccgcaugccaugaugguaaagaauggacauauaucggaguugauggccccgacaguaaugcauugcucaaaauaaaauauggagaagcauauacugacacguaccauuccuaugcaaaaaacauccuaaggacacaagaaagugccugcaauugcaucgggggagauuguuaucuuaugauaacugauggcccagcuucagggguuagugaaugcagauuccuuaagauucgagagggcagaauaauaaaagaaauauuuccaacaggaagaguaaaacauacugaggaaugcacaugcggauuugccagcaacaaaaccauagaaugugcuuguagagauaaccguuacacagcaaaaagacccuuugucaaauuaaauguggagacugauacagcggaaauaagauugaugugcacagagacuuauuuggacacccccagaccaaaugauggaagcauaacagggccuugcgaaucugauggggacaaagggaguggaggcaucaagggaggauuuguucaucaaagaauggcauccaagauuggaaggugguacucucgaacgaugucuaaaaccaaaagaauggggaugggacuguauguaaaguaugauggagacccauggacugacagugaagcccuugcucuuaguggaguaaugguuucaauggaagaaccugguugguauuccuuuggcuucgaaauaaaagauaagaaaugugauguccccuguauuggaauagaaaugguacaugauggugggaaaacgacuuggcacucagcagcaacagccauuuauuguuuaaugggcucaggacaauugcugugggacacugucacagguguugauauggcucuguaa

SEQ ID NO: 62284 - RNA, 1401 nt, Artificial Sequence
  derived and/or modified CDS sequence (wt) from neuraminidase__InfluenzaB__AHM01111
augcuaccuucaacuauacaaacguuaacccuauuucucacaucagggggaguauuauuaucacuguaugugucagcuucauuaucauacuuacuauauucggauauauugcuaaaauucucaccaacagaaauaacugcaccaacaaugccauuggauugugcaaacgcaucaaauguucaggcugugaaccguucugcaacaaaaggggugacacuucuucucccagaaccggaguggacauacccgcguuuaucuugcccgggcucaaccuuucagaaagcacuccuaauuagcccucauagauucggagaaaccaaaggaaacucagcucccuuaauaauaagggaaccuuuuauugcuuguggaccaaaugaaugcaaacacuuugcucuaacccauuaugcagcccaaccagggggauacuacaauggaacaagaggagacagaaacaagcuaaggcaucuaauuucagucaaauugggcaaaaucccaacaguagagaacuccauuuuccacauggcagcauggagcggguccgcgugccaugaugguaaggaauggacauauaucggaguugauggcccugacaauaaugcauugcucaaaguaaaauauggagaagcauauacugacacauaucauuccuaugcaaacaaaauccuaagaacacaagaaagugccugcaauugcaucgggggaaauuguuaucuaaugauaacugauggcucagcuucagguguuagugaaugcagauuucuuaagauucgagagggccgaauaauaaaagaaauauuuccaacaggaagaguaaaacacacugaggaaugcacaugcggauuugccagcaauaaaaccauagaaugugccuguagagacaacagguacacagcaaaaagaccuuuugucaaauuaaacguggagacugauacagcagaaauaagauugaugugcacagauacuuauuuggacacccccagaccaaaugauggaagcauaacaggcccuugugaaucugauggggacaaagggaguggaggcaucaagggaggauuuguucaucaaagaaugaaauccaagauuggaaggugguacucucgaacgaugucuaaaacugaaaggauggggaugggacuguaugucaaguaugauggagacccaugggcugacagugaugcccuagccuuuaguggaguaaugguuucaaugaaagaaccugguugguauuccuuuggcuucgaaauaaaagauaagaaaugcgauguccccuguauugggauagagaugguacaugaugguggaaaagagacuuggcacucagcagcaacagccauuuacuguuuaaugggcucaggacagcugcugugggacacugucacagguguugacauggcucuguaa

SEQ ID NO: 62285 - RNA, 1401 nt, Artificial Sequence
  derived and/or modified CDS sequence (wt) from neuraminidase__InfluenzaB__AHM01122
augcuaccuucaacuauacaaacguuaacccuauuucucacaucagggggaguauuauuaucacuauaugugucagcuucauuaucauacuuacuauauucggauauauugcuaaaauucucaccaacagaaauaacugcaccaacaaugccauuggauugugcaaacgcaucaaauguucaggcugugaaccguucugcaacaaaaggggugaaacuucuucucccagaaccggaguggacauacccgcguuuaucuugcccgggcucaaccuuucagaaagcacuccuaauuagcccucauagauucggagaaaccaaaggaaacucagcucccuuaauaauaagggaaccuuuuauugcuuguggaccaaaugaaugcaaacacuuugcucuaacccauuaugcagcccaaccagggggauacuacaauggaacaagaggagacagaaacaagcugaggcaucuaauuucagucaaauugggcaaaaucccaacaguagagaacuccauuuuccacauggcagcauggagcggguccgcgugccaugaugggaaggaauggacauauaucggaguugauggcccugacaauaaugcauugcucaaaguaaaauauggagaagcauauacugacacauaccauuccuaugcaaacaaaauccuaagaacacaagaaagugccugcaauugcaucgggggaaauuguuaucuaaugauaacugauggcucagcuucagguguuagugaaugcagauuucuuaagauucgagagggccgaauaauaaaagaaauauuuccaacaggaagaguaaaacacacugaggaaugcacaugcggauuugccagcaauaaaaccauagaaugugccuguagagacaacagguacacagcaaaaagaccuuuugucaaauuaaacguggagacugauacagcagaaauaagauugaugugcacagauacuuauuuggacacccccagaccaaaugauggaagcauaacaggcccuugugaaucugauggggacaaagggaguggaggcaucaagggaggauuuguucaucaaagaaugaaauccaagauuggaaggugguacucucgaacgaugucuaaaaccgaaaggauggggaugggacuguaugucaaguaugauggagacccaugggcugacagugaugcccuagcuuuuaguggaguaaugguuucaaugaaagaaccugguugguauuccuuuggcuucgaaauaaaagauaagaaaugcgauguccccuguauugggauagagaugguacaugaugguggaaaagagacuuggcacucagcagcaacagccauuuacuguuuaaugggcucaggacagcugcugugggacacugucacagguguugacauggcucuguaa

SEQ ID NO: 62286 - RNA, 1401 nt, Artificial Sequence; identical to SEQ ID NO: 62274
  derived and/or modified CDS sequence (wt) from neuraminidase__InfluenzaB__AHM01133

SEQ ID NO: 62287 - RNA, 1401 nt, Artificial Sequence
  derived and/or modified CDS sequence (wt) from neuraminidase__InfluenzaB__AHM01144
augcuaccuucaacuauacaaacguuaacccuauuucucacaucagggggaguauuauuaucacuauaugugucagcuucauuaucauacuuacuauauucggauauauugcuaaaauucucaccaacagaaauaacugcaccaacaaugccauuggauugugcaaacgcaucaaauguucaggcugugaaccguucugcagcaaaaggggugacacuucuucucccagaaccggaguggacauacccgcguuuaucuugcccgggcucaaccuuucagaaagcacuccuaauuagcccucauagauucggagaaaccaaaggaaacucagcucccuugauaauaagggaaccuuuuauugcuuguggaccaaaugaaugcaaacacuuugcucuaacccauuaugcagcccaaccagggggauacuacaauggaacaagaggagacagaaacaagcugaggcaucuaauuucagucaaauugggcaaaaucccaacaguagaaaacuccauuuuccacauggcagcauggagcggguccgcgugccaugaugguaaggaauggacauauaucggaguugauggcccugacaauaaugcauugcucaaaguaaaauauggagaagcauauacugacacauaccauuccuaugcaaacaaaauccuaagaacacaagaaagugccugcaauugcaucgggggaaauuguuaucuaaugauaacugauggcucagcuucagguauuagugaaugcagauuucuuaagauucgagagggccgaauaauaaaagaaauauuuccaacaggaagaguaaaacacacugaggaaugcacaugcggauuugccagcaauaaaaccauagaaugugccuguagagacaacagguacacagcaaaaagaccuuuugucaaauuaaacguggagacugauacagcagaaauaagauugaugugcacagauacuuauuuggacacccccagaccaaaugauggaagcauaacaggcccuugugaaucugauggggacaaagggaguggaggcaucaagggaggauuuguucaucaaagaaugaaauccaagauuggaaggugguacucucgaacgaugucuaaaacugaaaggauggggaugggacuguaugucaaguaugauggagacccaugggcugacagugaugcccuagcuuuuaguggaguaaugguuucaaugaaagaaccugguugguacuccuuuggcuucgaaauaaaagauaagaaaugcgauguccccuguauugggauagagaugguacaugaugguggaaaagagacuuggcacucagcagcaacagccauuuacuguuuaaugggcucaggacagcugcugugggacacugucacagguguugacauggcucuguaa

SEQ ID NO: 62288 - RNA, 1401 nt, Artificial Sequence
  derived and/or modified CDS sequence (wt) from neuraminidase__InfluenzaB__AHM01166
augcuaccuucaacuauacaaacguuaacccuauuucucacaucagggggaguauuauuaucacuauaugugucagcuucauuaucauacuuacuauauucggauauauugcuaaaauucucaccaacagaaauaacugcaccaacaaugccauuggauugugcaaacgcaucaaauguucaggcugugaaccguucugcaacaaaaggggugacacuucuucucccagaaccggaguggacauacccgcguuugucuugcccgggcucaaccuuucagaaagcacuccuaauuagcccucauagauucggagaaaccaaaggaaacucagcucccuuaauaauaagggaaccuuuuauugcuuguggaccaaaugaaugcaaacacuuugcucuaacccauuaugcagcccaaccagggggauacuacaauggaacaagaggagacagaaacaagcugaggcaucuaauuucagucaaauugggcaaaaucccaacaguagagaacuccauuuuccacauggcagcauggagcggguccgcgugccaugaugguaaggaauggacauauaucggaguugauggcccugacaauaaugcauugcucaaaguaaaauauggagaagcauauacugacacauaccauuccuaugcaaacaaaauccuaagaacacaagaaagugccugcaauugcaucgggggaaauuguuaucuaaugauaacugauggcucagcuucagguguuagugaaugcagauuucuuaagauucgagagggccgaauaauaaaagaaauauuuccaacaggaagaguaaaacacacugaggaaugcacaugcggauuugccagcaauaaaaccauagaaugugccuguagagacaacagguacacagcaaaaagaccuuuugucaaauuaaacguggagacugauacagcagaaauaagauugaugugcacagauacuuauuuggacacccccagaccaaaugauggaagcauaacaggcccuugugaaucugauggggacaaagggaguggaggcaucaagggaggauuuguucaucaaagaaugaaauccaagauuggaaggugguacucucgaacgaugucuaaaacugaaaggauggggaugggacuguaugucaaguaugauggagacccaugggcugacagugaugcccuagcuuuuaguggaguaaugguuucaaugaaagaaccugguugguauuccuuuggcuucgaaauaaaagauaagaaaugcgauguccccuguauugggauagagaugguacaugaugguggaaaagagacuuggcacucagcagcaacagccauuuacuguuuaaugggcucaggacagcugcugugggacacugucacagguguugacauggcucuguaa

SEQ ID NO: 62289 - RNA, 1401 nt, Artificial Sequence
  derived and/or modified CDS sequence (wt) from neuraminidase__InfluenzaB__AHM01188
augcuaccuucaacuauacaaacguuaacccuauuucucacaucagggggaguauuauuaucacuauaugugucagcuucauuaucauacuuacuauauucggauauauugcuaaaauucucaccaacagaaauaacugcaccaacaaugccauuggauugugcaaacgcaucaaauguucaggcugugaaccauucugcaacaaaaggggugacacuucuucucccagaaccggaguggacauacccgcguuuaucuugcccgggcucaaccuuucagaaagcacuccuaauuagcccucauagauucggagaaaccaaaggaaacucagcucccuuaauaauaagggaaccuuuuauugcuuguggaccaaaugaaugcaaacacuuugcucuaacccauuaugcagcccaaccagggggauacuacaauggaacaagaggagacagaaacaagcugaggcaucuaauuucagucaaauugggcaaaaucccaacaguagagaacuccauuuuccacauggcagcauggagcggguccgcgugccaugaugguaaggaauggacauauaucggaguugauggcccugacaauaaugcauugcucaaaguaaaauauggagaagcauauacugacacauaccauuccuaugcaaacaaaauccuaagaacacaagaaagugccugcaauugcaucgggggaaauuguuaucuaaugauaacugauggcucagcuucagguguuagugaaugcagauuucuuaagauucgagagggccgaauaauaaaagaaauauuuccaacaggaagaguaaaacacacugaggaaugcacaugcggauuugccagcaauaaaaccauagaaugugccuguagagacaacagguacacagcaaaaagaccuuuugucaaauuaaacguggagacugauacagcagaaauaagauugaugugcacagauacuuauuuggacacccccagaccaaaugacggaagcauaacaggcccuugugaaucugauggggacaaagggaguggaggcaucaagggaggauuuguucaucaaagaaugaaauccaagauuggaaggugguacucucgaacgaugucuaaaacugaaaggauggggaugggacuguaugucaaguaugauggagacccaugggcugacagugaugcccuaguuuuuaguggaguaaugguuucaaugaaagaaccugguugguauuccuuuggcuucgaaauaaaagauaagaaaugcgauguccccuguauugggauagagaugguacaugaugguggaaaagagacuuggcacucagcagcaacagccauuuacuguuuaaugggcucaggacagcugcugugggacacugucacagguguugacauggcucuguaa

SEQ ID NO: 62290 - RNA, 1401 nt, Artificial Sequence; identical to SEQ ID NO: 62282
  derived and/or modified CDS sequence (wt) from neuraminidase__InfluenzaB__AHM01199

SEQ ID NO: 62291 - RNA, 1401 nt, Artificial Sequence
  derived and/or modified CDS sequence (wt) from neuraminidase__InfluenzaB__AHM01210
augcuaccuucaacuauacaaacguuaacccuauuucucacaucagggggaguauuauuaucacuauaugugucagcuucauuaucauacuuacuauauucggauauauugcuaaaauucucaccaacagaaauaacugcaccaacaaugccauuggauugugcaaacgcaucaaauguucaggcugugaaccguucugcaacaaaaggggugacacuucuucucccagaaccgggguggacauacccgcguuuaucuugcccgggcucaaccuuucagaaagcacuccuaauuagcccucauagauucggagaagccaaaggaaacucagcucccuuaauaauaagggaaccuuuuauugcuuguggaccaaaugaaugcaaacacuuugcucuaacccauuaugcagcccaaccagggggauacuacaauggaacaagaggagacagaaacaagcugaggcaucuaauuucagucaaauugggcaaaaucccaacaguagagaacuccauuuuccacauggcagcauggagcggguccgcgugccaugaugguaaggaauggacauauaucggaguugauggcccugacaauaaugcauugcucaaaguaaaauauggagaagcauauacugacacauaccauuccuaugcaaacaaaauccuaagaacacaagaaagugccugcaauugcaucgggggaaauuguuaucuaaugauaacugauggcucagcuucagguguuagugaaugcagauuucuuaagauucgagagggccgaauaauaaaagaaauauuuccaacaggaagaguaaaacacacugaggaaugcacaugcggauuugccagcaauaaaaccauagaaugugccuguagagacaacagguacacagcaaaaagaccuuuugucaaauuaaacguggagacugauacagcagaaauaagauugaugugcacagauacuuauuuggacacccccagaccaaaugauggaagcauaacaggcccuugugaaucugauggggacaaagggaguggaggcaucaagggaggauuuguucaucaaagaaugaaauccaagauuggaaggugguacucucgaacgaugucuaaaacugaaaggauggggaugggacuguaugucaaguaugauggagacccaugggcugacagugaugcccuagcuuuuaguggaguaaugguuucaaugaaagaaccugguugguauuccuuuggcuucgaaauaaaagauaagaaaugcgauguccccuguauugggauagagaugguacaugaugguggaaaagagacuuggcacucagcagcaacagccauuuacuguuuaaugggcucaggacagcugcugugggacacugucgcagguguugacauggcucuguaa

SEQ ID NO: 62292 - RNA, 1401 nt, Artificial Sequence
  derived and/or modified CDS sequence (wt) from neuraminidase__InfluenzaB__AHM01221
augcuaccuucaacuauacaaacguuaacccuauuucucacaucagggggaguauuauuaucacuauaugugucagcuucauuaucauacuuacuauauucggauauauugcuaaaauucucaccaacagaaauaacugcaccaacaaugccauuggauugugcaaacgcaucaaauuuucaggcugugaaccguucugcaacaaaaggggugacauuucuucucccagaaccggaguggacauacccgcguuuaucuugcccgggcucaaccuuucagaaagcacuccuaauuagcccucauagauucggagaaaccaaaggaaacucagcucccuugauaauaagggaaccuuuuauugcguguggaccaaaugaaugcaaacacuuugcucuaacccauuaugcagcccaaccagggggauacuacaauggaacaagaggagacagaaacaagcugaggcauuuaauuucagucaaauugggcaaaaucccaacaguagaaaacuccauuuuccacauggcagcauggagcggguccgcgugccaugaugguaaggaauggacauauaucggaguugauggcccugacaauaaugcauugcucaaaguaaaauauggagaagcauauacugacacauaccauuccuaugcaaacaaaauccuaagaacacaagaaagugccugcaauuguaucgggggaaauuguuaucuaaugauaacugauggcucagcuucagguguuagugaaugcagauuucuuaagauucgagagggccgaauaauaaaagaaauauuuccaacaggaagaguaaaacacacugaggaaugcacaugcggauuugccagcaauaaaaccauagaaugugccuguagagacaacagguacacagcaaaaagaccuuuugucaaauuaaacguggagacugauacagcagaaauaagauugaugugcacagauacuuauuuggacacccccagaccaaaugauggaagcauaacaggcccuugugaaucugauggggacaaagggaguggaggcaucaagggaggauuuguucaucaaagaaugaaauccaagauuggaaggugguacucucgaacgaugucuaaaacugaaaggauggggaugggacuguaugucaaguaugauggagacccaugggcugacagugaugcccuagcuuuuaguggaguaaugguuucaaugaaagaaccugguugguacuccuuuggcuucgaaauaaaagauaagaaaugcgauguccccuguauugggauagagauggugcaugaugguggaaaagagacuuggcacucagcagcaacagccauuuacuguuuaaugggcucaggacagcugcugugggacacuguuacagguguugacauggcucuguaa

SEQ ID NO: 62293 - RNA, 1401 nt, Artificial Sequence
  derived and/or modified CDS sequence (wt) from neuraminidase__InfluenzaB__AHM01232
augcuaccuucaacuauacaaacguuaacccuauuucucacaucagggggaguguuauuaucacuauaugugucagcuucauugucauacuuacuauauucggauauauugcuaaaauuuucacagacagaaauaacugcaccaauaaugccauuggauugugcaaacgcaucaaauguucaggcugugaaucguucugcagcaaaaggggugacacuucuucucccagaaccggaguggacauacccucguuuaucuugcccgggcucaaccuuucagaaagcacuccuaauuagcccccauagauucggagaaaucaaaggaaacucagcucccuugauaauaagggaaccuuuuauugcuuguggaccaacggaaugcaaacacuuugcucuaacccauuaugcagcucaaccagggggauacuacaauggaacaagagaagacagaaacaagcugaggcaucuaauuucagucaaauugggcaaaaucccaacaguagaaaacuccauuuuccacauggcagcuuggagcggguccgcaugccaugaugguaaagaauggacauauaucggaguugauggccccgacaguaaugcauugcucaaaauaaaauauggagaagcauauacugacacguaccauuccuaugcaaaaaacauccuaaggacacaagaaagugccugcaauugcaucgggggagauuguuaucuuaugauaacugauggcccagcuucagggguuagugaaugcagauuccuuaagauucgagagggcagaauaauaaaagaaauauuuccaacaggaagaguaaaacauacugaggagugcacaugcggauuugccagcaacaaaaccauagaaugugcuuguagagauaaccguuacacagcaaaaagacccuuugucaaauuaaauguggagacugauacagcggaaauaagguugaugugcacagagacuuauuuggacacccccagaccaaaugauggaagcauaacagggccuugcgaaucugauggggacaaagggaguggaggcaucaagggaggguuuguucaucaaagaauggcauccaagauuggaaggugguacucucgaacgaugucuaaaaccaaaagaauggggaugggacuguauguaaaguaugauggagacccauggacugacagugaagcccuugcucuuaguggaguaaugguuucaauggaagaaccugguugguauuccuuuggcuucgaaauaaaagauaaaaaaugugauguccccuguauugggauagaaaugguacaugauggugggaaaacgacuuggcacucagcagcaacagccauuuauuguuuaaugggcucaggacaauugcugugggacacugucacagguguugauauggcucuguaa

SEQ ID NO: 62294 - RNA, 1401 nt, Artificial Sequence; identical to SEQ ID NO: 62284
  derived and/or modified CDS sequence (wt) from neuraminidase__InfluenzaB__AHM01243

SEQ ID NO: 62295 - RNA, 1401 nt, Artificial Sequence
  derived and/or modified CDS sequence (wt) from neuraminidase__InfluenzaB__AHM01254
augcuaccuucaacuauacaaacguuaacccuauuucucacaucagggggaguauuauuaucacuauaugugucagcuucauuaucauacuuacuauauucggauauauugcuaaaauucucaccaacagaaauaacugcaccaacaaugccauuggauugugcaaacgcaucaaauguucaggcugugaaccguucugcaacaaaaggggugacacuucuucucccagaaccggaguggacauacccgcguuuaucuugcccgggcucaaccuuucagaaagcacuccuaauuagcccucauagauucggagaaaccaaaggaaacucagcucccuuaauaauaagggaaccuuuuauugcuuguggaccaaaugaaugcaaacacuuugcucuaacccauuaugcagcccaaccagggggauacuacaauggaacaagaggagacagaaacaagcugaggcaucuaauuucagucaaauugggcaaaaucccaacaguagagaacuccauuuuccacauggcagcauggagcggguccgcgugccaugaugguaaggaauggacauauaucggaguugauggcccugacaauaaugcauugcucaaaguaaaauauggagaagcauauacugacacauaccauuccuaugcaaacaaaauccuaagaacacaagaaagugccugcaauugcaucgggggaaauuguuaucuaaugauaacugauggcucagcuucagguguuagugaaugcagauuucuuaagauucgagagggccgaauaauaaaagaaauauuuccaacaggaagaguaaaacacacugaggaaugcacaugcggauuugccagcaauaaaaccauagaaugugccuguagagacaacagguacacagcaaaaagaccuuuugucaaauuaaacguggagacugauacagcagaaauaagauugaugugcacagauacuuauuuggacacccccagaccaaaugauggaagcauaacaggcccuugugaaucugauggggacaaagggaguggaggcaucaagggaggauuuguucaucaaagaaugaaauccaagauuggaaggugguacucucgaacgaugucuaaaacugaaaggauggggaugggacuguaugucaaguaugauggagacccaugggcugacagugaugcccuaguuuuuaguggaguaaugguuucaaugaaagaaccugguugguauuccuuuggcuucgaaauaaaagauaagaaaugcgauguccccuguauugggauagagaugguacaugaugguggaaaagagacuuggcacucagcagcaacagccauuuacuguuuaaugggcucaggacagcugcugugggacacugucacagguguugacauggcucuguaa

SEQ ID NO: 62296 - RNA, 1401 nt, Artificial Sequence
  derived and/or modified CDS sequence (wt) from neuraminidase__InfluenzaB__AHM01265
augcuaccuucaacuauacaaacguuaacccuauuucucacaucagggggaguauuauuaucacuauaugugucagcuucauuaucauacuuacuauauucggauauauugcuaaaauucucaccaacagaaauaacugcaccaacaaugccauuggauugugcaaacgcaucaaauguucaggcugugaaccguucugcaacaaaaggggugacacuucuucucccagaaccggaguggacauacccgcguuuaucuugcccgggcucaaccuuucagaaagcacuccuaauuagcccucauagauucggagaaaccaaaggaaacucagcucccuugauaauaagggaaccuuuuauugcuuguggaccaaaugaaugcaaacacuuugcucuaacccauuaugcagcccaaccagggggauacuacaauggaacaagaggagacagaaacaagcugaggcaucuaauuucagucaaauugggcaaaaucccaacaguagaaaacuccauuuuccacauggcagcauggagcggguccgcgugccaugaugguaaggaauggacauauaucggaguugauggcccugacaauaaugcauugcucaaaguaaaauauggagaggcauauacugacacauaccauuccuaugcaaacaaaauccuaagaacacaagaaagugccugcaauugcaucgggggaaauuguuaucuaaugauaacugauggcucagcuucagguguuagugaaugcagauuucuuaagauucgagagggccgaauaauaaaagaaauauuuccaacaggaagaguaaaacacacugaggaaugcacaugcggauuugccagcaauaaaaccauagaaugugccuguagagacaacagguacacagcaaaaagaccuuuugucaaauuaaacguggagacugauacagcagaaauaagauugaugugcacagauacuuauuuggacacccccagaccaaaugauggaagcauaacaggcccuugugaaucugauggggacgaagggaguggaggcaucaagggaggauuuguucaucaaagaaugaaauccaagauuggaaggugguacucucgaacgaugucuaaaacugaaaggauggggaugggacuguaugucaaguaugauggagacccaugggcugacagugaugcccuagcuuuuaguggaguaaugguuucaaugaaagaaccugguugguacuccuuuggcuucgaaauaaaagauaagaaaugcgauguccccuguauugggauagagaugguacaugaugguggaaaagagacuuggcacucagcagcaacagccauuuacuguuuaaugggcucaggacggcugcugugggacacugucacagguguugacauggcucuguga

SEQ ID NO: 62297 - RNA, 1401 nt, Artificial Sequence
  derived and/or modified CDS sequence (wt) from neuraminidase__InfluenzaB__AHM01276
augcuaccuucaacuauacaaacguuaacccuauuucucacaucagggggaguguuauuaucacuauaugugucagcuucauugucauacuuacuauauucggauauauugcuaaaauuuucacagacagaaauaacugcaccaauaaugccauuggauuguacaaacgcaucaaauguucaggcugugaaucguucugcagcaaaaggggugacacuucuucucccagaaccggaguggacauacccucguuuaucuugcccgggcucaaccuuucagaaagcacuccuaauuagcccccauagauucggagaaaucaaaggaaacucagcucccuugauaauaagggaaccuuuuauugcuuguggaccaacggaaugcaaacacuuugcucuaacccauuaugcagcucaaccagggggauacuacaauggaacaagagaagacagaaacaagcugaggcaucuaaucucagucaaauugggcaaaaucccaacaguagaaaacuccauuuuccacauggcagcuuggagcggguccgcaugccaugaugguaaagaauggacauauaucggaguugauggccccgacaguaaugcauugcucaaaauaaaauauggagaagcauauacugacacguaccauuccuaugcaaaaaacauccuaaggacacaagaaagugccugcaauugcaucgggggagauuguuaucuuaugauaacugauggcccagcuucagggguuagugaaugcagauuccuuaagauucgagaaggcagaauaauaaaagaaauauuuccaacaggaagaguaaaacauacugaggaaugcacaugcggauuugccagcaacaaaaccauagaaugugcuuguagagauaaccguuacacagcaaaaagacccuuugucaaauuaaauguggagacugauacagcggaaauaagauugaugugcacagagacuuauuuggacacccccagaccaaaugauggaagcauaacagggccuugcgaaucugauggggacaaagggaguggaggcaucaagggaggauuuguucaucaaagaauggcauccaagauuggaaggugguacucucgaacgaugucuaaaaccaaaagaauggggaugggacuguauguaaaguaugauggagacccauggacugacagugaagcccuugcucuuaguggaguaaugguuucaauggaagaaccugguugguauuccuuuggcuucgaaauaaaagauaagaaaugugauguccccuguauugggauagaaaugguacaugauggugggaaaacgacuuggcacucagcagcaacagccauuuauuguuuaaugggcucaggacaauugcugugggacacugucacagguguugauauggcuuuguaa

SEQ ID NO: 62298 - RNA, 1401 nt, Artificial Sequence
  derived and/or modified CDS sequence (wt) from neuraminidase__InfluenzaB__AHM01287
augcuaccuucaacuauacaaacguuaacccuauuucucacaucagggggaguauuauuaucacuauaugugucagcuucauuaucauacuuacuauauucggauauauugcuaaaauucucaccaacagaaauaacugcaccaacaaugccauuggauugugcaaacgcaucaaauguucaggcugugaaccguucugcagcaaaaggggugacacuucuucucccagaaccggaguggacauacccgcguuuaucuugcccgggcucaaccuuucagaaagcacuccuaauuagcccucauagauucggagaaaccaaaggaaacucagcucccuugauaauaagggaaccuuuuauugcuuguggaccaaaugaaugcaaacacuuugcucuaacccauuaugcagcccaaccagggggauacuacaauggaacaagaggagacagaaacaagcugaggcaucuaauuucagucaaauugggcaaaaucccaacaguagaaaacuccauuuuccacauggcagcauggagcggguccgcgugccaugaugguaaggaauggacauauaucggaguugauggcccugacaauaaugcauugcucaaaguaaaauauggagaagcauauacugacacauaccauuccuaugcaaacaaaauccuaagaacacaagaaagugccugcaauugcaucgggggaaauuguuaucuaaugauaacugauggcucagcuucagguguuagugaaugcagauuucuuaagauucgagagggccgaauaauaaaagaaauauuuccaacaggaagaguaaaacacacugaggaaugcacaugcggauuugccagcaauaaaaccauagaaugugccuguagagacaacagguacacagcaaaaagaccuuuugucaaauuaaacguggagacugauacagcagaaauaagauugaugugcacagauacuuauuuggacacccccagaccaaaugauggaagcauaacaggcccuugugagucugauggggacaaagggaguggaggcaucaagggaggauuuguucaucaaagaaugaaauccaagauuggaaggugguacucucgaacgaugucuaaaacugaaaggauggggaugggacuguaugucaaguaugauggagacccaugggcugacagugaugcccuagcuuuuaguggaguaaugguuucaaugaaagaaccugguugguacuccuuuggcuucgaaauaaaagauaagaaaugcgauguccccuguauugggauagagaugguacaugaugguggaaaagagacuuggcacucagcagcaacagccauuuacuguuuaaugggcucaggacagcugcugugggacacugucacagguguugacauggcucuguaa

SEQ ID NO: 62299 - RNA, 1401 nt, Artificial Sequence; identical to SEQ ID NO: 62282
  derived and/or modified CDS sequence (wt) from neuraminidase__InfluenzaB__AHM01298

SEQ ID NO: 62300 - RNA, 1401 nt, Artificial Sequence
  derived and/or modified CDS sequence (wt) from neuraminidase__InfluenzaB__AHM01309
augcuaccuucaacuauacaaacguuaacccuauuucucacaucagggggaguguuauuaucacuauaugugucagcuucauugucauacuuacuauauucggauauauugcuaaaauuuucacagacagaaauaacugcaccaauaaugccauuggauuguacaaacgcaucaaauguucaggcugugaaucguucugcagcaaaaggggugacacuucuucucccagaaccggaguggacauacccucguuuaucuugcccgggcucaaccuuucagaaagcacuccuaauuagcccccauagauucggagaaaucaaaggaaacucagcucccuugauaauaagggaaccuuuuauugcuuguggaccaacggaaugcaaacacuuugcucuaacccauuaugcagcucaaccagggggauacuacaauggaacaagagaagacagaaacaagcugaggcaucuaauuucagucaaauugggcaaaaucccaacaguagaaaacuccauuuuccacauggcagcuuggagcggguccgcaugccaugaugguaaagaauggacauauaucggaguugauggccccgacaguaaugcauugcucaaaauaaaauacggagaagcauauacugacacguaccauuccuaugcaaaaaacauccuaaggacacaagaaagugccugcaauugcaucgggggagauuguuaucuuaugauaacugauggcccagcuucagggguuagugaaugcagauuccuuaagauucgagaaggcagaauaauaaaagaaauauuuccaacaggaagaguaaaacauacugaggaaugcacaugcggauuugccagcaacaaaaccauagaaugugcuuguagagauaaccguuacacagcaaaaagacccuuugucaaauuaaauguggagacugauacagcggaaauaagauugaugugcacagagacuuauuuggacacccccagaccaaaugauggaagcauaacagggccuugcgaaucugauggggacaaagggaguggaggcaucaagggaggauuuguucaucaaagaauggcauccaagauuggaaggugguacucucgaacgaugucuaaaaccaaaagaauggggaugggacuguauguaaaguaugauggagacccauggacugacagugaagcccuugcucuuaguggaguaaugguuucaauggaagaaccugguugguauuccuuuggcuucgaaauaaaagauaagaaaugugauguccccuguauugggauagaaaugguacaugauggugggaaaacgacuuggcacucagcagcaacagccauuuauuguuuaaugggcucaggacaauugcugugggacacugucacagguguugauauggcucuguaa

SEQ ID NO: 62301 - RNA, 1401 nt, Artificial Sequence
  derived and/or modified CDS sequence (wt) from neuraminidase__InfluenzaB__AHM01320
augcuaccuucaacuauacaaacguuaacccuauuucucacaucagggggaguauuauuaucacuauaugugucagcuucauuaucauacuuacuauauucggauauauugcuaaaauucucaccaacagaaauaacugcaccaacaaugccauuggauugugcaaacgcaucaaauguucaggcugugaaccguucugcaacaaaaggggugacacuucuucucccagaaccggaguggacauacccgcguuuaucuugcccgggcucaaccuuucagaaagcacuccuaauuagcccucauagauucggagaaaccaaaggaaacucagcucccuuaauaauaagggaaccuuuuauugcuuguggaccaaaugaaugcaaacacuuugcucuaacccauuaugcagcccaaccagggggauacuacaauggaacaagaggagacagaaacaagcugaggcaucuaauuucagucaaauugggcaaaaucccaacaguagagaacuccauuuuccacauggcagcauggagcggguccgcgugccaugaugguaaggaauggacauauaucggaguugauggcccugacaauaaugcauugcucaaaguaaaauauggagaagcauauacugacacauaucauuccuaugcaaacaaaauccuaagaacacaagaaagugccugcaauugcaucgggggaaauuguuaucuaaugauaacugauggcucagcuucagguguuagugaaugcagauuucuuaagauucgagagggccgaauaauaaaagaaauauuuccaacaggaagaguaaaacacacugaggaaugcacaugcggauuugccagcaauaaaaccauagaaugugccuguagagacaacagguacacagcaaaaagaccuuuugucaaauuaaacguggagacugauacagcagaaauaagauugaugugcacagauacuuauuuggacacccccagaccaaaugauggaagcauaacaggcccuugugaaucugauggggacaaagggaguggaggcaucaagggaggauuuguucaucaaagaaugaaauccaagauuggaaggugguacucucgaacgaugucuaaaacugaaaggauggggaugggacuguaugucaaguaugauggagacccaugggcugacagugaugcccuagcuuuuaguggaguaaugguuucaaugaaagaaccugguugguauuccuuuggcuucgaaauaaaagauaagaaaugcgauguccccuguauugggauagagaugguacaugaugguggaaaagagacuuggcacucagcagcaacagccauuuacuguuuaaugggcucaggacagcugcugugggacacugucacagguguugacauggcucuguaa

SEQ ID NO: 62302 - RNA, 1401 nt, Artificial Sequence; identical to SEQ ID NO: 62282
  derived and/or modified CDS sequence (wt) from neuraminidase__InfluenzaB__AHM01331

SEQ ID NO: 62303 - RNA, 1401 nt, Artificial Sequence; identical to SEQ ID NO: 62301
  derived and/or modified CDS sequence (wt) from neuraminidase__InfluenzaB__AHM01342

SEQ ID NO: 62304 - RNA, 1401 nt, Artificial Sequence
  derived and/or modified CDS sequence (wt) from neuraminidase__InfluenzaB__AHM01353
augcuaccuucaacuauacaaacguuaacccuauuucucacaucagggggaguauuauuaucacuauaugugucagcuucauuaucauacuuacuauauucggauauauugcuaaaauucucaccaacagaaauaacugcaccaacaaugccauuggauugugcaaacgcaucaaauguucaggcugugaaccguucugcaacaaaaggggugacacuucuucucccagaaccgggguggacauacccgcguuuaucuugcccgggcucaaccuuucagaaagcacuccuaauuagcccucauagauucggagaaaccaaaggaaacucagcucccuuaauaauaagggaaccuuuuauugcuuguggaccaaaugaaugcaaacacuuugcucuaacccauuaugcagcccaaccagggggauacuacaauggaacaagaggagacagaaacaagcugaggcaucuaauuucagucaaauugggcaaaaucccaacaguagagaacuccauuuuccacauggcagcauggagcggguccgcgugccaugaugguaaggaauggacauauaucggaguugauggcccugacaauaaugcauugcucaaaguaaaauauggagaagcauauacugacacauaccauuccuaugcaaacaaaauccuaagaacacaagaaagugccugcaauugcaucgggggaaauuguuaucuaaugauaacugauggcucagcuucagguguuagugaaugcagauuucuuaagauucgagagggccgaauaauaaaagaaauauuuccaacaggaagaguaaaacacacugaggaaugcacaugcggauuugccagcaauaaaaccauagaaugugccuguagagacaacagguacacagcaaaaagaccuuuugucaaauuaaacguggagacugauacagcagaaauaagauugaugugcacagauacuuauuuggacacccccagaccaaaugauggaagcauaacaggcccuugugaaucugauggggacaaagggaguggaggcaucaagggaggauuuguucaucaaagaaugaaauccaagauuggaaggugguacucucgaacgaugucuaaaaccgaaaggauggggaugggacuguaugucaaguaugauggagacccaugggcugacagugaugcccuagcuuuuaguggaguaaugguuucaaugaaagaaccugguugguauuccuuuggcuucgaaauaaaagauaagaaaugcgauguccccuguauugggauagagaugguacaugaugguggaaaagagacuuggcacucagcagcaacagccauuuacuguuuaaugggcucaggacagcugcugugggacacugucacagguguugacauggcucuguaa

SEQ ID NO: 62305 - RNA, 1401 nt, Artificial Sequence
  derived and/or modified CDS sequence (wt) from neuraminidase__InfluenzaB__AHM01364
augcuaccuucaacuauacaaacguuaacccuauuucucacaucagggggaguauuauuaucacuauaugugucagcuucauuaucauacuuacuauauucggauauauugcuaaaauucucaccaacagaaauaacugcaccaacaaugccauuggauugugcaaacgcaucaaauguucaggcugugaaccguucugcaacaaaaggggugacacuucuucucccagaaccggaguggacauacccgcguuuaucuugcccgggcucaaccuuucagaaagcacuccuaauuagcccucauagauucggagaaaccaaaggaaacucagcucccuugauaauaagggaaccuuuuauugcuuguggaccaaaugaaugcaaacacuuugcucuaacccauuaugcagcccaaccagggggauacuacaauggaacaagaggagacagaaacaagcugaggcaucuaauuucagucaaauugggcaaaaucccaacaguagaaaacuccauuuuccacauggcagcauggagcggguccgcgugccaugaugguaaggaauggacauauaucggaguugauggcccugacaauaaugcauugcucaaaguaaaauauggagaagcauauacugacacauaccauuccuaugcaaacaaaauccuaagaacacaagaaagugccugcaauugcaucgggggaaauuguuaucuaaugauaacugauggcucagcuucagguguuagugaaugcagauuucuuaagauucgagagggccgaauaauaaaagaaauauuuccaacaggaagaguaaaacacacugaggaaugcacaugcggauuugccagcaauaaaaccauagaaugugccuguagagacaacagguacacagcaaaaagaccuuuugucaaauuaaauguggagacugauacagcagaaauaagauugaugugcacagauacuuauuuggacacccccagaccaaaugauggaagcauaacaggcccuugugaaucugauggggacgaagggaguggaggcaucaagggaggauuuguucaucaaagaaugaaauccaagauuggaaggugguacucucgaacgaugucuaaaacugaaaggauggggaugggacuguaugucaaguaugauggagacccaugggccgacagugaugcccuagcuuuuaguggaguaaugguuucaaugaaagaaccugguugguacuccuuuggcuucgaaauaaaagauaagaaaugcgauguccccuguauugggauagagaugguacaugaugguggaaaagagacuuggcacucagcagcaacagccauuuacuguuuaaugggcucaggacagcugcugugggacacugucacagguguugacauggcucuguaa

SEQ ID NO: 62306 - RNA, 1401 nt, Artificial Sequence
  derived and/or modified CDS sequence (wt) from neuraminidase__InfluenzaB__AHM01375
augcuaccuucaacuauacaaacguuaacccuauuucucacaucagggggaguguuauuaucacuguaugugucagcuucauugucauacuuacuauauucggauauauugcuaaaauuuucacagacagaaauaacugcaccaauaaugccauuggauuguacaaacgcaucaaauguucaggcugugaaucguucugcagcaaaaggggugacacuucuucucccagaaccggaguggacauacccucguuuaucuugcccgggcucaaccuuucagaaagcacuccuaauuagcccccauagauucggagaaaucaaaggaaacucagcucccuugauaauaagggaaccuuuuauugcuuguggaccaacggaaugcaaacacuuugcucuaacccauuaugcagcucaaccagggggauacuacaauggaacaagagaagacagaaacaagcugaggcaucuaauuucagucaaauugggcaaaaucccaacaguagaaaacuccauuuuccacauggcagcuuggagcggguccgcaugccaugaugguaaagaauggacauauaucggaguugauggccccgacaguaaugcauugcucaaaauaaaauauggagaagcauauacugacacauaccauuccuaugcaaaaaacauccuaaggacacaagaaagugccugcaauugcaucgggggagauuguuaucuuaugauaacugauggcccagcuucagggguuagugaaugcagauuccuuaagauucgagaaggcagaauaauaaaagaaauauuuccaacaggaagaguaaaacauacugaggaaugcacaugcggauuugccagcaacaaaaccauagaaugugcuuguagagauaaccguuacacagcaaaaagacccuuugucaaauuaaauguggagacugauacagcggaaauaagauugaugugcacagagacuuauuuggacacccccagaccaaaugauggaagcauaacagggccuugcgaaucugauggggacaaagggaguggaggcaucaagggaggauuuguucaucaaagaauggcauccaagauuggaaggugguacucucgaacuaugucuaaaaccaaaagaauggggaugggacuguauguaaaguaugauggagacccauggacugacagugaagcccuugcucuuaguggaguaaugguuucaauggaagaaccugguugguauuccuuuggcuucgaaauaaaagauaagaaaugugauguccccuguauugggauagaaaugguacaugauggugggaaaacgacuuggcacucagcagcaacagccauuuauuguuuaaugggcucaggacaauugcugugggacacugucacagguguugauauggcucuguaa

SEQ ID NO: 62307 - RNA, 1401 nt, Artificial Sequence; identical to SEQ ID NO: 62300
  derived and/or modified CDS sequence (wt) from neuraminidase__InfluenzaB__AHM01386

SEQ ID NO: 62308 - RNA, 1401 nt, Artificial Sequence; identical to SEQ ID NO: 62238
  derived and/or modified CDS sequence (wt) from neuraminidase__InfluenzaB__AHM01397

SEQ ID NO: 62309 - RNA, 1401 nt, Artificial Sequence; identical to SEQ ID NO: 62274
  derived and/or modified CDS sequence (wt) from neuraminidase__InfluenzaB__AHM01408

SEQ ID NO: 62310 - RNA, 1401 nt, Artificial Sequence
  derived and/or modified CDS sequence (wt) from neuraminidase__InfluenzaB__AHM01419
augcuaccuucaacuauacaaacguuaacccuauuucucacaucagggggaguauuauuaucacuauaugugucagcuucauuaucauacuuacuauauucggauauauugcuaaaauucucaccaacagaaauaacugcaccaacaaugccauuggauugugcaaacgcaucaaauguucaggcugugaaccguucugcaacaaaaggggugacacuucuucucccagaaccggaguggacauacccgcguuuaucuugcccgggcucaaccuuucagaaagcacuccuaauuagcccucauagauucggagaaaccaaaggaaacucagcucccuuaauaauaagggaaccuuuuauugcuuguggaccaaaugaaugcaaacacuuugcucuaacccauuaugcagcccaaccagggggauacuacaauggaacaagaggagacagaaacaagcuaaggcaucuaauuucagucaaauugggcaaaaucccaacaguagagaacuccauuuuccacauggcagcauggagcggguccgcgugccaugaugguaaggaauggacauauaucggaguugauggcccugacaauaaugcauugcucaaaguaaaauauggagaagcauauacugacacauaccauuccuaugcaaacaaaauccuaagaacacaagaaagugccugcaauugcaucgggggaaauuguuaucuaaugauaacugauggcucagcuucagguguuagugaaugcagauuucuuaagauucgagagggccgaauaauaaaagaaauauuuccaacaggaagaguaaaacacacugaggaaugcacaugcggauuugccagcaauaaaaccauagaaugugccuguagagacaacagguacacagcaaaaagaccuuuugucaaauuaaacguggagacugauacagcagaaauaagauugaugugcacagauacuuauuuggacacccccagaccaaaugauggaagcauaacaggcccuugugaaucugauggggacaaagggaguggaggcaucaagggaggauuuguucaucaaagaaugaaauccaagauuggaaggugguacucucgaacgaugucuaaaacugaaaggauggggaugggacuguaugucaaguaugauggagacccaugggcugacagugaugcccuagcuuuuaguggaguaaugguuucaaugaaagaaccugguugguauuccuuuggcuucgaaauaaaagauaagaaaugcgauguccccuguauugggauagagaugguacaugaugguggaaaagagacuuggcacucagcagcaacagccauuuacuguuuaaugggcucaggacagcugcugugggacacugucacagguguugacauggcucuguaa

SEQ ID NO: 62311 - RNA, 1401 nt, Artificial Sequence
  derived and/or modified CDS sequence (wt) from neuraminidase__InfluenzaB__AHM01430
augcuaccuucaacuauacaaacguuaacccuauuucucacaucagggggaguauuauuaucacuauaugugucagcuucauuaucauacuuacuauauucggauauauugcuaaaauucucaccaacagaaauaacugcaccaacaaugccauuggauugugcaaacgcaucaaauguucaggcugugaaccguucugcaacaaaaggggugacacuucuucucccagaaccggaguggacauacccgcguuuaucuugcccgggcucaaccuuucagaaagcacuccuaauuagcccucauagauucggagaaaccaaaggaaacucagcucccuugauaauaagggaaccuuuuauugcuuguggaccaaaugaaugcaaacacuuugcucuaacccauuaugcagcccaaccagggggauacuacaauggaacaagaggagacagaaacaagcugaggcaucuaauuucagucaaauugggcaaaaucccaacaguagaaaacuccauuuuccacauggcagcauggagcggguccgcgugccaugaugguaaggaauggacauauaucggaguugauggcccugacaauaaugcauugcucaaaguaaaauauggagaggcauauacugacacauaccauuccuaugcaaacaaaauccuaagaacacaagaaagugccugcaauugcaucgggggaaauuguuaucuaaugauaacugauggcucagcuucagguguuagugaaugcagauuucuuaagauucgagagggccgaauaauaaaagaaauauuuccaacaggaagaguaaaacacacugaggaaugcacaugcggauuugccagcaauaaaaccauagaaugugccuguagagacaacagguacacagcaaaaagaccuuuugucaaauuaaacguggagacugauacagcagaaauaagauugaugugcacagauacuuauuuggacacccccagaccaaaugauggaagcauaacaggcccuugugaaucugauggggacgaagggaguggaggcaucaagggaggauuuguucaucaaagaaugaaauccaagauuggaaggugguacucucgaacgaugucuaaaacugaaaggauggggaugggacuguaugucaaguaugauggagacccaugggcugacagugaugcccuagcuuuuaguggaguaaugguuucaaugaaagaaccugguugguacuccuuuggcuucgaaauaaaagauaagaaaugcgauguccccuguauugggauagagaugguacaugaugguggaaaagagacuuggcacucagcagcaacagccauuuacuguuuaaugggcucaggacggcugcugugggacacugccacagguguugacauggcucuguga

SEQ ID NO: 62312 - RNA, 1401 nt, Artificial Sequence
  derived and/or modified CDS sequence (wt) from neuraminidase__InfluenzaB__AHM01441
augcuaccuucaacuauacaaacguuaacccuauuucucacaucagggggaguguuauuaucacuauaugugucagcuucauugucauacuuacuauauucggauauauugcuaaaauuuucacagacagaaauaacugcaccaacaaugccauuggauugugcaaacgcaucaaauguucaggcugugaaucguucugcagcaaaaggggugacacuucuucucccagaaccggaguggacauacccucguuuaucuugcccgggcucaaccuuucagaaagcacuccuaauuagcccccauagauucggagaaaucaaaggaaacucagcucccuugauaauaagagaaccuuuuauugcuuguggaccaacggaaugcaaacacuuugcucuaacccauuaugcagcucaaccagggggauacuacaauggaacaagagaagacagaaacaagcugaggcaucuaauuucagucaaauugggcaaaaucccaacaguagaaaacuccauuuuccacauggcagcuuggagcggguccgcaugccaugaugguaaagaauggacauauaucggaguugauggccccgacaguaaugcauugcucaaaauaaaauauggagaagcauauacugacacguaccauuccuaugcaaaaaacauccuaaggacacaagaaagugccugcaauugcaucgggggagauuguuaucuuaugauaacugauggcccagcuucagggguuagugaaugcagauuccuuaagauucgagagggcagaauaauaaaagaaauauuuccaacaggaagaguaaaacauacugaggaaugcacaugcggauuugccagcaacaaaaccauagaaugugcuuguagagauaaccguuacacagcaaaaagacccuuugucaaauuaaauguggagacugauacagcggaaauaagauugaugugcacagagacuuauuuggacacccccagaccaaaugauggaagcauaacagggccuugcgaaucugauggggacaaagggaguggaggcaucaagggaggauuuguucaucaaagaauggcauccaagauuggaaggugguacucucggacgaugucuaaaaccaaaagaauggggaugggacuguauguaaaguaugauggagacccauggacugacagugaagcccuugcucuuaguggaguaaugguuucaauggaagaaccugguugguauuccuuuggcuucgaaauaaaagauaagaaaugugauguccccuguauugggauagaaaugguacaugauggugggaaaacgacuuggcacucagcagcaacagccauuuauuguuuaaugggcucaggacaauugcugugggacacugucacagguguugauauggcucuguaa

SEQ ID NO: 62313 - RNA, 1401 nt, Artificial Sequence
  derived and/or modified CDS sequence (wt) from neuraminidase__InfluenzaB__AHM01463
augcuaccuucaacuauacaaacguuaacccuauuucucacaucagggggaguauuauuaucacuauaugugucagcuucauuaucauacuuacuauauucggauauauugcuaaaauucucaccaacagaaauaacugcaccaacaaugccauuggauugugcaaacgcaucaaauguucaggcugugaaccguucugcaacaaaaggggugacacuucuucucccagaaccggaguggacauacccgcguuuaucuugcccgggcucaaccuuucagaaagcacuccuaauuagcccucauagauucggagaaaccaaaggaaacucagcucccuugauaauaagggaaccuuuuauugcuuguggcccaaaugaaugcaaacacuuugcucuaacccauuaugcagcccaaccagggggauacuacaauggaacaagaggagacagaaacaagcugaggcaucuaauuucagucaaauugggcaaaaucccaacaguagaaaacuccauuuuccacauggcagcauggagcggguccgcgugccaugaugguaaggaauggacauauaucggaguugauggcccugacaauaaugcauugcucaaaguaaaauauggagaagcauauacugacacauaccauuccuaugcaaacaaaauccuaagaacacaagaaagugccugcaauugcaucgggggaaauuguuaucuaaugauaacugaugguucagcuucagguguuagugaaugcagauuucuuaagauucgagagggccgaauaauaaaagaaauauuuccaacaggaagaguaaaacacacugaggaaugcacaugcggauuugccagcaauaaaaccauagaaugugccuguagagacaacagguacacagcaaaaagacccuuugucaaauuaaacguggagacugauacagcagaaauaagauugaugugcacagauacuuauuuggacacccccagaccaaaugauggaagcauaacaggcccuugugaaucugauggggacaaagggaguggaggcaucaagggaggauuuguucaucaaagaaugaaauccaagauuggaaggugguacucucgaacgaugucuaaaacugaaaggauggggaugggacuguaugucaaguaugauggagacccaugggcugacagugaugcccuagcuuuuaguggaguaaugguuucaaugaaagaaccugguugguauuccuuuggcuucgaaauaaaagauaagaaaugcgauguccccuguauugggauagagaugguacaugaugguggaaaagagacuuggcacucagcagcaacagccauuuacuguuuaaugggcucaggacaguugcugugggacacugucacagguguugacauggcucuguaa

SEQ ID NO: 62314 - RNA, 1401 nt, Artificial Sequence
  derived and/or modified CDS sequence (wt) from neuraminidase__InfluenzaB__AHM01474
augcuaccuucaacuauacaaacguuaacccuauuucucacaucagggggaguguuauuaucacuguaugugucagcuucauugucauacuuacuauauucggauauauugcuaaaauuuucacagacagaaauaacugcaccaauaaugccauuggauuguauaaacgcaucaaauguucaggcugugaaucguucugcagcaaaaggggugacacuucuucucccagaaccggaguggacauacccucguuuaucuugcccgggcucaaccuuucagaaagcacuccuaauuagcccccauagauucggagaaaucaaaggaaacucagcucccuugauaauaagggaaccuuuuauugcuuguggaccaacggaaugcaaacacuuugcucuaacccauuaugcagcucaaccagggggauacuacaauggaacaagagaagacagaaacaagcugaggcaucuaauuucagucaaauugggcaaaaucccaacaguagaaaacuccauuuuccacauggcagcuuggagcggguccgcaugccaugaugguaaagaauggacauauaucggaguugauggccccgacaguaaugcauugcucaaaauaaaauauggagaagcauauacugacacauaccauuccuaugcaaaaaacauccuaaggacacaagaaagugccugcaauugcaucgggggagauuguuaucuuaugauaacugauggcccagcuucagggguuagugaaugcagauuccuuaagauucgagaaggcagaauaauaaaagaaauauuuccaacaggaagaguaaaacauacugaggaaugcacaugcggauuugccagcaacaaaaccauagaaugugcuuguagagauaaccguuacacagcaaaaagacccuuugucaaauuaaauguggagacugauacagcggaaauaagauugaugugcacagagacuuauuuggacacccccagaccaaaugauggaagcauaacagggccuugcgaaucugauggggacaaagggaguggaggcaucaagggaggauuuguucaucaaagaauggcauccaagauuggaaggugguacucucgaacgaugucuaaaaccaaaagaauggggaugggacuguauguaaaguaugauggagacccauggacugacagugaagcccuugcucuuaguggaguaaugguuucaauggaagaaccugguugguauuccuuuggcuucgaaauaaaagauaagaaaugugauguccccuguauugggauagaaaugguacaugauggugggaaaacgacuuggcacucagcagcaacagccauuuauuguuuaaugggcucaggacaauugcugugggacacugucacagguguugauauggcucuguaa

SEQ ID NO: 62315 - RNA, 1401 nt, Artificial Sequence
  derived and/or modified CDS sequence (wt) from neuraminidase__InfluenzaB__AHM01485
augcuaccuucaacuauacaaacguuaacccuauuucucacaucagggggaguguuauuaucacuauaugugucagcuucauugucauacuuacuauauucggauauauugcuaaaauuuucaccgacagaaauaacugcaccaauaaugccauuggauuguacaaacgcaucaaauguucaggcugugaaucguucugcagcaaaaggggugacacuucuucucccagaaccggaguggacauacccucguuuaucuugcccgggcucaaccuuucagaaagcacuccuaauuagcccccauagauucggagaaaucaaaggaaacucagcucccuugauaauaagggaaccuuuuauugcuuguggaccaacggaaugcaaacacuuugcucuaacccauuaugcagcucaaccagggggauacuacaauggaacaagagaagacagaaacaagcugaggcaucuaauuucagucaaauugggcaaaaucccaacaguggaaaacuccauuuuccacauggcagcuuggagcggguccgcaugccaugaugguaaagaauggacauauaucggaguugauggccccgacaguaaugcauugcucaaaauaaaauauggagaagcauauacugacacguaccauuccuaugcaaaaaacauccuaaggacacaagaaagugccuguaauugcaucgggggagauuguuaucuuaugauaacugauggcccagcuucagggguuagugaaugcagauuccuuaagauucgagaaggcagaauaauaaaagaaauauuuccaacaggaagaguaaaacauacugaggaaugcacaugcggauuugccagcaacaaaaccauagaaugugcuuguagagauaaccguuacacagcaaaaagacccuuugucaaauuaaauguggagacugauacagcggaaauaagauugaugugcacagagacuuauuuggacacccccagaccaaaugauggaagcauaacagggccuugcgaaucugauggggacaaagggaguggaggcaucaagggaggauuuguucaucaaagaauggcauccaaaauuggaaggugguacucucgaacgaugucuaaaaccaaaagaauggggaugggacuguauguaaaguaugauggagacccauggacugacagugaagcccuugcucuuaguggaguaaugguuucaauggaagaaccugguugguauuccuuuggcuucgaaauaaaagauaagaaaugugauguccccuguauugggauagaaaugguacaugauggugggaaaacgacuuggcacucagcagcaacagccauuuauuguuuaaugggcucaggacaauugcugugggacacugucacagguguugauauggcucuguaa

SEQ ID NO: 62316 - RNA, 1401 nt, Artificial Sequence
  derived and/or modified CDS sequence (wt) from neuraminidase__InfluenzaB__AHM01496
augcuaccuucaacuauacaaacguuaacccuauuucucacaucagggggaguguuauuaucacuguaugugucagcuucauugucauacuuacuauauucggauauauugcuaaaauuuucacagacagaaauaacugcaccaauaaugccauuggauuguacaaacgcaucaaauguucaggcugugaaucguucugcagcaaaaggggugacacuucuucucccagaaccggaguggacauacccucguuuaucuugcccgggcucaaccuuucagaaagcacuccuaauuagcccccauagauucggagaaaucaaaggaaacucagcucccuugauaauaagggaaccuuuuauugcuuguggaccaacggaaugcaaacacuuugcucuaacccauuaugcagcucaaccagggggauacuacaauggaacaagagaagacagaaacaagcugaggcaucuaauuucagucaaauugggcaaaaucccaacaguagaaaacuccauuuuccacauggcagcuuggagcggguccgcaugccaugaugguaaagaauggacauauaucggaguugauggccccgacaguaaugcauugcucaaaauaaaauauggagaagcauauacugacacauaccauuccuaugcaaaaaacauccuaaggacacaagaaagugccugcaauugcaucgggggagauuguuaucuuaugauaacugauggcccagcuucagggguuagugaaugcagauuccuuaagauucgagaaggcagaauaauaaaagaaauauuuccaacaggaagaguaaaacauacugaggaaugcacaugcggauuugccagcaacaaaaccauagaaugugcuuguagagauaaccguuacacagcaaaaagacccuuugucaaauuaaauguggagacugauacagcggaaauaagauugaugugcacagagacuuauuuggacacccccagaccaaaugauggaagcauaacagggccuugcgaaucugauggggacaaagggaguggaggcaucaagggaggauuuguucaucaaagaauggcauccaagauuggaaggugguacucucgaacgaugucuaaaaccaaaagaauggggaugggacuguauguaaaguaugauggagacccauggacugacagugaagcccuugcucuuaguggaguaaugguuucaauggaagaaccugguugguauuccuuuggcuucgaaauaaaagauaagaaaugugauguccccuguauugggauagaaaugguacaugauggugggaaaacgacuuggcacucagcagcaacagccauuuauuguuuaaugggcucaggacaauugcugugggacacugucacagguguugauauggcucuguaa

SEQ ID NO: 62317 - RNA, 1401 nt, Artificial Sequence
  derived and/or modified CDS sequence (wt) from neuraminidase__InfluenzaB__AHM01507
augcuaccuucaacuauacaaacguuaacccuauuucucacaucagggggaguguuauuaucacuauaugugucagcuucauugucauacuuacuauauucggauauauugcuaaaauuuucacagacagaaauaacugcaccaauaaugccauuggauugugcaaacgcaucaaauguucaggcugugaaucguucugcagcaaaaggggugacacuucuucucccagaaccggaguggacauacccucguuuaucuugcccgggcucaaccuuucagaaagcacuccuaauuagcccccauagauucggagaaaucaaaggaaacucagcucccuugauaguaagggaaccuuuuauugcuuguggaccaacggaaugcaaacacuuugcucuaacccauuaugcagcucaaccagggggauacuacaauggaacaagagaagacagaaacaagcugaggcaucuaauuucagucaaauugggcaaaaucccaacaguagaaaacuccauuuuccacauggcagcuuggagcggguccgcaugccaugaugguaaagaauggacauauaucggaguugauggccccgacaguaaugcauugcucaaaauaaaauauggagaagcauauacugacacguaccauuccuaugcaaaaaacauccuaaggacacaagaaagugccugcaauugcaucgggggagauuguuaucuuaugauaacugauggcccagcuucagggguuagugaaugcagauuccuuaagauucgagagggcagaauaauaaaagaaauauuuccaacaggaagaguaaaacauacugaggaaugcacaugcggauuugccagcaacaaaaccauagaaugugcuuguagagauaaccguuacacagcaaaaagacccuuugucaaauuaaauguggagacugauacagcggaaauaagguugaugugcacagagacuuauuuggacacccccagaccaaaugauggaagcauaacagggccuugcgaaucugauggggacaaagggaguggaggcaucaagggaggauuuguucaucaaagaauggcauccaagauuggaaggugguacucucgaacgaugucuaaaaccaaaagaauggggaugggacuguauguaaaguaugauggagacccauggacugacagugaagcccuugcucuuaguggaguaaugguuucaauagaagaaccugguugguauuccuuuggcuucgaaauaaaagauaagaaaugugauguccccuguauugggauagaaaugguacaugauggugggaaaacgacuuggcacucagcagcaacagccauuuauuguuuaaugggcucaggacaauugcugugggacacugucacagguguugauauggcucuguaa

SEQ ID NO: 62318 - RNA, 1401 nt, Artificial Sequence
  derived and/or modified CDS sequence (wt) from neuraminidase__InfluenzaB__AHM01518
augcuaccuucaacuauacaaacguuaacccuauuucucacaucagggggaguguuauuaucacuauaugugucagcuucauugucauacuuacuauauucggauauauugcuaaaauuuucacagacagaaauaacugcaccaauaaugccauuggauuguacaaacgcaucaaauguucaggcugugaaucguucugcagcaaaaggggugacacuucuucucccagaaccggaguggacauacccucguuuaucuugcccgggcucaaccuuucagaaagcacuccuaauuagcccccauagauucggagaaaucaaaggaaacucagcucccuugauaauaagggaaccuuuuauugcuuguggaccaacggaaugcaaacacuuugcucuaacccauuaugcagcucaaccagggggauacuacaauggaacaagagaagacagaaacaagcugagacaucuaauuucagucaaauugggcaaaaucccaacaguagaaaacuccauuuuccacauggcagcuuggagcggguccgcaugccaugaugguaaagaauggacauauaucggaguugauggccccgacaguaaugcauugcucaaaauaaaauacggagaagcauauacugacacguaccauuccuaugcaaaaaacauccuaaggacacaagaaagugccugcaauugcaucgggggagauuguuaucuuaugauaacugauggcccagcuucagggguuagugaaugcagauuccuuaagauucgagaaggcagaauaauaaaagaaauauuuccaacaggaagaguaaaacauacugaggaaugcacaugcggauuugccagcaacaaaaccauagaaugugcuuguagagauaaccguuacacagcaaaaagacccuuugucaaauuaaauguggagacugauacagcggaaauaagauugaugugcacagagacuuauuuggacacccccagaccaaaugauggaagcauaacagggccuugcgaaucugauggggacaaagggaguggaggcaucaagggaggauuuguucaucaaagaauggcauccaagauuggaaggugguacucucgaacgaugucuaaaaccaaaagaauggggaugggacuguauguaaaguaugauggagacccauggacugacagugaagcccuugcucuuaguggaguaaugguuucaauggaagaaccugguugguauuccuuuggcuucgaaauaaaagauaagaaaugugauguccccuguauugggauagaaaugguacaugauggugggaaaacgacuuggcacucagcagcaacagccauuuauuguuuaaugggcucaggacaauugcugugggacacugucacagguguugauauggcucuguaa

SEQ ID NO: 62319 - RNA, 1401 nt, Artificial Sequence
  derived and/or modified CDS sequence (wt) from neuraminidase__InfluenzaB__AHM01529
augcuaccuucaacuauacaaacguuaacccuauuucucacaucagggggaguguuauuaucacuauaugugucagcuucauugucauacuuacuauauucggauauauugcuaaaauuuucacagacagaaauaacugcaccaauaaugccauuggauuguacaaacgcaucaaauguucaggcugugaaucguucugcagcaaaaggggugacacuucuucucccagaaccggaguggacauacccucguuuaucuugcccgggcucaaccuuucagaaagcacuccuaauuagcccccauagauucggagaaaucaaaggaaacucagcucccuugauaauaagggaaccuuuuauugcuugcggaccaacggaaugcaaacacuuugcucuaacccauuaugcagcucaaccagggggauacuacaauggaacaagagaagacagaaacaagcugaggcaucuaauuucagucaaauugggcaaaaucccaacaguagaaaacuccauuuuccacauggcagcuuggagcggguccgcaugccaugaugguaaagaauggacauauaucggaguugauggccccgacaguaaugcauugcucaaaauaaaauauggagaagcauauacugacacguaccauuccuaugcaaaaaacauccuaaggacacaagaaagugccugcaauugcaucgggggagauuguuaucuuaugauaacugauggcccagcuucagggguuagugaaugcagauuccuuaagauucgagaaggcagaauaauaaaagaaauacuuccaacaggaagaguaaaacauacugaggaaugcacaugcggauuugccagcaacaaaaccauagaaugugcuuguagagauaaccguuacacagcaaaaagacccuuugucaaauuaaauguggagacugauacagcggaaauaagauugaugugcacagagacuuauuuggacacccccagaccaaaugauggaagcauaacagggccuugcgaaucugauggggacaaagggaguggaggcaucaagggaggauuuguucaucaaagaauggcauccaagauuggaaggugguacucucgaacgaugucuaaaaccaaaagaauggggaugggacuguauguaaaguaugauggagacccauggacugacagugaagcccuugcucuuaguggaguaaugguuucaauggaagaaccugguugguauuccuuuggcuucgaaauaaaagauaagaaaugugauguccccuguauugggauagaaaugguacaugauggugggaaaacgacuuggcacucagcagcaacagccauuuauuguuuaaugggcucaggacaauugcugugggacacugucacagguguugauauggcucuguaa

SEQ ID NO: 62320 - RNA, 1401 nt, Artificial Sequence; identical to SEQ ID NO: 62281
  derived and/or modified CDS sequence (wt) from neuraminidase__InfluenzaB__AHM01540

SEQ ID NO: 62321 - RNA, 1401 nt, Artificial Sequence
  derived and/or modified CDS sequence (wt) from neuraminidase__InfluenzaB__AHM01551
augcuaccuucaacuauacaaacguuaacccuauuucucacaucagggggaguguuauuaucacuauaugugucagcuucauugucauacuuacuauauucggauauauugcuaaaauuuucacagacagaaauaacugcaccaauaaugccauuggauuguacaaacgcaucaaauguucaggcugugaaucguucugcagcaaaaggggugacacuucuucucccagaaccggaguggacauacccucguuuaucuugcccgggcucaaccuuucagaaagcacuccuaauuagcccccauagauucggagaaaucaaaggaaacucagcucccuugauaauaagggaaccuuuuauugcuuguggaccaacggaaugcaaacacuuugcucuaacccauuaugcagcucaaccagggggauacuacaauggaacaagagaagacagaaacaagcugaggcaucuaauuucagucaaauugggcaaaaucccaacaguagaaaacuccauuuuccacauggcagcuuggagcggguccgcaugccaugaugguaaagaauggacauauaucggaguugauggccccgacagcaaugcauugcucaaaauaaaauauggagaagcauauacugacacguaccauuccuaugcaaaaaacauccuaaggacacaagaaagugccugcaauugcaucgggggagauuguuaucuuaugauaacugauggcccagcuucagggguuagugaaugcagauuccuuaagauucgagaaggcagaauaauaaaagaaauauuuccaacaggaagaguaaaacauacugaggaaugcacaugcggauuugccagcaacaaaaccauagaaugugcuuguagagauaaccguuacacagcaaaaagacccuuugucaaauuaaauguggagacugauacagcggaaauaagauugaugugcacagagacuuauuuggacacccccagaccaaaugauggaagcauaacagggccuugcgaaucugauggggacaaagggaguggaggcaucaagggaggauuuguucaucaaagaauggcauccaagauuggaaggugguacucucgaacgaugucuaaaaccaaaagaauggggaugggacuauauguaaaguaugauggagacccauggacugacagugaagcccuugcucuuaguggaguaaugguuucaauggaagaaccugguugguauuccuuuggcuucgaaauaaaagauaagaaaugugauguccccuguauugggauagaaaugguacaugauggugggaaaacgacuuggcacucagcagcaacagccauuuauuguuuaaugggcucaggacaauugcugugggacacugucacagguguugauauggcucuguaa

SEQ ID NO: 62322 - RNA, 1401 nt, Artificial Sequence; identical to SEQ ID NO: 62316
  derived and/or modified CDS sequence (wt) from neuraminidase__InfluenzaB__AHM01562

SEQ ID NO: 62323 - RNA, 1401 nt, Artificial Sequence; identical to SEQ ID NO: 60804
  derived and/or modified CDS sequence (wt) from neuraminidase__InfluenzaB__AHZ13597

SEQ ID NO: 62324 - RNA, 1404 nt, Artificial Sequence
  derived and/or modified CDS sequence (wt) from neuraminidase__InfluenzaB__AHZ36701
augcuaccuucaacuauacaaauguuaacccuauuucucacaucagggggaguacuauuaucacuauaugugucagcuucauuaucauacuuacuauauucggauauauugcuaaaauucucaccaacagaaauaacugcaccaacaaugccauuggauugugcaaacgcaucaaauguucaugcugugaaccguucugcaacaaaaggggugacauuucuucuucucccagaaccggaguggacauacccgcguuuaucuugcccgggcucaaccuuucagaaagcacuccuaauuagcccucauagauucggagaaaccaaaggaaacucagcucccuugauaauaagggaaccuuuuauugcuuguggaccaaaugaaugcaaacacuuugcucuaacccauuaugcagcccaaccagggggauacuacaauggaacaagaggagacagaaacaagcugaggcaucuaauuucagucaaauugggcaaaaucccaacaguagaaaacuccauuuuccacauggcagcauggagcggguccgcaugccaugaugguaaggaauggacauauaucggaguugaugguccugacaauaaugcauuacucaaaauaaaauauggagaagcauauacugacacauaucauuccuaugcaaacaacauccuaagaacacaagaaagugccugcaauugcaucgggggaaauuguuaucuuaugauaacugauggcucagcuucagguguuagugaaugcagauuucuuaagauccgaaagggccgaauaauaaaagaaauauuuccaacagggagaguaaaacauacugaggagugcacaugcggauuugccagcaauaaaaccauagaaugugccuguagagauaacaguuacacagcaaaaagacccuuugucaaauuaaacguggaaacugauacagcagaaauaagauugaugugcacagauacuuauuuggacacccccagaccagaugauggaagcauaacaggcccuugugaaucuaauggggacaaagggaguggaggcaucaagggaggauuuguucaccaaagaauggcauccaagauuggaaggugguacucucgaacgaugucuaaaacugaaaggauggggaugggacuguaugucaaguaugauggagacccauggacugacagugaugcccuugcuuuuaggggaguaaugguuucaaugaaagaaccugguugguacucuuuuggcuucgaaauaaaagauaagaaaugcgauguccccuguauugggauagagaugguacaugaugguggaaaagagacuuggcacucagcagcaacagccauuuacuguuuaaugggcucaggacagcugcugugggacacagucacaggugucgacauggcucuauaa

SEQ ID NO: 62325 - RNA, 1404 nt, Artificial Sequence
  derived and/or modified CDS sequence (wt) from neuraminidase__InfluenzaB__AHZ36756
augcuaccuucaacuauacaaauguuaacccuauuucucacaucagggggaguacuauuaucacuauaugugucagcuucauuaucauacuuacuauauucggauauauugcuaaaauucucaccaacagaaauaacugcaccaacaaugccauuggauugugcaaacgcaucaaauguucaugcugugaaccguucugcaacaaaaggggugacauuucuucuucucccagaaccggaguggacauacccgcguuuaucuugcccgggcucaaccuuucagaaagcacuccuaauuagcccucauagauucggagaaaccaaaggaaacucagcucccuugauaauaagggaaccuuuuauugcuuguggaccaaaugaaugcaaacacuuugcucuaacccauuaugcagcccaaccagggggauacuacaauggaacaagaggagacagaaacaagcugaggcaucuaauuucagucaaauugggcaaaaucccaacaguagaaaacuccauuuuccacauggcagcauggagcggguccgcaugccaugaugguaaggaauggacauauaucggaguugaugguccugacaauaaugcauuacucaaaauaaaauauggagaagcauauacugacacauaucauuccuaugcaaacaacauccuaagaacacaagaaagugccugcaauugcaucgggggaaauuguuaucuuaugauaacugauggcucagcuucagguguuagugaaugcagauuucuuaagauccgagagggccgaauaauaaaagaaauauuuccaacagggagaguaaaacauacugaggagugcacaugcggauuugccagcaauaaaaccauagaaugugccuguagagauaacaguuacacagcaaaaagacccuuugucaaauuaaacguggaaacugauacagcagaaauaagauugaugugcacagauacuuauuuggacacccccagaccagaugauggaagcauaacaggcccuugugaaucuaauggggacaaagggaguggaggcaucaagggaggauuuguucaccaaagaauggcauccaagauugggaggugguacucucgaacaaugucuaaaacugaaaggauggggaugggacuguaugucaaguaugauggagacccauggacugacagugaugcccuugcuuuuaggggaguaaugguuucaaugaaagaaccugguugguacuccuuuggcuucgaaauaaaagauaagaaaugcgauguccccuguauugggauagagaugguacaugaugguggaaaagagacuuggcacucagcagcaacagccauuuacuguuuaaugggcucaggacagcugcugugggacacagucacaggugucgacauggcucuauaa

SEQ ID NO: 62326 - RNA, 1401 nt, Artificial Sequence
  derived and/or modified CDS sequence (wt) from neuraminidase__InfluenzaB__AHZ36767
augcuaccuucaacuauacaaacguuaacccuauuucucacaucagggggaguauuauuaucacuauaugugucagcuucauuaucauacuuacuauauucggauauauuguuaaaauucucaccaacagaaauaacugcaccaacaaggccauuggauugugcaaacgcaucaaauguucaggcugugaaccguucugcaacaaaaggggugacacuucuucucccagaaccggaguggacauacccgcguuuaucuugcccgggcucaaccuuucagaaagcacuccuaauuagcccucauagauucggagaaaccaaaggaaacucagcucccuugauaauaagggaaccuuuuauugcuuguggaccaaaugaaugcaaacacuuugcucuaacccauuaugcagcccaaccagggggauacuacaauggaacaagaggagacagaaacaagcugaggcaucuaauuucagucaaauugggcaaaaucccaacaguagaaaacuccauuuuccacauggcagcauggagcggguccgcgugccaugaugguaaggaauggacauauaucggaguugauggcccugacaauaaugcauugcucaaaguaaaauauggagaagcauauacugacacauaccauuccuaugcaaacaaaauccuaagaacacaagaaagugccugcaauugcaucgggggaaauuguuaucuaaugauaacugauggcucagcuucagguguuagugaaugcagauuucuuaagauucgagagggccgaauaauaaaagaaauauuuccaacaggaagaguaaaacacacugaggaaugcacaugcggauuugccagcaauaaaaccauagaaugugccuguagagacaacagguacacagcaaaaagaccuuuugucaaauuaaacguggagacugauacagcagaaauaagauugaugugcacagauacuuauuuggacacccccagaccaaaugauggaagcauaacaggcccuugugaaucugauggggacaaagggaguggaggcaucaagggaggauuuguucaucaaagaaugaaauccaagauuggaaggugguacucucgaacgaugucuaaaacugaaaggauggggaugggacuguaugucaaguaugauggagacccaugggcugacagugaugcccuagcuuuuaguggaguaaugguuucaaugaaagaaccugguugguauuccuuuggcuucgaaauaaaagauaagaaaugcgauguccccuguauugggauagagaugguacaugaugguggaaaagagacuuggcacucagcagcaacagccauuuacuguuuaaugggcucaggacagcugcugugggacacugucacagguguugacauggcucuguaa

SEQ ID NO: 62327 - RNA, 1401 nt, Artificial Sequence
  derived and/or modified CDS sequence (wt) from neuraminidase__InfluenzaB__AHZ36778
augcuacccucaacuauacaaacguuaacccuauuucucacaucagggggaguauuauuaucacuauaugugucagcuucauugucauacuuacuauauucggauauauugcuaaaauucccaucaacagaaauuacugcaccaacaaugccauuagauugugcaaacgcaucaaauguucaggcugugaaccguucugcaacaaaaggggugacacuucuucucccagaaccggaguggacauacccgcguuuaucuugcccgggcucaaccuuucagaaagcacuccuaauuagcccucauagauucggagagaccaaaggaaacucagcucccuugauaauaagggaaccuuuuauugcuuguggaccaaaggaaugcaaacacuuugcucuaacccacuaugcagcccaaccagggggauacuacaauggaacaagaggagacagaaacaagcugaggcaucuaauuucagucaaauugggcaaaaucccaacaguagaaaacuccauuuuccacauggcagcauggagcggguccgcaugucaugaugguaaggaauggacauauaucggaguugauggcccugacaauaaugcauugcucaaaauaaaauauggggaagcauauacugacacauaccauuccuaugcaaacaacauccuaagaacacaagaaagugccugcaauugcaucggaggaaauuguuaucuuaugauaacugauggcucagcuucagguguuagugaaugcagauuucuuaagauucgagagggccgaauaauaaaagaaauauuuccaacaggaagaauacaacauacugaagaaugcacaugcggauuugcuagcaauaaaaccauagaaugugccuguagagauaacaguuacacagcaaaaagacccuuugucaaauuaaacguggagacugauacagcagaaauaagauugaugugcacaaagacuuauuuggacacccccagaccagaggauggaagcauaacugggccuugugaaucuaauggaggcaaagggaguggaggcaucaagggaggauuuguccaucaaagaauggcauccaagauuggaaggugguacucucgaacgaugucuaaaacugaaaggaaggggauggggcuguaugucaaguauaauggagacccaugggcugacagugaugcccuuguuuuuaguggaguaaugauuucaauggaagaaccugguugguacuccuuuggcuucgaaauaaaagacaagaaaugugauguccccuguauugggauagagaugguacaugaugguggaaaagagacuuggcacucagcagcuacagccauuuacuguuuaaugggcucaggacagcugcugugggacacugucacagguguuaauaugacucuguaa

SEQ ID NO: 62328 - RNA, 1401 nt, Artificial Sequence
  derived and/or modified CDS sequence (wt) from neuraminidase__InfluenzaB__AHZ36789
augcuaccuucaacuauacaaacguuaacccuauuucucacaucagggggaguauuauuaucacuauaugugucagcuucauuaucauacuuacuauauucggauauauugcuaaaauucucaccaacagaaauaacugcacaaacaaugccauuggauugugcaaacgcaucaaauguucaggcugugaaccguucugcaacaaaaggggugacacuucuucccccagaaccggaguggacauacccgcguuuaucuugcccgggcucaaccuuucagaaagcacuucuaauuagcccucauagauucggagaaaccaaaggaaacucagcucccuugauaauaagggaaccuuuuauugcuuguggaccaaaugaaugcaaacacuuugcucuaacccauuaugcagcccaaccagggggauacuacaauggaacaagaggagacagaaacaagcugaggcaucuaauuucagucaaauugggcaaaaucccaacaguagaaaacuccauuuuccacauggcagcauggagcggguccgcgugccaugaugguaaggaauggacauauaucggaguugauggcccugacaauaaugcauugcucaaaguaaaauauggagaagcauauacugacacauaccauuccuaugcaaacaaaauccuaagaacacaagaaagugccugcaauugcaucgggggaaauuguuaucuaaugauaacugauggcucagcuucagguguuagugaaugcagauuucuuaagauucgagagggccgaauaauaaaagaaauauuuccaacaggaagaguaaaacacacugaggaaugcacaugcggauuugccagcaauaaaaccauagaaugugccuguagagacaacagguacacagcaaaaagaccuuuugucaaauuaaacguggagacugauacagcagaaauaagauugaugugcacagauacuuauuuggacacccccagaccaaaugauggaagcauaacaggcccuugugaaucugauggggacaaagggaguggaggcaucaagggaggauuuguucaucaaagaaugaaauccaagauuggaaggugguacucucgaacgaugucuaaaacugaaaggauggggaugggacuguaugucaaguaugauggagacccaugggcugacagugaugcccuagcuuuuaguggaguaaugguuucaaugaaagaaccugguugguacuccuuuggcuucgaaaugaaagauaagaaaugcgauguccccuguauugggauagagaugguacaugaugguggaaaagagacuuggcacucagcagcaacagccauuuacuguuuaaugggcucaggacagcugcugugggacacugucacagguguugacauggcucuguaa

SEQ ID NO: 62329 - RNA, 1401 nt, Artificial Sequence
  derived and/or modified CDS sequence (wt) from neuraminidase__InfluenzaB__AHZ36800
augcuaccuucaacuauacaaacguuaacccuauuucucacaucagggggaguauuauuaucacuauaugugucagcuucauuaucauacuuacuauauucggauauauugcuaaaauucucaccaacagaaauaacugcacaaacaaugccauuggauugugcaaacgcaucaaauguucaggcugugaaccguucugcaacaaaaggggugacacuucuucccccagaaccggaguggacauacccgcguuuaucuugcccgggcucaaccuuucagaaagcacuucuaauuagcccucauagauucggagaaaccaaaggaaacucagcucccuugauaauaagggaaccuuuuauugcuuguggaccaaaugaaugcaaacacuuugcucuaacccauuaugcagcccaaccagggggauacuacaauggaacaagaggagacaggaacaagcugaggcaucuaauuucagucaaauugggcaaaaucccaacaguagaaaacuccauuuuccacauggcagcauggagcggguccgcgugccaugaugguaaggaauggacauauaucggaguugauggcccugacaauaaugcauugcucaaaguaaaauauggagaagcauauacugacacauaccauuccuaugcaaacaaaauccuaagaacacaagaaagugccugcaauugcaucgggggaaauuguuaucuaaugauaacugauggcucagcuucagguguuagugaaugcagauuucuuaagauucgagagggccgaauaauaaaagaaauauuuccaacaggaagaguaaaacacacugaggaaugcacaugcggauuugccagcaauaaaaccauagaaugugccuguagagacaacagguacacagcaaaaagaccuuuugucaaauuaaacguggagacugauacagcagaaauaagauugaugugcacagauacuuauuuggacacccccagaccaaaugauggaagcauaacaggcccuugugaaucugauggggacaaagggaguggaggcaucaagggaggauuuguucaucaaagaaugaaauccaagauuggaaggugguacucucgaacgaugucuaaaacugaaaggauggggaugggacuguaugucaaguaugauggagacccaugggcugacagugaugcccuagcuuuuaguggaguaaugguuucaaugaaagaaccugguugguacuccuuuggcuucgaaaugaaagauaagaaaugcgauguccccuguauugggauagagaugguacaugaugguggaaaagagacuuggcacucagcagcaacagccauuuacuguuuaaugggcucaggacagcugcugugggacacugucacagguguugacauggcucuguaa

SEQ ID NO: 62330 - RNA, 1401 nt, Artificial Sequence
  derived and/or modified CDS sequence (wt) from neuraminidase__InfluenzaB__AHZ36811
augcuaccuucaacuauacaaacguuaacccuauuucucacaucagggggaguguuauuaucacuauaugugucagcuucauugucauacuuacuauauucggauauauugcuaaaauuuucacagacagaaauaacugcaccaauaaugccauuggauuguacaaacgcaucaaauguucaggcugugaaucguucugcagcaaaaggggugacacuucuucucccagaaccggaguggacauacccucguuuaucuugcccgggcucaaccuuucagaaagcacuccuaauuagcccccauagauucggagaaaucaaaggaaacucagcucccuugauaauaagggaaccuuuuauugcuuguggaccaacggaaugcaaacacuuugcucuaacccauuaugcagcucaaccagggggauacuacaauggaacaagagaagacagaaacaagcugaggcaucuaauuucagucaaauuggguaaaaucccaacaguagaaaacuccauuuuccacauggcagcuuggagcggguccgcaugccaugaugguaaagaauggacauauaucggaguugauggccccgacaguaaugcauugcucaaaauaaaauauggagaagcauauacugacacguaccauuccuaugcaaaaaacauccuaaggacacaagaaagugccugcaauugcaucgggggagauuguuaucuuaugauaacugauggcccagcuucagggguuagugaaugcagauuccuuaagauucgagaaggcagaauaauaagagaaauauuuccaacaggaagaguaaaacauacugaggaaugcacaugcggauuugccagcaacaaaaccauagaaugugcuuguagagauaaccguuacacagcaaaaagacccuuugucaaauuaaauguggagacugauacagcggaaauaagauugaugugcacagagacuuauuuggacacccccagaccaaaugauggaagcauaacagggccuugcgaaucugauggggacaaagggaguggaggcaucaagggaggauuuguucaucaaagaauggcauccaagauuggaaggugguacucucgaacgaugucuaaaaccaaaagaauggggaugggacuguauguaaaguaugauggagacccauggacugacagugaagcccuugcucuuaguggaguaaugguuucaauggaagaaccugguugguauuccuuuggcuucgaaauaaaagauaagaaaugugauguccccuguauugggauagaaaugguacaugauggugggaaaacgacuuggcacucagcagcaacagccauuuauuguuuaaugggcucaggacaauugcugugggacacugucacagguguugauauggcucuguaa

SEQ ID NO: 62331 - RNA, 1404 nt, Artificial Sequence
  derived and/or modified CDS sequence (wt) from neuraminidase__InfluenzaB__AHZ36822
augcuaccuucaacuauacaaauguuaacccuauuucucacaucagggggaguacuauuaucacuauaugugucagcuucauuaucauacuuacuauauucggauauauugcuaaaauucucaccaacagaaauaacugcaccaacaaugccauuggauugugcaaacgcaucaaauguucaugcugugaaccguucugcaacaaaaggggugacauuucuucuucucccagaaccggaguggacauacccgcguuuaucuugcccgggcucaaccuuucagaaagcacuccuaauuagcccucauagauucggagaaaccaaaggaaacucagcucccuugauaauaagggaaccuuuuauugcuuguggaccaaaugaaugcaaacacuuugcucuaacccauuaugcagcccaaccagggggauacuacaauggaacaagaggagacagaaacaagcugaggcaucuaauuucagucaaauugggcaaaaucccaacaguagaaaacuccauuuuccacauggcagcauggagcggguccgcaugccaugaugguaaggaauggacauauaucggaguugaugguccugacaauaaugcauuacucaaaauaaaauauggagaagcauauacugacacauaucauuccuaugcaaacaacauccuaagaacacaagaaagugccugcaauugcaucgggggaaauuguuaucuuaugauaacugauggcucagcuucagguguuagugaaugcagauuucuuaagauccgagagggccgaauaauaaaagaaauauuuccaacagggagaguaaaacauacugaggagugcacaugcggauuugccagcaauaaaaccauagaaugugccuguagagauaacaguuacacagcaaaaagacccuuugucaaauuaaacguggaaacugauacagcagaaauaagauugaugugcacagauacuuauuuggacacccccagaccagaugauggaagcauaacaggcccuugugaaucuaauggggacaaagggaguggaggcaucaagggaggauuuguucaccaaagaauggcauccaagauuggaaggugguacucucgaacgaugucuaaaacugaaaggauggggaugggacuguaugucaaguaugauggagacccauggacugacagugaugcccuugcuuuuaggggaguaaugguuucaaugaaagaaccuggcugguacuccuuuggcuucgaaauaaaagauaagaaaugcgauguccccuguauugggauagagaugguacaugaugguggaaaagagacuuggcacucagcagcaacagccauuuacuguuuaaugggcucaggacagcugcugugggacacagucacaggugucgacauggcucuauaa

SEQ ID NO: 62332 - RNA, 1401 nt, Artificial Sequence
  derived and/or modified CDS sequence (wt) from neuraminidase__InfluenzaB__AHZ36833
augcuaccuucaacuauacaaacguuaacccuauuucucacaucagggggaguauuauuaucacuauaugugucagcuucauuaucauacuuacuauauucggauauauuguuaaaauucucaccaacagaaauaacugcaccaacaaggccauuggauugugcaaacgcaucaaauguucaggcugugaaccguucugcaacaaaaggggugacacuucuucucccagaaccggaguggacauacccgcguuuaucuugcccgggcucaaccuuucagaaagcacuccuaauuagcccucauagauucggagaaaccaaaggaaacucagcucccuugauaauaagggaaccuuuuauugcuuguggaccaaaugaaugcaaacacuuugcucuaacccauuaugcagcccaaccagggggauacuacaauggaacaagaggagacagaaacaagcugaggcaucuaauuucagucaaauugggcaaaaucccaacaguagaaaacuccauuuuccacauggcagcauggagcggguccgcgugccaugaugguaaggaauggacauauaucggaguugauggcccugacaauaaugcauugcucaaaguaaaauauggagaagcauauacugacacauaccauuccuaugcaaacaaaauccuaagaacacaagaaagugccugcaauugcaucgggggaaauuguuaucuaaugauaacugauggcucagcuucagguguuagugaaugcagauuucuuaagguucgagagggccgaauaauaaaagaaauauuuccaacaggaagaguaaaacacacugaggaaugcacaugcggauuugccagcaauaaaaccauagaaugugccuguagagacaacagguacacagcaaaaagaccuuuugucaaauuaaacguggagacugauacagcagaaauaagauugaugugcacagauacuuauuuggacacccccagaccaaaugauggaagcauaacaggcccuugugaaucugauggggacaaagggaguggaggcaucaagggaggauuuguucaucaaagaaugaaauccaagauuggaaggugguacucucgaacgaugucuaaaacugaaaggauggggaugggacuguaugucaaguaugauggagacccaugggcugacagugaugcccuagcuuuuaguggaguaaugguuucaaugaaagaaccugguugguauuccuuuggcuucgaaauaaaagauaagaaaugcgauguccccuguauugggauagagaugguacaugaugguggaaaagagacuuggcacucagcagcaacagccauuuacuguuuaaugggcucaggacagcugcugugggacacugucacagguguugacauggcucuguaa

SEQ ID NO: 62333 - RNA, 1401 nt, Artificial Sequence
  derived and/or modified CDS sequence (wt) from neuraminidase__InfluenzaB__AHZ36844
augcuaccuucaacuauacaaacguuaacccuauuucucacaucagggggaguauuauuaucacuauaugugucagcuucauuaucauacuuacuauauucggauauauuguuaaaauucucaccaacagaaauaacugcaccaacaaggccauuggauugugcaaacgcaucaaauguucaggcugugaaccguucugcaacaaaagaggugacacuucuucucccagaaccggaguggacauacccgcguuuaucuugcccgggcucaaccuuucagaaagcacuccuaauuagcccucauagauucggagaaaccaaaggaaacucagcucccuugauaauaagggaaccuuuuauugcuuguggaccaaaugaaugcaaacacuuugcucuaacccauuaugcagcccaaccagggggauacuacaauggaacaagaggagacagaaacaagcugaggcaucuaauuucagucaaauugggcaaaaucccaacaguagaaaacuccauuuuccacauggcagcauggagcggguccgcgugccaugaugguaaggaauggacauauaucggaguugauggcccugacaauaaugcauugcucaaaguaaaauauggagaagcauauacugacacauaccauuccuaugcaaacaaaauccuaagaacacaagaaagugccugcaauugcaucgggggaaauuguuaucuaaugauaacugauggcucagcuucagguguuagugaaugcagauuucuuaagauucgagagggccgaauaauaaaagaaauauuuccaacaggaagaguaaaacacacugaggaaugcacaugcggauuugccagcaauaaaaccauagaaugugccuguagagacaacagguacacagcaaaaagaccuuuugucaaauuaaacguggagacugauacagcagaaauaagauugaugugcacagauacuuauuuggacacccccagaccaaaugauggaagcauaacaggcccuugugaaucugauggggacaaagggaguggaggcaucaagggaggauuuguucaucaaagaaugaaauccaagauuggaaggugguacucucgaacgaugucuaaaacugaaaggauggggaugggacuguaugucaaguaugauggagacccaugggcugacagugaugcccuagcuuuuaguggaguaaugguuucaaugaaagaaccugguugguauuccuuuggcuucgaaauaaaagauaagaaaugugauguccccuguauugggauagagaugguacaugaugguggaaaagagacuuggcacucagcagcaacagccauuuacuguuuaaugggcucaggacagcugcugugggacacugucacagguguugacauggcucuguaa

SEQ ID NO: 62334 - RNA, 1401 nt, Artificial Sequence
  derived and/or modified CDS sequence (wt) from neuraminidase__InfluenzaB__AHZ36855
augcuaccuucaacuauacaaacguuaacccuauuucucacaucagggggaguauuauuaucacuauaugugucagcuucauuaucauacuuacuauauucggauauauugcuaaaauucucaccaacagaaauaacuguacaaacaaugccauuggauugugcaaacgcaucaaauguucaggcugugaaccguucugcaacaaaaggggugacacuucuucccccagaaccggaguggacauacccgcguuuaucuugcccgggcucaaccuuucagaaagcacuucuaauuagcccucauagauucggagaaaccaaaggaaacucagcucccuugauaauaagggaaccuuuuauugcuuguggaccaaaugaaugcaaacacuuugcucuaacccauuaugcagcccaaccagggggauacuacaauggaacaagaggagacagaaacaagcugaggcaucuaauuucagucaaauugggcaaaaucccaacaguagaaaacuccauuuuccacauggcagcauggagcggguccgcgugccaugaugguaaggaauggacauauaucggaguugauggcccugacaauaaugcauugcucaaaguaaaauauggagaagcauauacugacacauaccauuccuaugcaaacaaaauccuaagaacacaagaaagcgccugcaauugcaucgggggaaauuguuaucuaaugauaacugauggcucagcuucagguguuagugaaugcagauuucuuaagauucgagagggccgaauaauaaaagaaauauuuccaacaggaagaguaaaacacacugaggaaugcacaugcggauuugccagcaauaaaaccauagaaugugccuguagagacaacagguacacagcaaaaagaccuuuugucaaauuaaacguggagacugauacagcagaaauaagauugaugugcacagauacuuauuuggacacccccagaccaaaugauggaagcauaacaggcccuugugaaucugauggggacaaagggaguggaggcaucaagggaggauuuguucaucaaagaaugaaauccaagauuggaaggugguacucucgaacgaugucuaaaacugaaaggauggggaugggacuguaugucaaguaugauggagacccaugggcugacagugaugcccuagcuuuuaguggaguaaugguuucaaugaaagaaccugguugguacuccuuuggcuucgaaaugaaagauaagaaaugcgauguccccuguauugggauagagaugguacaugaugguggaaaagagacuuggcacucagcagcaacagccauuuacuguuuaaugggcucaggacagcugcugugggacacugucacagguguugacauggcucuguaa

SEQ ID NO: 62335 - RNA, 1404 nt, Artificial Sequence; identical to SEQ ID NO: 62331
  derived and/or modified CDS sequence (wt) from neuraminidase__InfluenzaB__AHZ36866

SEQ ID NO: 62336 - RNA, 1401 nt, Artificial Sequence
  derived and/or modified CDS sequence (wt) from neuraminidase__InfluenzaB__AHZ36877
augcuaccuucaacuauacaaacguuaacccuauuucucacaucagggggaguauuauuaucacuauaugugucagcuucauuaucauacuuacuauauucggauauauuacuaaaauucucaccaccagaaauaacugcaccaacaaugccauuggauugugcaaacgcaucaaauguucaggcugugaaccguucugcaacaaaaggggugacacuucuucucccagaaccggaguggacauacccgcguuuaucuugcccgggcucaaccuuucagaaagcacuccuaauuagcccucauagauucggagaaaccaaaggaaacucagcucccuuaauaauaagggaaccuuuuauugcuuguggaccaaaugaaugcaaacacuuugcucuaacccauuaugcagcccaaccagggggauacuacaauggaacaagaggagacagaaacaagcugaggcaucuaauuucagucaaauugggcaaaaucccaacaguagagaacuccauuuuccacauggcagcauggagcggguccgcgugccaugaugguaaggaauggacauauaucggaguugauggcccugacaauaaugcauugcucaaaguaaaauauggagaagcauauacugacacauaccauuccuaugcaaacaaaauccuaagaacacaagaaagugccugcaauugcaucgggggaaauuguuaucuaaugauaacugauggcucagcuucagguguuagugaaugcagauuucuuaagauucgagagggccgaauaauaaaagaaauauuuccaacaggaagaguaaaacacacugaggaaugcacaugcggauuugccagcaauaaaaccauagaaugugccuguagagacaacagguacacagcaaaaagaccuuuugucaaauuaaacguggagacugauacagcagaaauaagauugaugugcacagauacuuauuuggacacccccagaccaaaugauggaagcauaacaggcccuugugaaucugauggggacaaagggaguggaggcaucaagggaggauuuguucaucaaagaaugaaauccaagauuggaaggugguacucucgaacgaugucuaaaacugaaaggauggggaugggacuguaugucaaguaugauggagacccaugggcugacagugaugcccuagcuuuuaguggaguaaugguuucaaugaaagaaccugguugguauuccuuuggcuucgaaauaaaagauaagaaaugcgauguccccuguauugggauagagaugguacaugaugguggaaaagagacuuggcacucagcagcaacagccauuuacuguuuaaugggcucaggacagcugcugugggacacugucacagguguugacauggcucuguaa

SEQ ID NO: 62337 - RNA, 1404 nt, Artificial Sequence
  derived and/or modified CDS sequence (wt) from neuraminidase__InfluenzaB__AHZ36888
augcuaccuucaacuauacaaauguuaacccuauuucucacaucagggggaguacuauuaucacuauaugugucagcuucauuaucauacuuacuauauucggauauauugcuaaaauucucaccaacagaaauaacugcaccaacaaugccauuggauugugcaaacgcaucaaauguucaugcugugaaccguucugcaacaaaaggggugacauuucuucuucucccagaaccggaguggacauacccgcguuuaucuugcccgggcucaaccuuucagaaagcacuccuaauuagcccucauagauucggagaaaccaaaggaaacucagcucccuugauaauaagggaaccuuuuauugcuuguggaccaaaugaaugcaaacacuuugcucuaacccauuaugcagcccaaccagggggauacuacaauggaacaagaggagacagaaacaagcugaggcaucuaauuucagucaaauugggcaaaaucccaacaguagaaaacuccauuuuccacauggcagcauggagcggguccgcaugccaugaugguaaggaauggacauauaucggaguugaugguccugacaauaaugcauuacucaaaauaaaauauggagaagcauauacugacacauaucauuccuaugcaaacaacauccuaagaacacaagaaagugccugcaauugcaucgggggaaauuguuaucuuaugauaacugauggcucagcuucagguguuagugaaugcagauuucuuaagauccgagagggccgaauaauaaaagaaauauuuccaacagggagaguaaaacauacugaggagugcacaugcggauuugccagcaauaaaaccauagaaugugccuguagagauaacaguuacacagcaaaaagacccuuugucaaauuaaacguggaaacugauacagcagaaauaagauugaugugcacagauacuuauuuggacacccccagaccagaugauggaagcauaacaggcccuugugaaucuaauggggacaaagggaguggaggcaucaagggaggauuuguucaccaaagaauggcauccaagauugggaggugguacucucgaacgaugucuaaaacugaaaggauggggaugggacuguaugucaaguaugauggagacccauggacugacagugaugcccuugcuuuuaggggaguaaugguuucaaugaaagaaccugguugguacuccuuuggcuucgaaauaaaagauaagaaaugcgauguccccuguauugggauagagaugguacaugaugguggaaaagagacuuggcacucagcagcaacagccauuuacuguuuaaugggcucaggacagcugcugugggacacagucacaggugucgacauggcucuauaa

SEQ ID NO: 62338 - RNA, 1404 nt, Artificial Sequence
  derived and/or modified CDS sequence (wt) from neuraminidase__InfluenzaB__AHZ36899
augcuaccuucaacuauacaaauguuaacccuauuucucacaucagggggaguacuauuaucacuauaugugucagcuucauuaucauacuuacuauauucggauauauugcuaaaauucucaccaacagaaauaacugcaccaacaaugccauuggauugugcaaacgcaucaaauguucaugcugugaaccguucugcaacaaaaggggugacauuucuucuucucccagaaccggaguggacauacccgcguuuaucuugcccgggcucaaccuuucagaaagcacuccuaauuagcccucauagauucggagaaaccaaaggaaacucagcucccuugauaauaagggaaccuuuuauugcuuguggaccaaaugaaugcaaacacuuugcucuaacccauuaugcagcccaaccagggggauacuacaauggaacaagaggagacagaaacaagcugaggcaucuaauuucagucaaauugggcaaaaucccaacaguagaaaacuccauuuuccacauggcagcauggagcggguccgcaugccaugaugguaaggaauggacauauaucggaguugaugguccugacaauaaugcauuacucaaaauaaaauauggagaagcauauacugacacauaucauuccuaugcaaacaacauccuaagaacacaagaaagugccugcaauugcaucgggggaaauuguuaucuuaugauaacugauggcucagcuucagguguuagugaaugcagauuucuuaagauccgagagggccgaauaauaaaagaaauauuuccaacggggagaguaaaacauacugaggagugcacaugcggauuugccagcaauaaaaccauagaaugugccuguagagauaacaguuacacagcaaaaagacccuuugucaaauuaaacguggaaacugauacagcagaaauaagauugaugugcacagauacuuauuuggacacccccagaccagaugauggaagcauaacaggcccuugugaaucuaauggggacaaagggaguggaggcaucaagggaggauuuguucaccaaagaauggcauccaagauugggaggugguacucucgaacaaugucuaaaacugaaaggauggggaugggacuguaugucaaguaugauggagacccauggacugacagugaugcccuugcuuuuaggggaguaaugguuucaaugaaagaaccugguugguacuccuuuggcuucgaaauaaaagauaagaaaugcgauguccccuguauugggauagagaugguacaugaugguggaaaagagacuuggcacucagcagcaacagccauuuacuguuuaaugggcucaggacagcugcugugggacacagucacaggugucgacauggcucuauaa

SEQ ID NO: 62339 - RNA, 1404 nt, Artificial Sequence; identical to SEQ ID NO: 62337
  derived and/or modified CDS sequence (wt) from neuraminidase__InfluenzaB__AHZ36910

SEQ ID NO: 62340 - RNA, 1401 nt, Artificial Sequence; identical to SEQ ID NO: 62327
  derived and/or modified CDS sequence (wt) from neuraminidase__InfluenzaB__AHZ36921

SEQ ID NO: 62341 - RNA, 1401 nt, Artificial Sequence
  derived and/or modified CDS sequence (wt) from neuraminidase__InfluenzaB__AHZ36932
augcuaccuucaacuauacaaacguuaacccuauuucucacaucagggggaguauuauuaucacuauaugugucagcuucauuaucauacuuacuauauucggauauauugcuaaaauucucaccaacagaaauaacugcacaaacaaugccauuggauugugcaaacgcaucaaauguucaggcugugaaccguucugcaacaaaaggggugacacuucuucccccagaaccggaguggacauacccgcguuuaucuugcccgggcucaaccuuucagaaagcacuucuaauuagcccucauagauucggagaaaccaaaggaaacucagcucccuugauaauaagggaaccuuuuauugcuuguggaccaaaugaaugcaaacacuuugcucuaacccauuaugcagcccaaccagggggauacuacaauggaacaagaggagacagaaacaagcugaggcaucuaauuucagucaaauugggcaaaaucccaacaguagaaaacuccauuuuccacauggcagcauggagcggguccgcgugccaugaugguaaggaauggacauauaucggaguugauggcccugacaauaaugcauugcucaaaguaaaauauggagaagcauauacugacacauaccauuccuaugcaaacaaaauccuaagaacacaagaaagugccugcaauugcaucgggggaaauuguuaucuaaugauaacugauggcucagcuucagguguuagugaaugcagauuucuuaagauucgagagggccgaauaauaaaagaaauauuuccaacaggaagaguaaaacacacugaggaaugcacaugcggauuugccagcaauaaaaccauggaaugugccuguagagacaacagguacacagcaaaaagaccuuuugucaaauuaaacguggagacugauacagcagaaauaagauugaugugcacagauacuuauuuggacacccccagaccaaaugauggaagcauaacaggcccuugugaaucugauggggacaaagggaguggaggcaucaagggaggauuuguucaucaaagaaugaaauccaagauuggaaggugguacucucgaacgaugucuaaaacugaaaggauggggaugggacuguaugucaaguaugauggagacccaugggcugacagugaugcccuagcuuuuaguggaguaaugguuucaaugaaagaaccugguugguacuccuuuggcuucgaaaugaaagauaagaaaugcgauguccccuguauugggauagagaugguacaugaugguggaaaagagacuuggcacucagcagcaacagccauuuacuguuuaaugggcucaggacagcugcugugggacacugucacagguguugacauggcucuguaa

SEQ ID NO: 62342 - RNA, 1401 nt, Artificial Sequence
  derived and/or modified CDS sequence (wt) from neuraminidase__InfluenzaB__AHZ36943
augcuaccuucaacuauacaaacguuaacccuauuucucacaucagggggaguauuauuaucacuauaugugucagcuucauuaucauacuuacuauauucggauauauugcuaaaauucucaccaacagaaauaacugcaccaacaaugccauuggauugugcaaacgcaucaaauguucaggcugugaaccguucugcaacaaaaggggugacacuucuucccccagaaccggaguggacauacccgcguuuaucuugcccgggcucaaccuuucagaaagcacuccuaauuagcccucauagauucggagaaaccaaaggaaacucagcucccuugauaauaagggaaccuuuuauugcuuguggaccaaaugaaugcaaacacuuugcucuaacccauuaugcagcccaaccagggggauacuacaauggaacaagaggagacagaaacaagcugaggcaucuaauuucagucaaauugggcaaaaucccaacaguagaaaacuccauuuuccacauggcagcauggagcggaucagcgugccaugaugguaaggaauggacauauaucggaguugauggcccugacaauaaugcauugcucaaaguaaaauauggagaagcauauacugacacauaccauuccuaugcaaacaaaauccuaagaacacaagaaagugccugcaauugcaucgggggaaauuguuaucuaaugauaacugauggcucagcuucagguguuagugaaugcagauuucuuaagauucgagagggccgaauaauaaaagaaauauuuccaacaggaagaguaaaacacacugaggaaugcacaugcggauuugccagcaauaaaaccauagaaugugccuguagagacaacagguacacagcaaaaagaccuuuugucaaauuaaacguggagacugauacagcagaaauaagauugaugugcacagauacuuauuuggacacccccagaccaaaugauggaagcauaacaggcccuugugaaucugauggggacaaagggaguggaggcaucaagggaggauuuguucaucaaagaaugaaauccaagauuggaaggugguacucucgaacgaugucuaaaacugaaaggauggggaugggacuguaugucaaguaugauggagacccaugggcugacagugaugcccuagcuuuuaguggaguaaugguuucaaugaaagaaccugguugguacuccuuuggcuucgaaaugaaagauaggaaaugcgauguccccuguauugggauagagaugguacaugaugguggaaaagagacuuggcacucagcagcaacagccauuuacuguuuaaugggcucaggacagcugcugugggacacugucacagguguugacauggcucuguaa

SEQ ID NO: 62343 - RNA, 1404 nt, Artificial Sequence; identical to SEQ ID NO: 62337
  derived and/or modified CDS sequence (wt) from neuraminidase__InfluenzaB__AHZ36954

SEQ ID NO: 62344 - RNA, 1401 nt, Artificial Sequence
  derived and/or modified CDS sequence (wt) from neuraminidase__InfluenzaB__AHZ36965
augcuaccuucaacuauacaaacguuaacccuauuucucacaucagggggaguauuauuaucacuauaugugucagcuucauuaucauacuuacuauauucggauauauugcuaaaauucucaccaccagaaauaaaugcaccaacaaugccauuggauugugcaaacgcaucaaauguucaggcugugaaccguucugcaacaaaaggggugacacuucuucucccagaaccggaguggacauacccgcguuuaucuugcccgggcucaaccuuucagaaagcacuccuaauuagcccucauagauucggagaaaccaaaggaaacucagcucccuuaauaauaagggaaccuuuuauugcuuguggaccaaaugaaugcaaacacuuugcucuaacccauuaugcagcccaaccagggggauacuacaauggaacaagaggagacagaaacaagcugaggcaucuaauuucagucaaauugggcaaaaucccaacaguagagaacuccauuuuccacauggcagcauggagcggguccgcgugccaugaugguaaggaauggacauauaucggaguugauggcccugacaauaaugcauugcucaaaguaaaauauggagaagcauauacugacacauaccauuccuaugcaaacaaaauccuaagaacacaagaaagugccugcaauugcaucgggggaaauuguuaucuaaugauaacugauggcucagcuucagguguuagugaaugcagauuucuuaagauucgagagggccgaauaauaaaagaaauauuuccaacaggaagaguaaaacacacugaggaaugcacaugcggauuugccagcaauaaaaccauagaaugugccuguagagacaacagguacacagcaaaaagaccuuuugucaaauuaaacguggagacugauacagcagaaauaagauugaugugcacagauacuuauuuggacacccccagaccaaaugauggaagcauaacaggcccuugugaaucugauggggacaaagggaguggaggcaucaagggaggauuuguucaucaaagaaugaaauccaagauuggaaggugguacucucgaacgaugucuaaaacugaaaggauggggaugggacuguaugucaaguaugauggagacccaugggcugacagugaugcccuagcuuuuaguggaguaaugguuucaaugaaagaaccugguugguauuccuuuggcuucgaaauaaaagauaagaaaugcgauguccccuguauugggauagagaugguacaugaugguggaaaagagacuuggcacucagcagcaacagccauuuacuguuuaaugggcucaggacagcugcugugggacacugucacagguguugacauggcucuguaa

SEQ ID NO: 62345 - RNA, 1404 nt, Artificial Sequence
  derived and/or modified CDS sequence (wt) from neuraminidase__InfluenzaB__AHZ36976
augcuaccuucaacuauacaaauguuaacccuauuucucacaucagggggaguacuauuaucacuauaugugucagcuucauuaucauacuuacuauauucggauauauugcuaaaauucucaccaacagaaauaacugcaccaacaaugccauuggauugugcaaacgcaucaaauguucaugcugugaaccguucugcaacaaaaggggugacauuucuucuucucccagaaccggaguggacauacccgcguuuaucuugcccgggcucaaccuuucagaaagcacuccuaauuagcccucauagauucggagaaaccaaaggaaacucagcucccuugauaauaagggaaccuuuuauugcuuguggaccaaaugaaugcaaacacuuugcucuaacccauuaugcagcccaaccagggggauacuacaauggaacaagaggagacagaaacaagcugaggcaucuaauuucagucaaauugggcaaaaucccaacaguagaaaacuccauuuuccacauggcagcauggagcggguccgcaugccaugaugguaaggaauggacauauaucggaguugaugguccugacaauaaugcauuacucaaaauaaaauauggagaagcauauacugacacauaucauuccuaugcaaacaacauccuaagaacacaagaaagugccugcaauugcaucgggggaaauuguuaucuuaugauaacugauggcucagcuucagguguuagugaaugcagauuucuuaagauccgagagggccgaauaauaaaagaaauauuuccaacagggagaguaaaacauacugaggagugcacaugcggauuugccagcaauaaaaccauagaaugugccuguagagauaacaguuacacagcaaaaagacccuuugucaaauuaaacguggaaacugauacagcagaaauaagauugaugugcacagauacuuauuuggacacccccagaccagaugauggaagcauaacaggcccuugugaaucuaauggggacaaagggaguggaggcaucaagggaggauuuguucaccaaagaauggcauccaagauugggaggugguacucucgaacgaugucuaaaacugaaaggauggggaugggacuguaugucaaguaugauggagacccauggacugacagugaugcccuugcuuuuaggggaguaaugguuucaaugaaagaaccugguugguacuccuuuggcuucgaaauaaaagauaagaaaugugauguccccuguauugggauagagaugguacaugaugguggaaaagagacuuggcacucagcagcaacagccauuuacuguuuaaugggcucaggacagcugcugugggacacagucacaggugucgacauggcucuauaa

SEQ ID NO: 62346 - RNA, 1404 nt, Artificial Sequence
  derived and/or modified CDS sequence (wt) from neuraminidase__InfluenzaB__AHZ36987
augcuaccuucaacuauacaaauguuaacccuauuucucacaucagggggaguacuauuaucacuauaugugucagcuucauuaucauacuuacuauauucggauauauugcuaaaauucucaccaacagaaauaacugcaccaacaaugccauuggauugugcaaacgcaucaaauguucaugcugugaaccguucugcaacaaaaggggugacauuucuucuucucccagaaccggaguggacauacccgcguuuaucuugcccgggcucaaccuuucagaaagcacuccuaauuagcccucauagauucggagaaaccaaaggaaacucagcucccuugauaauaagggaaccuuuuauugcuuguggaccaaaugaaugcaaacacuuugcucuaacccauuaugcagcccaaccagggggauacuacaauggaacaagaggagacagaaacaagcugaggcaucuaauuucagucaaauugggcaaaaucccaacaguagaaaacuccauuuuccacauggcagcauggagcggguccgcaugccaugaugguaaggaauggacauauaucggaguugaugguccugacaauaaugcauuacucaaaauaaaauauggagaagcauauacugacacauaucauuccuaugcaaacaacauccuaagaacacaagaaagugccugcaauugcaucgggggaaauuguuaucuuaugauaacugauggcucagcuucagguguuagugaaugcagauuucuuaagauccgagagggccgaauaauaaaagaaauauuuccaacagggagaguaaaacauacugaggagugcacaugcggauuugccagcaauaaaaccauagaaugugccuguagagauaacaguuacacagcaaaaagacccuuugucaaauuaaacguggaaacugauacagcagaaauaagauugaugugcacagauacuuauuuggacacccccagaccagaugauggaagcauaacaggcccuugugaaucuaauggggacaaagggaguggaggcaucaagggaggauuuguucaccaaagaauggcauccaagauuggaaggugguacucucgaacgaugucuaaaacugaaaggauggggaugggacuguaugucaaguaugauggagacccauggacugacagugaugcccuugcuuuuaggggaguaaugguuucaaugaaagaaccugguugguacucuuuuggcuucgaaauaaaagauaagaaaugcgauguccccuguauugggauagagaugguacaugaugguggaaaagagacuuggcacucagcagcaacagccauuuacuguuuaaugggcucaggacagcugcugugggacacagucacaggugucgacauggcucuauaa

SEQ ID NO: 62347 - RNA, 1401 nt, Artificial Sequence
  derived and/or modified CDS sequence (wt) from neuraminidase__InfluenzaB__AHZ36998
augcuaccuucaacuauacaaacguuaacccuauuucucacaucagggggaguauuauuaucacuauaugugucagcuucauuaucauacuuacuauauucggauauauugcuaaaauucucaccaacagaaauaacugcacaaacaaugccauuggauugugcaaacgcaucaaauguucaggcugugaaccguucugcaacaaaaggggugacacuucuucccccagaaccggaguggacauacccgcguuuaucuugcccgggcucaaccuuucagaaagcacuucuaauuagcccucauagauucggagaaaccaaaggaaacucagcucccuugauaauaagggaaccuuuuauugcuuguggaccaaaugaaugcaaacacuuugcucuaacccauuaugcagcccaaccagggggauacuacaauggaacaagaggagacagaaacaagcugaggcaucuaauuucagucaaauugggcaaaaucccaacaguagaaaacuccauuuuccacauggcagcauggaguggguccgcgugccaugaugguaaggaauggacauauaucggaguugauggcccugacaauaaugcauugcucaaaguaaaauauggagaagcauauacugacacauaccauuccuaugcaaacaaaauccuaagaacacaagaaagugccugcaauugcaucgggggaaauuguuaucuaaugauaacugauggcucagcuucagguguuagugaaugcagauuucuuaagauucgagagggccgaauaauaaaagaaauauuuccaacaggaagaguaaaacacacugaggaaugcacaugcggauuugccagcaauaaaaccauagaaugugccuguagagacaacagguacacagcaaaaagaccuuuugucaaauuaaacguggagacugauacagcagaaauaagauugaugugcacagauacuuauuuggacacccccagaccaaaugauggaagcauaacaggcccuugugaaucugauggggacaaagggaguggaggcaucaagggaggauuuguucaucaaagaaugaaauccaagauuggaaggugguacucucgaacgaugucuaaaacugaaaggauggggaugggacuguaugucaaguaugauggagacccaugggcugacagugaugcccuagcuuuuaguggaguaaugguuucaaugaaagaaccugguugguacuccuuuggcuucgaaaugaaagauaagaaaugcgauguccccuguauugggauagagaugguacaugaugguggaaaagagacuuggcacucagcagcaacagccauuuacuguuuaaugggcucaggacagcugcugugggacacugucacagguguugacauggcucuguaa

SEQ ID NO: 62348 - RNA, 1401 nt, Artificial Sequence
  derived and/or modified CDS sequence (wt) from neuraminidase__InfluenzaB__AHZ37009
augcuaccuucaacuauacaaacguuaacccuauuucucacauuagggggaguauuauuaucacuauaugugucagcuucauuaucauacuuacuauauucggauauauugcuaaaauucucaccaacagaaauaacugcaccaacaaugccauuggguugugcaaacgcaucaaauguucaggcugugaaccguucugcaacaaaaggggugacacuucuucucccagaaccggaguggacauacccgcguuuaucuugcccgggcucaaccuuucagaaagcacuccuaauuagcccucauagauucggagaaaccaaaggaaacucagcucccuuaauaauaagggaaccuuuuauugcuuguggaccaaaugaaugcaaacacuuugcucuaacccauuaugcagcccaaccagggggauacuacaauggaacaagaggagacagaaacaagcugaggcaucuaauuucagucaaauugggcaaaaucccaacaguagagaacuccauuuuccacauggcagcauggagcggguccgcgugccaugaugguaaggaauggacauauaucggaguugauggcccugacaauaaugcauugcucaaaguaaaauauggagaagcauauacugacacauaccauuccuaugcaaacaaaauccuaagaacacaagaaagugccugcaauugcaucggaggaaauuguuaucuaaugauaacugauggcucagcuucagguguuagugaaugcagauuucuuaagauucgagagggccgaauaauaaaagaaauauuuccaacaggaagaguaaaacacacugaggaaugcacaugcggauuugccagcaauaaaaccauagaaugugccuguagagacaacagguacacagcaaaaagaccuuuugucaaauuaaacguggaggcugauacagcagaaauaagauugaugugcacagauacuuauuuggacacccccagaccaaaugauggaagcauaacaggcccuugugaaucugauggggacaaagggaguggaggcaucaagggaggauuuguucaucaaagaaugaaauccaagauuggaaggugguacucucgaacgaugucuaaaacugaaaggauggggaugggacuguaugucaaguaugauggagacccaugggcugacagugaugcccuagcuuuuaguggaguaaugguuucaaugaaagaaccugguugguauuccuuuggcuucgaaauaaaagauaagaaaugcgauguccccuguauugggauagagaugguacaugaugguggaaaagagacuuggcacucagcagcaacagccauuuacuguuuaaugggcucaggacagcugcugugggacacugucacagguguugacauggcucuguaa

SEQ ID NO: 62349 - RNA, 1401 nt, Artificial Sequence; identical to SEQ ID NO: 62326
  derived and/or modified CDS sequence (wt) from neuraminidase__InfluenzaB__AHZ37020

SEQ ID NO: 62350 - RNA, 1401 nt, Artificial Sequence; identical to SEQ ID NO: 62328
  derived and/or modified CDS sequence (wt) from neuraminidase__InfluenzaB__AHZ37031

SEQ ID NO: 62351 - RNA, 1401 nt, Artificial Sequence
  derived and/or modified CDS sequence (wt) from neuraminidase__InfluenzaB__AHZ37042
augcuaccuucaacuauacaaacguuaacccuauuucucacaucagggggaguauuauuaucacuauaugugucagcuucauuaucauacuuacuauauucggauauauuguuaaaauucucaccaacagaaauaacugcaccaacaaggccauuggauugugcaaacgcaucaaauguucaggcugugaaccguucugcaacaaaaggggugacacuucuucucccagaaccggaguggacauacccgcguuuaucuugcccgggcucaaccuuucagaaagcacuccuaauuagcccucauagauucggagaaaccaaaggaaacucagcucccuugauaauaagggaaccuuuuauugcuuguggaccaaaugaaugcaaacacuuugcucuaacccauuaugcagcccaaccagggggauacuacaauggaacaagaggagacagaaacaagcugaggcaucuaauuucagucaaauugggcaaaaucccaacaguagaaaacuccauuuuccacauggcagcauggagcggguccgcgugccaugaugguaaggaauggacauauaucggaguugauggcccugacaauaaugcauugcucaaaguaaaauauggagaagcauauacugacacauaccauuccuaugcaaacaaaauccuaagaacacaagaaagugccugcaauugcaucgggggaaauuguuaucuaaugauaacugauggcucagcuucagguguuagugaaugcagauuucuuaagauucgagagggccgaauaauaaaagaaauauuuccaacaggaagaguaaaacacacugaggaaugcacaugcggauuugccagcaauaaaaccauagaaugugccuguagagacaacagguacacagcaaaaagaccuuuugucaaauuaaacguggagacugauacagcagaaauaagauugaugugcacagauacuuauuuggacacccccagaccaaaugauggaagcauaacaggcccuugugaaucugauggggacaaagggaguggaggcaucaagggaggauuuguucaucaaagaaugaaauccaagauuggaaggugguacucucgaacgaugucuaaaacugaaaggauggggaugggacuguaugucaaguaugauggagacccaugggccgacagugaugcccuagcuuuuaguggaguaaugguuucaaugaaagaaccugguugguauuccuuuggcuucgaaauaaaagauaagaaaugcgauguccccuguauugggauagagaugguacaugaugguggaaaagagacuuggcacucagcagcaacagccauuuacuguuuaaugggcucaggacagcugcugugggacacugucacagguguugacauggcucuguaa

SEQ ID NO: 62352 - RNA, 1401 nt, Artificial Sequence; identical to SEQ ID NO: 62328
  derived and/or modified CDS sequence (wt) from neuraminidase__InfluenzaB__AHZ37064

SEQ ID NO: 62353 - RNA, 1401 nt, Artificial Sequence; identical to SEQ ID NO: 62326
  derived and/or modified CDS sequence (wt) from neuraminidase__InfluenzaB__AHZ37075

SEQ ID NO: 62354 - RNA, 1401 nt, Artificial Sequence; identical to SEQ ID NO: 62326
  derived and/or modified CDS sequence (wt) from neuraminidase__InfluenzaB__AHZ37086

SEQ ID NO: 62355 - RNA, 1401 nt, Artificial Sequence
  derived and/or modified CDS sequence (wt) from neuraminidase__InfluenzaB__AHZ37097
augcuaccuucaacuauacaaacguuaacccuauuucucaccucagggggaguauuauuaucacuauaugugucagcuucauuaucauacuuacuauauucggauauauugcuaaaauucucaccaacagaaauaacugcaccaacaaugccauuggauugugcaaacgcaucaaauguucaggcugugaaccguucugcaacaaaaggggugacacuucuucccccagaaccggaguggacauacccgcguuuaucuugcccgggcucaaccuuucagaaagcacuccuaauuagcccucauagauucggagaaaccaaaggaaacucagcucccuugauaauaagggaaccuuuuauugcuuguggaccaaaugaaugcaaacacuuugcucuaacccauuaugcagcccaaccagggggauacuacaauggaacaagaggagacagaaacaagcugaggcaucuaauuucagucaaauugggcaaaaucccaacaguagaaaacuccauuuuccacauggcagcauggagcggguccgcgugccaugaugguaaggaauggacauauaucggaguugauggcccugacaauaaugcauugcucaaaguaaaauauggagaagcauauacugacacauaccauuccuaugcaaacaaaauccuaagaacacaagaaagugccugcaauugcaucgggggaaauuguuaucuaaugauaacugauggcucagcuucagguguuagugaaugcagauuucuuaagauucgagagggccgaauaauaaaagaaauauuuccaacaggaagaguaaaacacacugaggaaugcacaugcggauuugccagcaauaaaaccauagaaugugccuguagagacaacagguacacagcaaaaagaccuuuugucaaauuaaacguggagacugauacagcagaaauaagauugaugugcacagauacuuauuuggacacccccagaccaaaugauggaagcauaacaggcccuugugaaucugauggggacaaagggaguggaggcaucaagggaggauuuguucaucaaagaaugaaauccaagauuggaaggugguacucucgaacgaugucuaaaacugaaaggauggggaugggacuguaugucaaguaugauggagacccaugggcugacagugaugcccuagcuuuuaguggaguaaugguuucaaugaaagaaccugguugguacuccuuuggcuucgaaaugaaagauaagaaaugcgauguccccuguauugggauagagaugguacaugaugguggaaaagagacuuggcacucagcagcaacagccauuuacuguuuaaugggcucaggacagcugcugugggacacugucacagguguugacauggcucuguaa

SEQ ID NO: 62356 - RNA, 1401 nt, Artificial Sequence; identical to SEQ ID NO: 62351
  derived and/or modified CDS sequence (wt) from neuraminidase__InfluenzaB__AHZ37108

SEQ ID NO: 62357 - RNA, 1401 nt, Artificial Sequence
  derived and/or modified CDS sequence (wt) from neuraminidase__InfluenzaB__AHZ41774
augcuaccuucaacuauacaaauguuaacccuauuucucacaucagggggaguacuauuaucacuauaugugucagcuucauuaucauacuuacuauauucggauauauugcuaaaauucucaccaacagaaauaacugcaccaacaaugccauuggauugugcaaacgcaucaaauguucaugcugugaaccguucugcaacaaaaggggugacauuucuucucccagaaccggaguggacauacccgcguuuaucuugcccgggcucaaccuuucagaaagcacuccuaauuagcccucauagauucggagaaaccaaaggaaacucagcucccuugauaauaagggaaccuuuuauugcuuguggaucaaaugaaugcagacacuuugcucuaacccauuaugcagcccaaccagggggauacuacaauggaacaagaggagacagaaacaagcugaggcaucuaauuucagucaaauugggcaaaaucccaacaguagaaaacuccauuuuccacauggcagcauggagcggguccgcaugccaugaugguaaggaauggacauauaucggaguugaugguccugacaauaaugcauugcucaaaauaaaauauggagaagcauauacugacacauaucauuccuaugcaaacaacauccuaagaacacaagaaagugccugcaauugcaucgggggaaauuguuaucuuaugauaacugauggcucagcuucagguguuagugaaugcagauuucuuaagauucgagagggccgaauaauaaaagaaauauuuccaacaggaagaguaaaacauacugaggagugcacaugcggauuugccagcaauaaaaccauagaaugugccuguagagauaacaguuacacagcaaaaagacccuuugucaaauuaaacguggaaacugauacagcagaaauaagauugaugugcacagauacuuauuuggacacccccagaccagaugauggaagcauaacaggcccuugugaaucuaauggggacaaagggaguggaggcaucaagggaggauuuguucaucaaagaauggcauccaagauugggaggugguacucucgaacgaugucuaaaacugaaagaaaggggaugggacuguaugucaaguaugauggagacccauggacugacaaugaugcccuugcuuuuaggggaguaaugguuucaaugaaagaaccugguugguacuccuuuggcuucgaaauaaaagauaagaaaugcgauguccccuguauugggauagagaugguacaugaugguggaaaagagacuuggcacucagcagcaacagccauuuacuguuuaaugggcucaggacagcugcugugggacacagucacaggugucgacauggcucuauaa

SEQ ID NO: 62358 - RNA, 1401 nt, Artificial Sequence; identical to SEQ ID NO: 62153
  derived and/or modified CDS sequence (wt) from neuraminidase__InfluenzaB__AHZ41785

SEQ ID NO: 62359 - RNA, 1401 nt, Artificial Sequence; identical to SEQ ID NO: 62150
  derived and/or modified CDS sequence (wt) from neuraminidase__InfluenzaB__AHZ41796

SEQ ID NO: 62360 - RNA, 1401 nt, Artificial Sequence
  derived and/or modified CDS sequence (wt) from neuraminidase__InfluenzaB__AHZ41807
augcuaccuucaacuauacaaauguuaacccuauuucucacaucagggggaguacuauuaucacuauaugugucagcuucauuaucauacuuacuauauucggauauauugcuaaaauucucaccaacagaaauaacugcaccaacaaugccauuggauugugcaaacgcaucaaauguucaugcugugaaccguucugcaacaaaaggggugacauuucuucucccagaaccggaguggacauacccgcguuuaucuugcccgggcucaaccuuucagaaagcacuccuaauuagcccucauagauucggagaaaccaaaggaaacucagcucccuugauaauaagggaaccuuuuauugcuuguggaccaaaugaaugcaaacacuuugcucuaacccauuaugcagcccaaccagggggauacuacaauggaacaagaggagacagaaacaagcugaggcaucuaauuucagucaaauugggcaaaaucccaacaguagaaaacuccauuuuccacauggcagcauggagcggguccgcaugccaugaugguaaggaauggacauauaucggaguugaugguccugacaauaaugcauugcucaaaauaaaauauggagaagcauauacugacacauaucauuccuaugcaaacaacauccuaagaacacaagaaagugccugcaauugcaucgagggaaauuguuaucuuaugauaacugauggcucagcuucagguguuagugaaugcagauuucuuaagauucgagagggccgaauaauaaaagaaauauuuccaacaggaagaguaaaacauacugaggagugcacaugcggauuugccagcaauaaaaccauagaaugugccuguagagauaacaguuacacagcaaaaagacccuuugucaaauuaaacguggaaacugauacagcagaaauaagauugaugugcacagauacuuauuuggacacccccagaccagaugauggaagcauaacaggcccuugugaaucuaauggggacaaagggaguggaggcaucaagggaggauuuguucaucaaagaauggcauccaagauugggaggugguacucucgaacgaugucuaaaacugaaaggaaggggaugggacuguaugucaaguaugauggagacccauggacugacagugaugcccuugcuuuuaggggaguaaugguuucaaugaaagaaccugguugguacuccuuuggcuucgaaauaaaagauaagaaaugcgauguccccuguauugggauagagaugguacaugaugguggaaaagagacuuggcacucagcagcgacagccauuuacuguuuaaugggcucaggacagcugcugugggacacagucacaggugucgacauggcucuauga

SEQ ID NO: 62361 - RNA, 1401 nt, Artificial Sequence
  derived and/or modified CDS sequence (wt) from neuraminidase__InfluenzaB__AHZ41818
augcuaccuucaacuauacaaacguuaacccuauuucucacaucagggggaguauuauuaucacuauaugugucagcuucauuaucauacuuacuauauucggauauauugcuaaaauucucaccaacagaaauaacugcaccaacaaugccauuggauugugcaaacgcaucaaauguucaggcugugaaccguucugcaacaaaaggggugacacuucuucucccagaaccggaguggacauacccgcguuuaucuugcccgggcucaaccuuucagaaagcacuccuaauuagcccucauagauucggagaaaccaaaggaaacucagcucccuugauaauaagggaaccuuuuauugcuuguggaccaaaugaaugcaaacacuuugcucuaacccauuaugcagcccaaccagggggauacuacaauggaacaagaggagacagaaacaagcugaggcaucuaauuucagucaaauugggcaaaaucccaacaguagaaaacuccauuuuccacauggcagcauggagcggguccgcgugccaugaugguaaggaauggacauauaucggaguugauggcccugacaauaaugcauugcucaaaguaaaauauggagaagcauauacugacacauaccauuccuaugcaaacaaaauccuaagaacacaagaaagugccugcaauugcaucgggggaaauuguuaucuuaugguaacugauggcucagcuucagguguuagugaaugcagauuucuuaagauucgagagggccgaauaauaaaagaaauauuuccaacaggaagaguaaaacacacugaggaaugcacaugcggauuugcuagcaauaaaaccauagaaugugccuguagagauaacaguuacaccgcaaaaagaccuuuugucaaauuaaacguggagacugauacagcagaaauaagauugaugugcacagauacuuauuuggacacccccagaccagaugauggaagcauaacaggcccuugugaaucuaauggggacaaaggaaguggaggcaucaagggaggauuuguucaucaaagaauggaauccaagauuggaaggugguacucucgaacgaugucuaaaacugaaaggaugggaaugggacuguaugucaaguaugauggagacccaugggcugacagugaugcccuaguuuuuaguggaguaaugguuucaaugaaagaaccugguugguacuccuuuggcuucgaaauaaaagauaagaaaugcgauguccccuguauugggauagagaugguacaugaugguggaaaagagacuuggcacucagcagcaacagccauuuacuguuuaaugggcucaggacagcugcugugggacacugucacagguguuaacauggcucuguaa

SEQ ID NO: 62362 - RNA, 1401 nt, Artificial Sequence; identical to SEQ ID NO: 62150
  derived and/or modified CDS sequence (wt) from neuraminidase__InfluenzaB__AHZ41829

SEQ ID NO: 62363 - RNA, 1401 nt, Artificial Sequence
  derived and/or modified CDS sequence (wt) from neuraminidase__InfluenzaB__AHZ41840
augcuaccuucaacuauacaaauguuaacccuauuucucacaucagggggaguacuauuaucacuauaugugucagcuucauuaucauacuuacuauauucggauauauugcuaaaauucucaccaacagaaauaacugcaccaacaaugccauuggauugugcaaacgcaucaaauguucaugcugugaaccguucugcaacaaaaggggugacauuucuucucccagaaccggaguggacauacccgcguuuaucuugcccgggcucaaccuuucagaaagcacuccuaauuagcccucauagauucggagaaaccaaaggaaacucagcucccuugauaauaagggaaccuuuuauugcuuguggaccaaaugaaugcagacacuuugcucuaacccauuaugcagcccaaccagggggauacuacaauggaacaagaggagacagaaacaagcugaggcaucuaauuucagucaaauugggcaaaaucccaacaguagaaaacuccauuuuccacauggcagcauggagcggguccgcaugccaugaugguaaggaauggacauauaucggaguugaugguccugacaauaaugcauugcucaaaauaaaauauggagaagcauauacugacacauaucauuccuaugcaaacaacauccuaagaacacaagaaagugccugcaauugcaucgggggaaauuguuaucuuaugauaacugauggcucagcuucagguguuagugaaugcagauuucuuaagauucgagagggccgaauaauaaaagaaauauuuccaacaggaagaguaaaacauacugaggagugcacaugcggauuugccagcaauaaaaccauagaaugugccuguagagauaacaguuacacagcaaaaagacccuuugucaaauuaaacguggaaacugauacagcagaaauaagauugaugugcacagauacuuauuuggacacccccagaccagaugauggaagcauaacaggcccuugugaaucuaauggggacaaagggaguggaggcaucaagggaggauuuguucaucaaagaauggcauccaagauugggaggugguacucucgaacgaugucuaaaacugaaagaaaggggaugggacuguaugucaaguaugauggagacccauggacugacagugaugcccuugcuuuuaggggaguaaugguuucaaugaaagaaccugguugguacuccuuuggcuucgaaauaaaagauaagaaaugcgauguccccuguauugggauagagaugguacaugaugguggaaaagagacuuggcacucagcagcaacagccauuuacuguuuaaugggcucaggacagcugcugugggacacagucacaggugucgacauggcucuauaa

SEQ ID NO: 62364 - RNA, 1401 nt, Artificial Sequence; identical to SEQ ID NO: 62175
  derived and/or modified CDS sequence (wt) from neuraminidase__InfluenzaB__AHZ41851

SEQ ID NO: 62365 - RNA, 1401 nt, Artificial Sequence; identical to SEQ ID NO: 62214
  derived and/or modified CDS sequence (wt) from neuraminidase__InfluenzaB__AHZ41862

SEQ ID NO: 62366 - RNA, 1401 nt, Artificial Sequence
  derived and/or modified CDS sequence (wt) from neuraminidase__InfluenzaB__AHZ41873
augcuaccuucaacuauacaaacguuaacccuauuucucacaucagggggaguauuauuaucacuauaugugucagcuucauuaucauacuuacuauauucggauauauugcuaaaauucucaccaacagaaauaacugcaccaacaaugccauuggauugugcaaacgcaucaaaugcucaggcugugaaccguucugcaacaaaaggggugacacuucuucucccagaaccggaguggacauacccgcguuuaucuugcccgggcucaaccuuucagaaagcacuccuaauuagcccucauagauucggagaaaccaaaggaaacucagcucccuugauaauaagggaaccuuuuauugcuuguggaccaaaugaaugcaaacacuuugcucugacccauuaugcagcccaaccaggaggauacuacaauggaacaagaggagacagaaacaagcugaggcaucuaauuucagucaaauugggcaaaaucccaacaguagaaaacuccauuuuccacauggcagcauggagcggguccgcgugccaugaugguaaggaauggacauauaucggaguugauggcccugacaauaaugcauugcucaaaguaaaauauggagaagcauauacugacacauaccauuccuaugcaaacaaaauccuaagaacacaagaaagugccugcaauugcaucgggggaaauuguuaucuaaugauaacugauggcucagcuucagguguuagugaaugcagauuucuuaagauucgagagggccgaauaauaaaagaaauauuuccaacaggaagaguaaaacacacugaggaaugcacaugcggauuugccagcaauaaaaccauagaaugugccuguagagacaacagguacacagcaaaaagaccuuuugucaaauuaaacguggagacugauacagcagaaauaagauugaugugcacagauacuuauuuggacacccccagaccaaaugauggaagcauaacaggcccuugugaaucugauggggacaaagggaguggaggcaucaagggaggauuuguucaucaaagaaugaaauccaagauuggaaggugguacucucgaacgaugucuaaaacugaaaggauggggaugggacuguaugucaaguaugauggagacccaugggcugacagugaugcccuaacuuuuaguggaguaaugguuucaaugaaagaaccugguugguacuccuuuggcuucgaaauaaaagauaagaaaugcgauguccccuguauugggauagagaugguacaugaugguggaaaagagacuuggcacucagcagcaacagccauuuacuguuuaaugggcucaggacagcugcugugggacacugucacagguguugacauggcucuguaa

SEQ ID NO: 62367 - RNA, 1401 nt, Artificial Sequence; identical to SEQ ID NO: 60804
  derived and/or modified CDS sequence (wt) from neuraminidase__InfluenzaB__AIL94981

SEQ ID NO: 62368 - RNA, 1401 nt, Artificial Sequence; identical to SEQ ID NO: 60804
  derived and/or modified CDS sequence (wt) from neuraminidase__InfluenzaB__AIL94992

SEQ ID NO: 62369 - RNA, 1401 nt, Artificial Sequence
  derived and/or modified CDS sequence (wt) from neuraminidase__InfluenzaB__AIL95003
augcuaccuucaacuauacaaacguuaaccuuauuucucacaucagggggaguguuauuaucacuauaugugucagcuucauugucauacuuacuauauucggauauauugcuaaaauuuucacgaacagaaauaacugcaccaauaaugccauuggauugugcaaacgcaucaaauguucaggcugugaaccguucugcaacaaaaggggugacacuucuucucccagaaccggaguggacguacccucguuuaucuugcccgggcucaaccuuucagaaagcacuccuaauuagcccccauagauucggagaaaccaagggaaacucagcucccuugauaauaagggaaccuuuuauugcuuguggaccaaaggaaugcaaacauuuugcucuaacccauuaugcagcucaaccagggggauacuacaauggaacaagagaagacagaaacaagcugaggcaucuaauuucagucaaauugggcaaaaucccaacaguagaaaacucuauuuuccacauggcagcuuggagcggguccgcaugccaugaugguagagaauggacuuauaucggaguugauggccccgacaguaaugcauugcucaaaauaaaauauggagaagcauauacugacacauaccauuccuaugcaaaaaacauccuaaggacacaagaaagugccugcaauugcaucgggggagauuguuaucuuaugauaacugauggcccagcuucagggauuagugaaugcagauuccuuaagauucgagagggccgaauaauaaaagaaauauuuccaacaggaagaguaaaacauacugaggaaugcacaugcggauuugccagcaacaaaaccauagaaugugccuguagagauaacaguuacacagcaaaaagacccuuugucaaauuaaauguggagacugauacagcggaaauaagauugaugugcacagagacuuauuuggacacccccagaccaaaugauggaagcauaacagggccuugcgaaucuaauggggacaaagggaguggaggcaucaagggaggauuuguucaccaaagaauggcauccaagauuggaaggugguacucucgaacgaugucuaaaacuaaaagaauggggaugggacuguauguaaaguaugauggagacccauggacugacagugaagcccuugcucuuaguggaguaaugguuucaauggaagaaccugguugguauuccuuuggcuucgaaauaaaagauaagaaaugugauguccccuguauugggauagaaaugguacaugauggugggaaaacaacuuggcacucagcagcaacagccauuuacuguuuaaugggcucaggacaacugcugugggacacugucacagguguuaauaugacucuguaa

SEQ ID NO: 62370 - RNA, 1401 nt, Artificial Sequence
  derived and/or modified CDS sequence (wt) from neuraminidase__InfluenzaB__AIL95014
augcuaccuucaacuauacaaacguuaacccuauuucucacaucagggggaguguuauuaucacuauaugugucagcuucauugucauacuuacuauauucggauauauugcuaaaauuuucacaaacagaaauaacugcaccaauaaugccauuggauugugcaaacgcaucaaauguucaggcugugaaccguucugcagcaaaaggggugacacuucuucucccagaaccggaguggacauacccucguuuaucuugcccgggcucaaccuuucagaaagcacuccuaauuagcccccauagauucggagaaaccaaaggaaacucagcucccuugauaauaagggaaccuuuuauugcuuguggaccaacggaaugcaaacacuuugcucuaacccauuaugcagcucaaccagggggauacuacaauggaacaagagaagacagaaacaagcugaggcaucuaauuucagucaaauugggcaaaaucccaacaguagaaaacuccauuuuccauauggcagcuuggagcggguccgcaugccaugaugguaaagaauggacauauaucggaguugauggccccgacaguaaugcauuacucaaaauaaaauauggagaagcauauacugacacauaccauuccuaugcaaaaaacauccuaaggacacaagaaagugccugcaauugcaucgggggagauuguuaucuuaugauaacugauggcccagcuucagggguuagugaaugcagauuccuuaagauucgagagggccgaauaauaaaagaaauauuuccaacaggaagaguaaaacauacugaggaaugcacaugcggauuugccagcaacaaaaccauagaaugugcuuguagagauaacaguuacacagcaaaaagacccuuugucaaauuaaauguggagacugauacagcggaaauaagauugaugugcacagagacuuauuuggacacccccagaccaaaugauggaagcauaacagggccuugcgaaucugauggggacaaagggaguggaggcaucaagggaggauuuguccaucaaagaauggcauccaagauuggaaggugguacucucgaacgaugucuaaaacuaaaagaauggggaugggacuguauguaaaguaugauggagacccauggacugacagugaagcccuugcucuuaguggaguaaugguuucgauggaagaaccugguugguauuccuuuggcuucgaaauaaaagauaagaaaugugauguccccuguauugggauagaaaugguacaugauggugggaaaacgacuuggcacucagcagcaacagccauuuacuguuuaaugggcucaggacaacugcugugggacacugucacagguguugauaugacucuguaa

SEQ ID NO: 62371 - RNA, 1401 nt, Artificial Sequence; identical to SEQ ID NO: 61080
  derived and/or modified CDS sequence (wt) from neuraminidase__InfluenzaB__AIL95025

SEQ ID NO: 62372 - RNA, 1401 nt, Artificial Sequence
  derived and/or modified CDS sequence (wt) from neuraminidase__InfluenzaB__AIL95036
augcuaucuucaacuauacaaacguuaacccuauuucucacaucagggggaguauuauuaucacuauaugugucagcuucauuaucauacuuacuauauucggauauauugcuaaaauucucaccaaaagaaauaacugcaccaacaaugccauuggauugugcaaacgcaucaaauguucaggcugugaaccauucugcaacaaaaggggugacacuucuucucccagaaccggaguggacauacccgcguuuaucuugcccgggcucaaccuuucagaaagcacuccuaauuagcccucauagauucggagaaaccaaaggaaacucagcucccuugauaauaagggaaccuuuuauugcuugcggaccaaaugaaugcaaacacuuugcucuaacccacuaugcagcccaaccagggggauacuacaauggaacaagaggagacagaaacaagcugaggcaucuaauuucagucaaauugggcaaaaucccaacaguagaaaacuccauuuuccacauggcagcauggagcggguccgcgugccaugaugguaaggaauggacauauaucggaguugauggcccugacaauaaugcauugcucaaaguaaaauauggagaagcauauacugacacauaccauuccuaugcaaacaaaauccuaagaacacaagaaagugccugcaauugcaucgggggaaauuguuaucuuaugauaacugauggcucagcuucagguguuagugaaugcagauuucuuaagauucgagagggccgaauaauaaaagaaauauuuccaacgggaagaguaaaacacacugaggaaugcacaugcggauuugccagcaauaaaaccauagaaugugccuguagagauaacaguuacacagcaaaaagaccuuuugucaaauuaaacguggagacugauacagcagaaauaagacugaugugcacagauacuuauuuggacacccccagaccagaugauggaagcauaacaggcccuugugaaucuaauggggacaaagggaguggaggcaucaagggaggauuuguucaucaaagaauggaauccaagauuggaaggugguacucucgaacgaugucuaaaacugaaaggauggggaugggacuguaugucaaguaugauggagacccaugggcugacagugaugcccuagcuuuuaguggaguaaugguuucaaugaaagaaccugguugguacuccuuuggcuucgaaauaaaagauaagaaaugcgauguccccuguauugggauagagauggugcaugaugguggaaaagagacuuggcacucagcagcaacagccauuuacuguuuaaugggcucaggacagcugcugugggacacugucacagguguugacauggcucuguaa

SEQ ID NO: 62373 - RNA, 1401 nt, Artificial Sequence; identical to SEQ ID NO: 61080
  derived and/or modified CDS sequence (wt) from neuraminidase__InfluenzaB__AIL95047

SEQ ID NO: 62374 - RNA, 1401 nt, Artificial Sequence; identical to SEQ ID NO: 60938
  derived and/or modified CDS sequence (wt) from neuraminidase__InfluenzaB__AIL95058

SEQ ID NO: 62375 - RNA, 1401 nt, Artificial Sequence; identical to SEQ ID NO: 60888
  derived and/or modified CDS sequence (wt) from neuraminidase__InfluenzaB__AIL95069

SEQ ID NO: 62376 - RNA, 1401 nt, Artificial Sequence
  derived and/or modified CDS sequence (wt) from neuraminidase__InfluenzaB__AIL95080
augcuaccuucaacuauacaaacguuaacccuauuucucacaucagggggaguauuauuaucacuauaugugucagcuucauuaucauacuuacuauauucggauauauugcuaaaauucucaccaaaagaaauaacugcaccaacaaugccauuggauugugcaaacgcaucaaauguucaggcugugaaccauucugcaacaaaaggggugacacuucuucucccagaaccggaguggacauacccgcguuuaucuugcccgggcucaaccuuucagaaagcacuccuaauuagcccucauagauucggagaaaccaaaggaaacucagcucccuugauaauaagggaaccuuuuauugcuugcggaccaaaugaaugcaaacacuuugcucuaacccauuaugcagcccaaccagggggauacuacaauggaacaagaggagacagaaacaagcugaggcaucuaauuucagucaaauugggcaaaaucccaacaguagaaaacuccauuuuccacauggcagcauggagcggguccgcgugcaaugaugguaaggaauggacauauaucggaguugauggcccugacaauaaugcauugcucaaaguaaaauauggagaagcauauacugacacauaccauuccuaugcaaacaaaauccuaagaacacaagaaagugccugcaauugcaucgggggaaauuguuaucuuaugauaacugauggcucagcuucagguguuagugaaugcagauuucuuaagauucgagagggccgaauaauaaaagaaauauuuccaacgggaagaguaaaacacacugaggaaugcacaugcggauuugccagcaauaaaaccauagaaugugccuguagagauaacaguuacacagcaaaaagaccuuuugucaaauuaaacguggagacugauacagcagaaauaagacugaugugcacagauacuuauuuggacacccccagaccagaugauggaagcauaacaggcccuugugaaucuaauggggacaaagggaguggaggcaucaagggaggauuuguucaucaaagaauggaauccaagauuggaaggugguacucucgaacgaugucuaaaacugaaaggauggggaugggacuguaugucaaguaugauggagacccaugggcugacagugaugcccuagcuuuuaguggaguaaugguuucaaugaaagaaccugguugguacuccuuuggcuucgaaauaaaagauaagaaaugcgauguccccuguauugggauagagauggugcaugaugguggaaaagagacuuggcacucagcagcaacagccauuuacuguuuaaugggcucaggacagcugcugugggacacugucacagguguugacauggcucuguaa

SEQ ID NO: 62377 - RNA, 1401 nt, Artificial Sequence; identical to SEQ ID NO: 60888
  derived and/or modified CDS sequence (wt) from neuraminidase__InfluenzaB__AIL95091

SEQ ID NO: 62378 - RNA, 1401 nt, Artificial Sequence
  derived and/or modified CDS sequence (wt) from neuraminidase__InfluenzaB__AIL95102
augcuaccuucaacuauacaaacguuaaccuuauuucucacaucagggggaguguuauuaucacuauaugugucagcuucauugucauacuuacuauauucggauauauugcuaaaauuuucacgaacagaaauaacugcaccaauaaugccauuggauugugcaaacgcaucaaauguucaggcugugaaccguucugcaacaaaaggggugacacuucuucucccagaaccggaguggacguacccucguuuauccugcccgggcucaaccuuucagaaagcacuccuaauuagcccccauagauucggagaaaccaagggaaacucagcucccuugauaauaagggaaccuuuuauugcuuguggaccaaaggaaugcaaacauuuugcucuaacccauuaugcagcucaaccagggggauacuacaauggaacaagagaagacagaaacaagcugaggcaucuaauuucagucaaauugggcaaaaucccaacaguagaaaacucuauuuuccacauggcagcuuggagcggguccgcaugccaugaugguagagaauggacuuauaucggaguugauggccccgacaguaaugcauugcucaaaauaaaauauggagaagcauauacugacacauaccauuccuaugcaaaaaacauccuaaggacacaagaaagugccugcaauugcaucgggggagauuguuaucuuaugauaacugauggcccagcuucagggauuagugaaugcagauuccuuaagauucgagagggccgaauaauaaaagaaauauuuccaacaggaagaguaaaacauacugaggaaugcacaugcggauuugccagcaacaaaaccauagaaugugccuguagagauaacaguuacacagcaaaaagacccuuugucaaauuaaauguggagacugauacagcggaaauaagauugaugugcacagagacuuauuuggacacccccagaccaaaugauggaagcauaacagggccuugcgaaucuaauggggacaaagggaguggaggcaucaagggaggauuuguucaccaaagaauggcauccaagauuggaaggugguacucucgaacgaugucuaaaacuaaaagaauggggaugggacuguauguaaaguaugauggagacccauggacugacagugaagcccuugcucuuaguggaguaaugguuucaauggaagaaccugguugguauuccuuuggcuucgaaauaaaagauaagaaaugugauguccccuguauugggauagaaaugguacaugauggugggaaaacgacuuggcacucagcagcaacagccauuuacuguuuaaugggcucaggacaacugcugugggacacugucacagguguuaauaugacucuguaa

SEQ ID NO: 62379 - RNA, 1401 nt, Artificial Sequence
  derived and/or modified CDS sequence (wt) from neuraminidase__InfluenzaB__AIL95113
augcuaccuucaacuauacaaacguuaacccuauuucucacaucagggggaguauuauuaucacuauaugugucagcuucauuaucauacuuacuauauucggauauauugcuaaaauucucaccaacaggaauaacugcaccaacaaugccauuggauugugcaaacgcaucaaauguucaggcugugaaccguucugcaacaaaaggggugacacuucuucccccagaaccggaguggacauacccgcguuuaucuugcccgggcucaaccuuucagaaagcacuccuaauuagcccucauagauucggagaaaccaaaggaaacucagcucccuugauaauaagggaaccuuuuauugcuuguggaccaaaugaaugcaaacacuuugcucuaacccauuaugcagcccaaccagggggauacuacaauggaacaagaggagacagaaacaagcugaggcaucuaauuucagucaaauugggcaaaaucccaacaguagaaaacuccauuuuccacauggcagcauggagcggguccgcgugccaugaugguaaggaauggacauauaucggaguugauggcccugacaauaaugcauugcucaaaguaaaauauggagaagcauauacugacacauaccauuccuaugcaaacaaaauccuaagaacacaagaaagugccugcaauugcaucgggggaaauuguuaucuaaugauaacugauggcucagcuucagguguuagugaaugcagauuucuuaagauucgagagggccgaauaauaaaagaaauauuuccaacaggaagaguaaaacacacugaggaaugcacaugcggauuugccagcaauaaaaccauagaaugugccuguagagacaacagguacacagcaaaaagaccuuuugucaaauuaaacguggagacugauacagcagaaauaagauugaugugcacagauacuuauuuggacacccccagaccaaaugauggaagcauaacaggcccuugugaaucugauggggacaaagggaguggaggcaucaagggaggauuuguucaucaaagaaugaaauccaagauuggaaggugguacucucgaacgaugucuaaaacugaaaggauggggaugggacuguaugucaaguaugauggagacccaugggcugacagugaugcccuagcuuuuaguggaguaaugguuucaaugaaagaaccugguugguacuccuuuggcuucgaaaugaaagauaagaaaugcgauguccccuguauugggauagagaugguacaugaugguggaaaagagacuuggcacucagcagcaacagccauuuacuguuuaaugggcucaggacagcugcugugggacacugucacagguguugacauggcucuguaa

SEQ ID NO: 62380 - RNA, 1401 nt, Artificial Sequence; identical to SEQ ID NO: 62326
  derived and/or modified CDS sequence (wt) from neuraminidase__InfluenzaB__AIL95124

SEQ ID NO: 62381 - RNA, 1401 nt, Artificial Sequence
  derived and/or modified CDS sequence (wt) from neuraminidase__InfluenzaB__AKA54777
augcuaccuucaacuauacaaacguuaaccuuauuucucacaucagggggaguguuauuaucacuauaugugucagcuucauugucauacuuacuauauucggauauauugcuaaaauuuucacgaacagaaguaacugcaccaauaaugccauuggauugugcaaacgcaucaaauguucaggcugugaaccguucugcaacaaaaggggugacaccucuucucccagaaccggaguggacguacccucguuuaucuugcccgggcucaaccuuucagaaagcacuccuaauuagcccccauagauucggagaaaccaaaggaaacucagcucccuugauaauaagggaaccuuuuauugcuuguggaccaaaggaaugcaaacauuuugcucuaacccauuaugcagcucaaccagggggauacuacaauggaacaagagaagacagaaacaagcugaggcaucuaauuucagucaaauugggcaaaaucccaacaguagaaaacucuauuuuccacauggcagcuuggagcggguccgcaugccaugaugguagagaauggacuuacaucggaguugauggcccagacaguaaugcauugcucaaaauaaaauauggagaagcauauacugacacauaccauuccuaugcaaaaaacauccuaaggacacaagaaagugccugcaauugcaucgggggagauuguuaucugaugauaacugauggcccagcuucagggauuagugaaugcagauuccuuaagauucgagagggccgaauaauaaaagaaauauuuccaacaggaagaguaaaacauacugaggaaugcacaugcggauuugccagcaacaaaaccauagaaugugccuguagagauaacaguuacacagcaaaaagacccuuugucaaauuaaauguggagacugauacagcggaaauaagauugaugugcacaaagacuuauuuggacacccccagaccaaaugauggaagcauaacagggccuugcgaaucugauggggacgaagggaguggaggcaucaagggaggauuuguucaccaaagaauggcauccaagacuggaaggugguacucucggacgaugucuaaaacuaaaagaauggggaugggacuguauguaaaguaugauggagacccauggacugacagugaagcccuugcucuuaguggaguaaugguuucaauggaagaaccugguugguauuccuuuggcuucgaaauaaaagauaagaaaugugauguccccuguauugggauagaaaugguacaugauggugggaaaacgacuuggcacucagcggcaacagccauuuacuguuuaaugggcucaggacaacugcugugggacacugucacagguguuaauaugacucuguaa

SEQ ID NO: 62382 - RNA, 1401 nt, Artificial Sequence
  derived and/or modified CDS sequence (wt) from neuraminidase__InfluenzaB__AKA54781
augcuacccucaacuauacaaacguuaacccuauuucucacaucagggggaguauuauuaucacuauaugugucagcuucauugucauacuuacuauauuuggauauauugcuaaaauucccaucaacagaaauuacugcaccaacaaugccauuagauugugcaaacgcaucaaauguucaggcugugaaccguucugcaacaaaaggggugacauuucuucucccagaaccggaguggacauacccgcguuuaucuugcccgggcucaaccuuucagaaagcacuccuaauuagcccucauagauucggagaaaccaaaggaaacucagcucccuugauaauaagggaaccuuuuauugcuuguggaccaaaggaaugcaaacauuuugcucuaacccacuaugcagcccaaccagggggauacuacaauggaacaagaggagacagaaacaagcugaggcaucuaauuucagucaaauugggcaaaaucccaacaguagaaaacuccauuuuccacauggcagcauggagcggguccgcaugucaugaugguaaggaauggacauauaucggaguugauggcccugacaauaaugcauugcucaaaauaaaauauggggaagcauauacugacacauaccauuccuaugcaaauaacauccuaagaacacaagaaagugccugcaauugcaucggaggaaauuguuaucuuaugauaacugauggcucagcuucagguguuagugaaugcagauuucuuaagauucgagagggccgaauaaugaaagaaauauuuccaacaggaagaacacaacauacugaagaaugcacaugcggauuugcuagcaauaaaaccauagaaugugucuguagagauaacaguuacacagcaaaaagacccuuugucaaauuaaacguggagacugauacagcagaaauaagauugaugugcacaaagacuuauuuggacacccccagaccagaugauggaagcauaacagggccuugugaaucuaauggaggcaaagggaguggaggcaucaagggaggauuuguccaucaaagaauggcauccaagauuggaaggugguacucucgaacgaugucuaaaacugaaaggaaggggauggggcuguaugucaaguauaauggagacccaugggcugacagugaugcccuuacuuuuaguggaguaaugguuucaauggaagaaccugguugguacuccuuuggcuucgaaauaaaagacaagaaaugugauguccccuguauugggauagagaugguacaugaugguggaaaagagacuuggcacucagcagcuacagccauuuacuguuuaaugggcucaggacagcugcugugggacacugucacagguguuaauaugacucuguaa

SEQ ID NO: 62383 - RNA, 1401 nt, Artificial Sequence
  derived and/or modified CDS sequence (wt) from neuraminidase__InfluenzaB__AKA54783
augcuaccuucaacuauacaaacguuaaccuuauuucucacaucagggggaguguuauuaucacuauaugugucagcuucauugucauacuuacuauauucggauauauugcuaaaguuuucacgaacagaaguaacugcaccaauaaugccauuggauugugcaaacgcaucaaauguucaggcugugaaccguucugcaacaaaaggggugacaccucuuuucccagaaccggaguggacguacccucguuuaucuugcccgggcucaaccuuucagaaagcacuccuaauuagcccccauagauucggagaaaccaaaggaaacucagcucccuugauaauaagggaaccuuuuauugcuuguggaccaaaggaaugcaaacauuuugcucuaacccauuaugcagcucaaccagggggauacuacaauggaacaagagaagacagaaacaagcugaggcaucuaauuucagucaaauugggcaaaaucccaacaguagaaaacucuauuuuccacauggcagcuuggagcggguccgcaugccaugaugguagagaauggacuuacaucggaguugauggcccagacaguaaugcauugcucaaaauaaaauauggagaagcauauacugacacauaccauuccuaugcaaaaaacauccuaaggacacaagaaagugccugcaauugcaucgggggagauuguuaucugaugauaacugauggcccagcuucagggauuagugaaugcagauuccuuaagauucgagagggccgaauaauaaaagaaauauuuccaacaggaagaguaaaacauacugaggaaugcacaugcggauuugccagcaacaaaaccauagaaugugccuguagagauaacaguuacacagcaaaaagacccuuugucaaauuaaauguggagacugauacagcggaaauaagauugaugugcacaaagacuuauuuggacacccccagaccaaaugauggaagcauaacagggccuugcgaaucugauggggacgaagggaguggaggcaucaagggaggauuuguucaccaaagaauggcauccaagauuggaaggugguacucucggacgaugucuaaaacuaaaagaauggggaugggacuguauguaaaguaugauggagacccauggacugacagugaagcccuugcucuuaguggaguaaugguuucaauggaagaaccugguugguauuccuuuggcuucgaaauaaaagauaagaaaugugauguccccuguauugggauagaaaugguacaugauggugggaaaacgacuuggcacucagcggcaacagccauuuacuguuuaaugggcucaggacaacugcugugggacacugucacagguguuaauaugacucuguaa

SEQ ID NO: 62384 - RNA, 1401 nt, Artificial Sequence
  derived and/or modified CDS sequence (wt) from neuraminidase__InfluenzaB__AKA54785
augcuaccuucaacuauacaaacguuaaccuuauuucucacaucagggggaguguuauuaucacuauaugugucagcuucauugucauacuuacuauauucggauauauugcuaaaauuuucacgaacagaaguaacugcaccaauaaugccauuggauugugcaaacgcaucaaauguucaggcugugaaccguucugcaacaaaaggggugacaccucuucucccagaaccggaguggacguacccucguuuaucuugcccgggcucaaccuuucagaaagcacuccuaauuagcccccauagauucggagaaaccaaaggaaacucagcucccuugauaauaagggaaccuuuuauugcuuguggaccaaaggaaugcaaacauuuugcucuaacccauuaugcagcucaaccagggggauacuacaaugggacaagagaagacagaaacaagcugaggcaucuaauuucagucaaauugggcaaaaucccaacaguagaaaacucuauuuuccacauggcagcuuggagcggguccgcaugccaugaugguagagaguggacuuacaucggaguugauggcccagacaguaaugcauugcucaaaauaaaauauggagaagcauauacugacacauaccauuccuaugcaaaaaacauccuaaggacacaagaaagugccugcaauugcaucgggggagauuguuaucugaugauaacugauggcccagcuucagggauuagugaaugcagauuccuuaagauucgagagggccgaauaauaaaagaaauauuuccaacaggaagaguaaaacauacugaggaaugcacaugcggauuugccagcaacaaaaccauagaaugugccuguagagauaacaguuacacagcaaaaagacccuuugucaaauuaaauguggagacugauacagcggaaauaagauugaugugcacaaagacuuauuuggacacccccagaccaaaugauggaagcauaacagggccuugcgaaucugaugggaacgaagggaguggaggcaucaagggaggauuuguucaccaaagaauggcauccaagauuggaaggugguacucucggacgaugucuaaaacuaaaagaauggggaugggacuguauguaaaguaugauggagacccauggacugacagugaagcccuugcucuuaguggaguaaugguuucaauggaagaaccugguugguauuccuuuggcuucgaaauaaaagauaaaaaaugugauguccccuguauugggauagaaaugguacaugauggugggaaaacgacuuggcacucagcggcaacagccauuuacuguuuaaugggcucaggacaacugcugugggacacugucacagguguuaauaugacucuguaa

SEQ ID NO: 62385 - RNA, 1401 nt, Artificial Sequence
  derived and/or modified CDS sequence (wt) from neuraminidase__InfluenzaB__AKA54787
augcuaccuucaacuauacaaacguuaacccuauuucucacaucagggggaguguuauuaucacuauaugugucagcuucauugucauacuuacuauauucggauauauugcuaaaauuuucacagacagaaauaacugcaccaauaaugccauuggauugugcaaacgcaucaaauguucaggcugugaaucauucugcagcaaaaggggugacacuucuucucccagaaccggaguggacauacccucguuuaucuugcccgggcucaaccuuucagaaagcacuccuaauuagcccccauagauucggagaaaucaaaggaaacucagcucccuugauaauaagggaaccuuuuauugcuuguggaccaacggaaugcaaacacuuugcucuaacccauuaugcagcucaaccagggggauacuacaauggaacaagagaagacagaaacaagcugaggcaucuaauuucagucaaauugggcaaaaucccaacaguagaaaacuccauuuuccacauggcagcuuggagcggguccgcaugccaugaugguaaagaauggacauauaucggaguugauggccccgacaguaaugcauugcucaaaauaaaauauggagaagcauauacugacacguaccauuccuaugcaaaaaacauccuaaggacacaagaaagugccugcaauugcaucgggggagauuguuaucuuaugauaacugauggcccagcuucagggguuagugaaugcagauuccuuaagauucgagagggcagaauaauaaaagaaauauuuccaacaggaagaguaaaacauacugaggaaugcacaugcggauuugccagcaacaaaaccauagaaugugcuuguagagauaaccguuacacagcaaaaagacccuuugucaaauuaaauguggagacugauacagcggaaauaagguugaugugcacagagacuuauuuggacacccccagaccaaaugauggaagcauaacagggccuugcgaaucugauggggacaaagggaguggaggcaucaagggaggauuuguucaucaaagaauggcauccaagauuggaagaugguacucucgaacgaugucuaaaaccaaaagaauggggaugggacuguauguaaaguaugauggagacccauggacugacagugaagcccuugcucuuaguggaguaaugguuucaauggaagaaccugguugguauuccuuuggcuucgaaauaaaagauaagaaaugugauguccccuguauugggauagaaaugguacaugauggugggaaaacgacuuggcacucagcagcaacagccauuuauuguuuaaugggcucaggacaauugcugugggacacugucacagguguugauauggcucuguaa

SEQ ID NO: 62386 - RNA, 1401 nt, Artificial Sequence
  derived and/or modified CDS sequence (wt) from neuraminidase__InfluenzaB__AKA54789
augcuaccuucaacuauacaaacguuaaccuuauuucucacaucagggggaguguuauuaucacuauaugugucagcuucauugucauacuuacuauauucggauauauugcuaaaauuuucacgaacagaaguaacugcaccaauaaugccauuggauugugcaaacgcaucaaauguucaggcugugaaccguucugcaacaaaaggggugacaccucuucucccagaaccggaguggacguacccucguuuaucuugcccgggcucaaccuuucagaaagcacuccuaauuagcccccauagauucggagaaaccaaaggaaacucagcucccuugauaauaagggaaccuuuuauugcuuguggaccaaaggaaugcaaacauuuugcucuaacccauuaugcagcucaaccagggggauauuacaauggaacaagagaagacagaaacaagcugaggcaucuaauuucagucaaauugggcaaaaucccaacaguagaaaacucuauuuuccacauggcagcuuggagcggguccgcaugccaugaugguagagaauggacuuacaucggaguugauggcccagacaguaaugcauugcucaaaauaaaauauggagaagcauauacugacacauaccauuccuaugcaaaaaacauccuaaggacacaagaaagugccugcaauugcaucgggggagauuguuaucugaugauaacugauggcccagcuucagggauuagugaaugcagauuccuuaagauucgagagggcagaauaauaaaagaaauauuuccaacaggaagaguaaaacauacugaggaaugcacaugcggauuugccagcaacaaaaccauagaaugugccuguagagauaacaguuacacagcaaaaagacccuuugucaaauuaaauguggagacugauacagcggaaauaagauugaugugcacaaagacuuauuuggacacccccagaccaaaugauggaagcauaacagggccuugcgaaucugauggggacgaagggaguggaggcaucaagggaggauuuguucaccaaagaauggcauccaagauuggaaggugguacucucggacgaugucuaaaacuaaaagaauggggaugggacuguauguaaaguaugauggagacccauggacugacagugaagcccuugcucuuaguggaguaaugguuucaauggaagaaccugguugguauuccuuuggcuucgaaauaaaagauaagaaaugugauguccccuguauugggauagaaaugguacaugauggugggaaaacgacuuggcacucagcggcaacagccauuuacuguuuaaugggcucaggacaacugcugugggacacugucacagguguuaauaugacucuguaa

SEQ ID NO: 62387 - RNA, 1401 nt, Artificial Sequence
  derived and/or modified CDS sequence (wt) from neuraminidase__InfluenzaB__AKA54791
augcuaccuucaacuauacaaacguuaaccuuauuucucacaucagggggaguguuauuaucacuauaugugucagcuucauugucauacuuacuauauucggauauauugcuaaaauuuucacgaacagaaguaacugcaccaauaaugccauuggauugugcaaacgcaucaaaugcucaggcugugaaccguucugcaacaaaaggggugacaccucuucucccagaaccggaguggacguacccucguuuaucuugcccgggcucaaccuuucagaaagcacuccuaauuagcccccauagauucggagaaaccaaaggaaacucagcucccuugauaauaagggaaccuuuuauugcuuguggaccaaaggaaugcaaacauuuugcucuaacccauuaugcagcucaaccagggggauacuacaauggaacaagagaagacagaaacaagcugaggcaucuaauuucagucaaauugggcaaaaucccaacaguagaaaacucuauuuuccacauggcagcuuggagcggguccgcaugccaugaugguagagaauggacuuacaucggaguugauggcccagacaguaaugcauugcucaaaauaaaauauggagaagcauauacugacacauaccauuccuaugcaaaaaacauccuaaggacacaagaaagugccugcaauugcaucgggggagauuguuaucugaugauaacugauggcccagcuucagggauuagugaaugcagauuccuuaagauucgagagggccgaauaauaaaagaaauauuuccaacaggaagaguaaaacauacugaggaaugcacaugcggauuugccagcaacaaaaccauagaaugugccuguagagauaacaguuacacagcaaaaagacccuuugucaaauuaaauguggagacugauacagcggaaauaagauugaugugcacaaagacuuauuuggacacccccagaccaaaugaugggagcauaacagggccuugcgaaucugauggggacgaagggaguggaggcaucaagggaggauuuguucaccaaagaauggcauccaagauuggaaggugguacucucggacgaugucuaaaacuaaaagaauggggaugggacuguauguaaaguaugauggagacccauggacugacagugaagcccuugcucuuaguggaguaaugguuucaauggaagaaccugguugguauuccuuuggcuucgaaauaaaagauaagaaaugugauguccccuguauugggauagaaaugguacaugauggugggaaaacgacuuggcacucagcagcaacagccauuuacuguuuaaugggcucaggacaacugcugugggacacugucacagguguuaauauaacucuguaa

SEQ ID NO: 62388 - RNA, 1401 nt, Artificial Sequence; identical to SEQ ID NO: 62385
  derived and/or modified CDS sequence (wt) from neuraminidase__InfluenzaB__AKA54793

SEQ ID NO: 62389 - RNA, 1401 nt, Artificial Sequence; identical to SEQ ID NO: 62385
  derived and/or modified CDS sequence (wt) from neuraminidase__InfluenzaB__AKA54795

SEQ ID NO: 62390 - RNA, 1401 nt, Artificial Sequence
  derived and/or modified CDS sequence (wt) from neuraminidase__InfluenzaB__AKA54797
augcuacccucaacuauacaaacguuaaccuuauuucucacaucagggggaguguuauuaucacuauaugugucagcuucauugucauacuuacuauauucggauauauugcuaaaauuuucacgaacagaaguaacugcaccaauaaugccauuggauugugcaaacgcaucaaauguucaggcugugaaccguucugcaacaaaaggggugacaccucuucucccagaaccggaguggacguacccucguuuaucuugcccaggcucaaccuuucagaaagcacuccuaauuagcccccauagauucggagaaaccaaaggaaacucagcucccuugauaauaagggaaccuuuuauugcuuguggaccaaaggaaugcaaacauuuugcucuaacccauuaugcagcucaaccagggggauacuacaauggaacaagagaagacagaaacaagcugaggcaucuaauuucagucaaauugggcaaaaucccaacaguagaaaacucuauuuuccacauggcagcuuggagcggguccgcaugccaugaugguagagaauggacuuacaucggaguugauggcccagacaguaaugcauugcucaaaauaaaauauggagaagcauauacugacacauaccauuccuaugcaaaaaacauccuaaggacacaagaaagugccugcaauugcaucgggggagauuguuaucugaugauaacugauggcccagcuucagggauuagugaaugcagauuccuuaagauucgggagggccgaauaauaaaagaaauauuuccaacaggaagaguaaaacauacugaggaaugcacaugcggauuugccagcaacaaaaccauagaaugugccuguagagauaacaguuacacagcaaaaagacccuuugucaaauuaaauguggagacugauacagcggaaauaagauugaugugcacaaagacuuauuuggacacccccagaccaaaugauggaagcauaacagggccuugcgaaucugauggggacgaagggaguggaggcaucaagggaggauuuguucaccaaagaauggcauccaagauuggaaggugguacucucggacgaugucuaaaacuaaaagaauggggaugggacuguauguaaaguaugauggagacccauggacugacagugaagcccuugcucuuaguggaguaaugguuucaauggaagaaccugguugguauuccuuuggcuucgaaauaaaagauaagaaaugugauguccccuguauugggauagaaaugguacaugauggugggaaaacgacuuggcacucagcggcaacagccauuuacuguuuaaugggcucaggacaacugcugugggacacugucacagguguuaauaugacucuguaa

SEQ ID NO: 62391 - RNA, 1401 nt, Artificial Sequence
  derived and/or modified CDS sequence (wt) from neuraminidase__InfluenzaB__AKA54799
augcuaccuucaacuauacaaacguuaacccuauuucucacaucagggggaguguuauuaucacuauaugugucagcuucauugucauacuuacuauauucggauauauugcuaaaauuuucacagacagaaauaacugcaccaauaaugccauuggauugugcaaacgcaucaaauguucaggcugugaaucauucugcagcaaaaggggugacacuucuucucccagaaccggaguggacauacccucguuuaucuugcccgggcucaaccuuucagaaagcacuccuaauuagcccccauagauucggagaaaucaaaggaaacucagcucccuugauaauaagggaaccuuuuauugcuuguggaccaacggaaugcaaacacuuugcucuaacccauuaugcagcucaaccagggggauacuacaauggaacaagagaagacagaaacaagcugaggcaucuaauuucagucaaauugggcaaaaucccaacaguagaaaacuccauuuuccacauggcagcuuggagcggguccgcaugccaugaugguaaagaauggacauauaucggaguugauggccccgacaguaaugcauugcucaaaauaaaauauggagaagcauauacugacacguaccauuccuaugaaaaaaacauccuaaggacacaagaaagugccugcaauugcaucgggggagauuguuaucuuaugauaacugauggcccagcuucagggguuagugaaugcagauuccuuaagauucgagagggcagaauaauaaaagaaauauuuccaacaggaagaguaaaacauacugaggaaugcacaugcggauuugccagcaacaaaaccauagaaugugcuuguagagauaaccguuacacagcaaaaagacccuuugucaaauuaaauguggagacugauacagcggaaauaagguugaugugcacagagacuuauuuggacacccccagaccaaaugauggaagcauaacagggccuugcgaaucugauggggacaaagggaguggaggcaucaagggaggauuuguucaucaaagaauggcauccaagauuggaagaugguacucucgaacgaugucuaaaaccaaaagaauggggaugggacuguauguaaaguaugauggagacccauggacugacagugaagcccuugcucuuaguggaguaaugguuucaauggaagaaccugguugguauuccuuuggcuucgaaauaaaagauaagaaaugugauguccccuguauugggauagaaaugguacaugauggugggaaaacgacuuggcacucagcagcaacagccauuuauuguuuaaugggcucaggacaauugcugugggacacugucacagguguugauauggcucuguaa

SEQ ID NO: 62392 - RNA, 1401 nt, Artificial Sequence
  derived and/or modified CDS sequence (wt) from neuraminidase__InfluenzaB__AKA54801
augcuaccuucaacuauacaaacguuaaccuuauuucucacaucagggggaguguuauuaucacuauaugugucagcuucauugucauacuuacuauauucggauauauugcuaaaauuuucacgaacagaaguaacugcaccaauaaugccauuggauugugcaaacgcaucaaauguucaggcugugaaccguucugcaacaaaaggggugacaccucuucucccagaaccggaguggacguacccucguuuaucuugcccgggcucaaccuuucagaaagcacuccuaauuagcccccauagauucggagaaaccaaaggaaacucagcucccuugauaauaagggaaccuuuuauugcuuguggaccaaaagaaugcaaacauuuugcucuaacccauuaugcagcucaaccagggggauacuacaauggaacaagagaagacagaaacaagcugaggcaucuaauuucagucaaauugggcaaaaucccaacaguagaaaacucuauuuuccacauggcagcuuggagcggguccgcaugccaugaugguagagaauggacuuacaucggaguugauggcccagacaguaaugcauugcucaaaauaaaauauggagaagcauauacugacacauaccauuccuaugcaaaaaacauccuaaggacacaagaaagugccugcaauugcaucgggggagauuguuaucugaugauaacugauggcccagcuucagggauuagugaaugcagauuccuuaagauucgagagggccgaauaauaaaagaaauauuuccaacaggaagaguaaaacauacugaggaaugcacaugcggauuugccagcaacaaaaccauagaaugugccuguagagauaacaguuacacagcaaaaagacccuuugucaaauuaaauguggagacugauacagcggaaauaagauugaugugcacaaagacuuauuuggacacccccagaccaaaugauggaagcauaacagggccuugcgaaucugauggggacgaagggaguggaggcaucaagggaggauuuguucaccaaagaauggcauccaagauuggaaggugguacucucggacgaugucuaaaacuaaaagaauggggaugggacuguauguaaaguaugauggagacccauggacugacagugaagcccuugcucuuaguggaguaaugguuucaauggaagaaccugguugguauuccuuuggcuucgaaauaaaagauaagaaaugugauguccccuguauugggauagaaaugguacaugauggugggaaaacgacuuggcacucagcggcaacagccauuuacuguuuaaugggcucaggacaacugcugugggacacugucacagguguuaauaugacucuguaa

SEQ ID NO: 62393 - RNA, 1401 nt, Artificial Sequence
  derived and/or modified CDS sequence (wt) from neuraminidase__InfluenzaB__AKA54803
augcuaccuucaacuauacaaacguuaaccuuauuucucacaucagggggaguguuauuaucacuauaugugucagcuucauugucauacuuacuauauucggauauauugcuaaaauuuucacgaacagaaguaacugcaccaauaaugccauuggauugugcaaacgcaucaaauguucaggcugugaaccguucugcaacaaauggggugacaccucuucucccagaaccggaguggacguacccucguuuaucuugcccgggcucaaccuuucagaaagcacuccuaauuagcccccauagauucggagaaaccaaaggaaacucagcucccuugauaauaagggaaccuuuuauugcuuguggaccaaaggaaugcaaacauuuugcucuaacccauuaugcagcucaaccagggggauauuacaauggaacaagagaagacagaaacaagcugaggcaucuaauuucagucaaauugggcaaaaucccaacaguagaaaacucuauuuuccacauggcagcuuggagcggguccgcaugccaugaugguagagaauggacuuacaucggaguugauggcccagacaguaaugcauugcucaaaauaaaauauggagaagcauauacugacacauaccauuccuaugcaaaaaacauccuaaggacacaagaaagugccugcaauugcaucgggggagauuguuaucugaugauaacugauggcccagcuucagggauuagugaaugcagauuccuuaagauucgagagggccgaauaauaaaagaaauauuuccaacaggaagaguaaaacauacugaggaaugcacaugcggauuugccagcaacaaaaccauagaaugugccuguagagauaacaguuacacagcaaaaagacccuuugucaaauuaaauguggagacugauacagcggaaauaagauugaugugcacaaagacuuauuuggacacccccagaccaaaugauggaagcauaacagggccuugcgaaucugauggggacgaagggaguggaggcaucaagggaggauuuguucaccaaagaauggcauccaagauuggaaggugguacucucggacgaugucuaaaacuaaaagaauggggaugggacuguauguaaaguaugauggagacccauggacugacagugaagcccuugcucuuaguggaguaaugguuucaauggaagaaccugguugguauuccuuuggcuucgaaauaaaagauaagaaaugugauguccccuguauugggauagaaaugguacaugauggugggaaaacgacuuggcacucagcggcaacagccauuuacuguuuaaugggcucaggacaacugcugugggacacugucacagguguuaauaugacucuguaa

SEQ ID NO: 62394 - RNA, 1401 nt, Artificial Sequence; identical to SEQ ID NO: 62392
  derived and/or modified CDS sequence (wt) from neuraminidase__InfluenzaB__AKA54805

SEQ ID NO: 62395 - RNA, 1401 nt, Artificial Sequence
  derived and/or modified CDS sequence (wt) from neuraminidase__InfluenzaB__AKA54807
augcuaccuucaacuauacaaacguuaaccuuauuucucacaucagggggaguguuauuaucacuauaugugucagcuucauugucauacuuacuauauucggauauauugcuaaaauuuucacgaacagaaguaacugcaccaauaaugccauuggauugugcaaacgcaucaaauguucaggcugugaaccguucugcaacaaaaggggugacaccucuucucccagaaccggaguggacguacccucguuuaucuugcccgggcucaaccuuucagaaagcacuccuaauuagcccccauagauucggagaaaccaaaggaaacucagcucccuugauaauaagggaaccuuuuauugcuuguggaccaaaggaaugcaaacauuuugcucuaacccauuaugcagcucaaccagggggauauuacaauggaacaagagaagacagaaacaagcugaggcaucuaauuucagucaaauugggcaaaaucccaacaguagaaaacucuauuuuccacauggcagcuuggagcggguccgcaugccaugaugguagagaauggacuuacaucggaguugauggcccagacaguaaugcauugcucaaaauaaaauauggagaagcauauacugacacauaccauuccuaugcaaaaaacauccuaaggacacaagaaagugccugcaauugcaucgggggagauuguuaucugaugauaacugauggcccagcuucagggauuagugaaugcagauuccuuaagauucgagagggccgaauaauaaaagaaauauuuccaacaggaagaguaaaacauacugaggaaugcacaugcggauuugccagcaacaaaaccauagaaugugccuguagagauaacaguuacacagcaaaaagacccuuugucaaauuaaauguggagacugauacagcggaaauaagauugaugugcacaaagacuuauuuggacacccccagaccaaaugauggaagcauaacagggccuugcgaaucugauggggacgaagggaguggaggcaucaagggaggauuuguucaccaaagaauggcauccaagauuggaaggugguacucucggacgaugucuaaaacuaaaagaauggggaugggacuguauguaaaguaugauggagacccauggacugacagugaagcccuugcucuuaguggaguaaugguuucaauggaagaaccugguugguauuccuuuggcuucgaaauaaaagauaagaaaugugauguccccuguauugggauagaaaugguacaugauggugggaaaacgacuuggcacucagcggcaacagccauuuacuguuuaaugggcucaggacaacugcugugggacacugucacagguguuaauauaacucuguaa

SEQ ID NO: 62396 - RNA, 1401 nt, Artificial Sequence
  derived and/or modified CDS sequence (wt) from neuraminidase__InfluenzaB__AKA54809
augcuaccuucaacuauacaaacguuaaccuuauuucucacaucagggggaguguuauuaucacuauaugugucagcuucauugucauacuuacuauauucggauauauugcuaaaauuuucacgaacagaaguaacugcaccaauaaugccauuggauugugcaaacgcaucaaauguucaggcugugaaccguucugcaacaaaaggggugacaccucuucucccagaaccggaguggacguacccucguuuaucuugcccgggcucaaccuuucagaaagcacuccuaauuagcccccauagauucggagaaaccaaaggaaacucagcucccuugauaauaagggaaccuuuuauugcuuguggaccaaaggaaugcaaacauuuugcucuaacccauuaugcagcucaaccagggggauauuacaauggaacaagagaagacagaaacaagcugaggcaucuaauuucagucaaauugggcaaaaucccaacaguagaaaacucuauuuuccacauggcagcuuggagcggguccgcaugccaugaugguagagaauggacuuacaucggaguugauggcccagacaguaaugcauugcucaaaauaaaauauggagaagcauauacugacacauaccauuccuaugcaaaaaacauccuaaggacacaagaaagugccugcaauugcaucgggggagauuguuaucugaugauaacugauggcccagcuucagggauuagugaaugcagauuccuuaagauucgagagggccgaauaauaaaagaaauauuuccaacaggaagaguaaaacauacugaggaaugcacaugcggauuugccagcaacaaaaccauagaaugugccuguagagauaacaguuacacagcaaaaagacccuuugucaaauuaaauguggagacugauacagcggaaauaagauugaugugcacaaagacuuauuuggacacccccagaccaaaugauggaagcauaacagggccuugcgaaucugauggggacgaagggaguggaggcaucaagggaggauuuguucaccaaagaauggcauucaagauuggaaggugguacucucggacgaugucuaaaacuaaaagaauggggaugggacuguauguaaaguaugauggagacccauggacugacagugaagcccuugcucuuaguggaguaaugguuucaauggaagaaccugguugguauuccuuuggcuucgaaauaaaagauaagaaaugugauguccccuguauugggauagaaaugguacaugauggugggaaaacgacuuggcacucagcggcaacagccauuuacuguuuaaugggcucaggacaacugcugugggacacugucacagguguuaauaugacucuguaa

SEQ ID NO: 62397 - RNA, 1401 nt, Artificial Sequence
  derived and/or modified CDS sequence (wt) from neuraminidase__InfluenzaB__AKA54811
augcuaccuucaacuauacaaacguuaaccuuauuucucacaucagggggaguguuauuaucacuauaugugucagcuucauugucauacuuacuauauucggauauauugcuaaaauuuucacgaacagaaguaacugcaccaauaaugccauuggauugugcaaacgcaucaaauguucaggcugugaaccguucugcaacaaaaggggugacaccucuucucccagaaccggaguggacguacccucguuuaucuugcccgggcucaaccuuucagaaagcacuccuaauuagcccccauagauucggagaaaccaaaggaaacucagcucccuugauaauaagggaaccuuuuauugcuuguggaccaaaggaaugcaaacauuuugcucuaacccauuaugcagcucaaccagggggauauuacaauggaacaagagaagacagaaacaagcugaggcaucuaauuucagucaaauugggcaaaaucccaacaguagaaaacucuauuuuccacauggcagcuuggagcggguccgcaugccaugaugguagagaauggacuuacaucggaguugauggcccagacaguaaugcauugcucaaaauaaaauauggagaagcauauacugacacauaccauuccuaugcaaaaaacauccuaaggacacaagaaagugccugcaauugcaucgggggagauuguuaucugaugauaacugauggcccagcuucagggauuagugaaugcagauuccuuaagauucgagagggccgaauaauaaaagaaauauuuccaacaggaagaguaaaacauacugaggaaugcacaugcggauuugccagcaacaaaaccauagaaugugccuguagagauaacaguuacacagcaaaaagacccuuugucaaauuaaauguggagacugauacagcggaaauaagauugaugugcacaaagacuuauuuggacacccccagaccaaaugauggaagcauaacagggccuugcgaaucugauggggacgaagggaguggaggcaucaagggaggauuuguucaccaaagaauggcauccaagauuggaaggugguacucucggacgaugucuaaaacuaaaagaauggggaugggacuguauguaaaguaugauggagacccauggacugacagugaagcccuugcucuuaguggaguaaugguuucaauggaagaaccugguugguauuccuuuggcuucgaaauaaaagauaagaaaugugauguccccuguauugggauagaaaugguacaugauggugggaaaacgacuuggcacucagcggcaacagccauuuacuguuuaaugggcucaggacaacugcugugggacacugucacagguguuaauaugacucuguaa

SEQ ID NO: 62398 - RNA, 1401 nt, Artificial Sequence
  derived and/or modified CDS sequence (wt) from neuraminidase__InfluenzaB__AKA54813
augcuaccuucaacuauacaaacguuaaccuuauuucucacaucagggggaguguuauuaucacuauaugugucagcuucauugucauacuuacuauauucggauauauugcuaaaauuuucacgaacagaaguaacugcaccaauaaugccauuggauugugcaaacgcaucaaauguucaggcugugaaccguucugcaacaaaaggggugacaccucuucucccagaaccggaguggacguacccucguuuaucuugcccgggcucaaccuuucagaaagcacuccuaauuagcccccauagauucggagaaaccaaaggaaacucagcucccuugauaauaagggaaccuuuuauugcuuguggaccaaaggaaugcaaacauuuugcucuaacccauuaugcagcucaaccagggggauauuacaauggaacaagagaagacagaaacaagcugaggcaucuaauuucagucaaauugggcaaaaucccaacaguagaaaacucuauuuuccacauggcagcuuggagcggguccgcaugccaugaugguagagaauggacuuacaucggaguugauggcccagacaguaaugcauugcucaaaauaaaauauggagaagcauauacugacacauaccauuccuaugcaaaaaacauccuaaggacacaagaaagugccugcaauugcaucgggggagauuguuaucugaugauaacugauggcccagcuucagggauuagugaaugcagauuccuuaagauucgagagggccgaauaauaaaagaaauauuuccaacaggaagaguaaaacauacugaggaaugcacaugcggauuugccagcaacaaaaccauagaaugugccuguagagauaacaguuacacagcaaaaagacccuuugucaaauuaaauguggagacugauacagcggaaauaagauugaugugcacaaagacuuauuuggacacccccagaccaaaugauggaagcauaacagggccuugcgaaucugauggggacgaagggaguggaggcaucaagggaggauuuguucaccaaagaauggcauccaagauuggaaggugguacucucggacgaugucuaaaacuaaaagaauggggaugggacuguauguaaaguaugauggagacccauggacugacagugaagcccuugcucuuaguggaguaaugguuucaauagaagaaccugguugguauuccuuuggcuucgaaauaaaagauaagaaaugugauguccccuguauugggauagaaaugguacaugauggugggaaaacgacuuggcacucagcggcaacagccauuuacuguuuaaugggcucaggacaacugcugugggacacugucacagguguuaauaugacucuguaa

SEQ ID NO: 62399 - RNA, 1401 nt, Artificial Sequence; identical to SEQ ID NO: 62397
  derived and/or modified CDS sequence (wt) from neuraminidase__InfluenzaB__AKA54815

SEQ ID NO: 62400 - RNA, 1401 nt, Artificial Sequence
  derived and/or modified CDS sequence (wt) from neuraminidase__InfluenzaB__AKA54817
augcuaccuucaacuauacaaacguuaaccuuauuucucacaucagggggaguguuauuaucacuauaugugucagcuucauugucauacuuacuauauucggauauauugcuaaaauuuucacgaacagaaguaacugcaccaauaaugccauuggauugugcaaacgcaucaaauguucaggcugugaaccguucugcaacaaaaggggugacaccucuucucccagaaccggaguggacguacccucguuuaucuugcccgggcucaaccuuucagaaagcacuccuaauuagcccccauagauucggagaaaccaaaggaaacucagcucccuugauaauaagggaaccuuuuauugcuuguggaccaaaggaaugcaaacauuuugcucuaacccauuaugcagcucaaccagggggauauuacaauggaacaagagaagacagaaacaagcugaggcaucuaauuucagucaaguugggcaaaaucccaacaguagaaaacucuauuuuccacauggcagcuuggagcggguccgcaugccaugaugguagagaauggacuuacaucggaguugauggcccagacaguaaugcauugcucaaaauaaaauauggagaagcauauacugacacauaccauuccuaugcaaaaaacauccuaaggacacaagaaagugccugcaauugcaucgggggagauuguuaucugaugauaacugauggcccagcuucagggauuagugaaugcagauuccuuaagauucgagagggccgaauaauaaaagaaauauuuccaacaggaagaguaaaacauacugaggaaugcacaugcggauuugccagcaacaaaaccauagaaugugccuguagagauaacaguuacacagcaaaaagacccuuugucaaauuaaauguggagacugauacagcggaaauaagauugaugugcacaaaaacuuauuuggacacccccagaccaaaugauggaagcauaacagggccuugcgaaucugauggggacgaagggaguggaggcaucaagggaggauuuguucaccaaagaauggcauccaagauuggaaggugguacucucggacgaugucuaaaacuaaaagaauggggaugggacuguauguaaaguaugauggagacccauggacugacagugaagcccuugcucuuaguggaguaaugguuucaauggaagaaccugguugguauuccuuuggcuucgaaauaaaagauaagaaaugugauguccccuguauugggguagaaaugguacaugauggugggaaaacgacuuggcacucagcggcaacagccauuuacuguuuaaugggcucaggacaacugcugugggacacugucacagguguuaauaugacucuguaa

SEQ ID NO: 62401 - RNA, 1401 nt, Artificial Sequence; identical to SEQ ID NO: 62397
  derived and/or modified CDS sequence (wt) from neuraminidase__InfluenzaB__AKA54819

SEQ ID NO: 62402 - RNA, 1401 nt, Artificial Sequence
  derived and/or modified CDS sequence (wt) from neuraminidase__InfluenzaB__AKA54821
augcuaccuucaacuauacaaacguuaaccuuauuucucacaucagggggaguguuauuaucacuauaugugucagcuucauugucauacuuacuauauucggauauauugcuaaaauuuucacgaacagaaguaacugcaccaauaaugccauuggauugugcaaacgcaucaaauguucaggcugugaaccguucugcaacaaaaggggugacaccucuucucccagaaccggaguggacguacccucguuuaucuugcccgggcucaaccuuucagaaagcacuccuaauuagcccccauagauucggagaaaccaaaggaaacucagcucccuugauaauaagggaaccuuuuauugcuuguggaccaaaggaaugcaaacauuuugcucuaacccauuaugcagcucaaccagggggauacuacaauggaacaagagaagacagaaacaagcugaggcaucuaauuucagucaaauugggcaaaaucccaacaguagaaaacucuauuuuccacauggcagcuuggagcggguccgcaugccaugaugguagagaauggacuuacaucggaguugauggcccagacaguaaugcauugcucaaaauaaaauauggagaagcauauacugacacauaccauuccuaugcaaaaaacauccuaaggacacaagaaagugccugcaauugcaucgggggagauuguuaucugaugauaacugauggcccagcuucagggauuagugaaugcagauuccuuaagauucgagagggccgaauaauaaaagaaauauuuccaacaggaagaguaaaacauacugaggaaugcacaugcggauuugccagcaacaaaaccauagaaugugccuguagagauaacaguuacacagcaaaaagacccuuugucaaauuaaauguggagacugauacagcggaaauaagauugaugugcacaaagacuuauuuggacacccccagaccaaaugauggaagcauaacagggccuugcgaaucugauggggacgaagggaguggaggcaucaagggaggauuuguucaccaaagaauggcauccaagauuggaaggugguacucucggacgaugucuaaaacuaaaagaauggggaugggacuguauguaaaguaugauggagacccauggacugacagugaagcccuugcucuuaguggaguaaugguuucaauggaagaaccugguugguauuccuuuggcuucgaaauaaaagauaagaaaugugauguccccuguauugggauagaaaugguacaugauggugggaaaacgacuuggcacucagcggcaacagccauuuacuguuuaaugggcucaggacaacugcugugggacacugucacagguguuaauaugacucuguaa

SEQ ID NO: 62403 - RNA, 1401 nt, Artificial Sequence
  derived and/or modified CDS sequence (wt) from neuraminidase__InfluenzaB__AKA54823
augcuaccuucaacuauacaaacguuaaccuuauuucucacaucagggggaguguuauuaucacuauaugugucagcuucauugucauacuuacuauauucggauauauugcuaaaauuuucacgaacagaaguaacugcaccaauaaugccauuggauugugcaaacgcaucaaauguucaggcugugaaccguucugcaacaaaaggggugacaccucuucucccagaaccggaguggacguacccucguuuaucuugcccgggcucaaccuuucagaaagcacuccuaauuagcccccauagauucggagaaaccaaaggaaacucagcucccuugauaauaagggaaccuuuuauugcuuguggaccaaaggaaugcaaacauuuugcucuaacccauuaugcagcucaaccagggggauacuacaauggaacaagagaagacagaaacaaacugaggcaucuaauuucagucaaauugggcaaaaucccaacaguagaaaacucuauuuuccacauggcagcuuggagcggguccgcaugccaugaugguagagaauggacuuacaucggaguugauggcccagacaguaaugcauugcucaaaauaaaauauggagaagcauauacugacacauaccauuccuaugcaaaaaacauccuaaggacacaagaaagugccugcaauugcaucgggggagauuguuaucugaugauaacugauggcccagcuucagggauuagugaaugcagauuccuuaagauucgagagggccgaauaauaaaagaaauauuuccaacaggaagaguaaaacauacugaggaaugcacaugcggauuugccagcaacaaaaccauagaaugugccuguagagauaauaguuacacagcaaaaagacccuuugucaaauuaaauguggagacugauacagcggaaauaagauugaugugcacaaagacuuauuuggacacccccagaccaaaugauggaagcauaacagggccuugcgaaucugauggggacgaagggaguggaggcaucaagggaggauuuguucaccaaagaauggcauccaagauuggaaggugguacucucggacgaugucuaaaacuaaaagaauggggaugggacuguauguaaaguaugauggagacccauggacugacagugaagcccuugcucuuaguggaguaaugguuucaauggaagaaccugguugguauuccuuuggcuucgaaauaaaagauaagaaaugugauguccccuguauugggauagaaaugguacaugauggugggaaaacgacuuggcacucagcggcaacagccauuuacuguuuaaugggcucaggacaacugcugugggacacugucacagguguuaauaugacucuguaa

SEQ ID NO: 62404 - RNA, 1401 nt, Artificial Sequence
  derived and/or modified CDS sequence (wt) from neuraminidase__InfluenzaB__AKA54825
augcuaccuucaacuauacaaacguuaaccuuauuucucacaucagggggaguguuauuaucacuauaugugucagcuucauugucauacuuacuauauucggauauauugcuaaaauuuucacgaacagaaguaacugcaccaauaaugccauuggauugugcaaacgcaucaaauguucaggcugugaaccguucugcaacaaaaggggugacaccucuucucccagaaccggaguggacguacccucguuuaucuugcccgggcucaaccuuucagaaagcacuccuaauuagcccccauagauucggagaaaccaaaggaaacucagcucccuugauaauaagggaaccuuuuauugcuuguggaccaaaggaaugcaaacauuuugcucuaacccauuaugcagcucaaccagggggauacuacaauggaacaagagaagacagaaacaagcugaggcaucuaauuucagucaaauugggcaaaaucccaacaguagaaaacucuauuuuccacauggcagcuuggagcggguccgcaugccaugaugguagagaauggacuuacaucggaguugauggcccagacaguaaugcauugcucaaaauaaaauauggagaagcauauacugacacauaccauuccuaugcaaaaaacauccuaaggacacaagaaagugccugcaauugcaucgggggagauuguuaucugaugauaacugauggcccagcuucagggauuagugaaugcagguuccuuaagauucgagagggccgaauaauaaaagaaauauuuccaacaggaagaguaaaacauacugaggaaugcacaugcggauuugccagcaacaaaaccauagaaugugccuguagagauaacaguuacacagcaaaaagacccuuugucaaauuaaauguggagacugauacagcggaaauaagauugaugugcacaaagacuuauuuggacacccccagaccaaaugauggaagcauaacagggccuugcgaaucugauggggacgaagggaguggaggcaucaagggaggauuuguucaccaaagaauggcauccaagauuggaaggugguacucucggacgaugucuaaaacuaaaagaauggggaugggacuguauguaaaguaugauggagacccauggacugacagugaagcccuugcucuuaguggaguaaugguuucaauggaagaaccugguugguauuccuuuggcuucgaaauaaaagauaagaaaugugauguccccuguauugggauagaaaugguacaugauggugggaaaacgacuuggcacucagcggcaacagccauuuacuguuuaaugggcucaggacaacugcugugggacacugucacagguguuaauaugacucuguaa

SEQ ID NO: 62405 - RNA, 1401 nt, Artificial Sequence
  derived and/or modified CDS sequence (wt) from neuraminidase__InfluenzaB__AKA54827
augcuaccuucaacuauacaaacguuaaccuuauuucucacaucagggggaguguuauuaucacuauaugugucagcuucauugucauacuuacuauauucggauauauugcuaaaauuuucacgaacagaaguaacugcaccaauaaugccauuggauugugcaaacgcaucaaauguucaggcugugaaccguucugcaacaaaaggggugacaccucuucucccagaaccggaguggacguacccucguuuaucuugcccgggcucaaccuuucagaaagcacuccuaauuagcccccauagauucggagaaaccaaaggaaacucagcucccuugauaauaagggaaccuuuuauugcuuguggaccaaaggaaugcaaacauuuugcucuaacccauuaugcagcucaaccagggggauacuacaauggaacaagagaagacagaaacaagcugaggcaucuaauuucagucaaauugggcaaaaucccaacaguagaaaacucuauuuuccacauggcagcuuggagcggguccgcaugccaugaugguagagaauggacuuacaucggaguugauggcccagacaguaaugcauugcucaaaauaaaauauggagaagcauauacugacacauaccauuccuaugcaaaaaacauccuaaggacacaagaaagugccugcaauugcaucgggggagauuguuaucugaugauaacugauggcccagcuucagggauuagugaaugcagauuccuuaagauucgagagggccgaauaauaaaagaaauauuuccaacaggaagaguaaaacauacugaggaaugcacaugcggauuugccagcaacaaaaccauagaaugugccuguagagauaacaguuacacagcaaaaagacccuuugucaaauuaaauguggagacugauacagcggaaauaagauugaugugcacaaagacuuauuuggacacccccagaccaaaugauggaagcauaacagggccuugcgaaucugauggggacgaagggaguggaggcaucaagggaggauuuguucaccaaagaauggcauccaagauuggaaggugguacucucggacgaugucuaaaacuaaaagaauggggaugggacuguauguaaaguaugauggagacccauggacugacagugaagcccuugcucuuaguggaguaaugguuucaauggaagaaccugguugguauuccuuuggcuucgaaauaaaagauaagaaaugugauguccccuguauugggauagaaaugguacaugauggugggaaaacaacuuggcacucagcggcaacagccauuuacuguuuaaugggcucaggacaacugcugugggacacugucacagguguuaauaugacucuguaa

SEQ ID NO: 62406 - RNA, 1401 nt, Artificial Sequence
  derived and/or modified CDS sequence (wt) from neuraminidase__InfluenzaB__AKA54829
augcuaccuucaacuauacaaacguuaaccuuauuucucacaucagggggaguguuauuaucacuauaugugucagcuucauugucauacuuacuauauucggauauauugcuaaaauugucacgaacagaaguaacugcaccaauaaugccauuggauugugcaaacgcaucaaauguucaggcugugaaccguucugcaacaaaaggggugacaccucuucucccagaaccggaguggacguacccucguuuaucuugcccgggcucaaccuuucagaaaacacuccuaauuagcccccauagauucggagaaaccaaaggaaacucagcucccuugauaauaagggaaccuuuuauugcuuguggaccaaaggaaugcaaacauuuugcucuaacccauuaugcagcucaaccagggggauacuacaauggaacaagagaagacagaaacaagcugaggcaucuaauuucagucaaauugggcaaaaucccaacaguagaaaacucuauuuuccacauggcagcuuggagcggguccgcaugccaugaugguagagaauggacuuacaucggaguugauggcccagacaguaaugcauugcucaaaauaaaauauggagaagcauauacugacacauaccauuccuaugcaaaaaacauccuaaggacacaagaaagugccugcaauugcaucgggggagauuguuaucugaugauaacugauggcccagcuucagggauuagugaaugcagauuccuuaagauucgagagggccgaauaauaaaagaaauauuuccaacaggaagaguaaaacauacugaggaaugcacaugcggauuugccagcaacaaaaccauagaaugugccuguagagauaacaguuacacagcaaaaagacccuuugucaaauuaaauguggagacugauacagcggaaauaagauugaugugcacaaagacuuauuuggacacccccagaccaaaugauggaagcauaacagggccuugcgaaucugauggggacgaagggaguggaggcaucaagggaggauuuguucaccaaagaauggcauccaagauuggaaggugguacucucggacgaugucuaaaacuaaaagaauggggaugggacuguauguaaaguaugauggagacccauggacugacagugaagcccuugcucuuaguggaguaaugguuucaauggaagaaccugguugguauuccuuuggcuucgaaauaaaagauaagaaaugugauguccccuguauugggauagaaaugguacaugauggugggaaaacgacuuggcacucagcggcaacagccauuuacuguuuaaugggcucaggacaacugcugugggacacugucacagguguuaauaugacucuguaa

SEQ ID NO: 62407 - RNA, 1401 nt, Artificial Sequence
  derived and/or modified CDS sequence (wt) from neuraminidase__InfluenzaB__AKA54831
augcuaccuucaacuauacaaacguuaaccuuauuucucacaucugggggaguguuauuaucacuauaugugucagcuucauugucauacuuacuauauucggauauauugcuaaaauuuucacgaacagaaguaacugcaccaauaaugccauuggauugugcaaacgcaucaaauguucaggcugugaaccguucugcaacaaaaggggugacaccucuucucccagaaccggaguggacguacccucguuuaucuugcccgggcucaaccuuucagaaagcacuccuaauuagcccccauagauucggagaaaccaaaggaaacucagcucccuugauaauaagggaaccuuuuauugcuuguggaccaaaggaaugcaaacauuuugcucuaacccauuaugcagcucaaccagggggauacuacaauggaacaagagaagacagaaacaagcugaggcaucuaauuucagucaaauugggcaaaaucccaacaguagaaaacucuauuuuccacauggcagcuuggagcggguccgcaugccaugaugguagagaauggacuuacaucggaguugauggccaagacaguaaugcauugcucaaaauaaaauauggagaagcauauacugacacauaccauuccuaugcaaaaaacauccuaaggacacaagaaagugccugcaauugcaucgggggagauuguuaucugaugauaacugauggcccagcuucagggauuagugaaugcagguuccuuaagauucgagagggccgaauaauaaaagaaauauuuccaacaggaagaguaaaacauacugaggaaugcacaugcggauuugccagcaacaaaaccauagaaugugccuguagagauaacaguuacacagcaaaaagacccuuugucaaauuaaauguggagacugauacagcggaaauaagauugaugugcacaaagacuuauuuggacacccccagaccaaaugauggaagcauaacagggccuugcgaaucugauggggacgaagggaguggaggcaucaagggaggauuuguucaccaaagaauggcauccaagauuggaaggugguacucucggacgaugucuaaaacuaaaagaauggggaugggacuguauguaaaguaugauggagacccauggacugacagugaagcccuugcucuuaguggaguaaugguuucaauggaagaaccugguugguauuccuuuggcuucgaaauaaaagauaagaaaugugauguccccuguauugggauagaaaugguacaugauggugggaaaacgacuuggcacucagcggcaacagccauuuacuguuuaaugggcucaggacaacugcugugggacacugucacagguguuaauaugacucuguaa

SEQ ID NO: 62408 - RNA, 1401 nt, Artificial Sequence
  derived and/or modified CDS sequence (wt) from neuraminidase__InfluenzaB__AKA54833
augcuaccuucaacuauacaaacguuaaccuuauuucucacaucagggggaguguuauuaucacuauaugugucagcuucauugucauacuuacuauauucggauauauugcuaaaauuuucacgaacagaaguaacugcaccaauaaugccauuggauugugcaaacgcaucaaauguucaggcugugaaccguucugcaacaaaaggggugacaccucuucucccagaaccggaguggacguacccucguuuaucuugcccgggcuccaccuuucagaaagcacuucuaauuagcccccauagauucggagaaaccaaaggaaacucagcucccuugauaauaagggaaccuuuuauugcuuguggaccaaaggaaugcaaacauuuugcucuaacccauuaugcagcucaaccagggggauacuacaauggaacaagagaagacagaaacaagcugaggcaucuaauuucagucaaauugggcaaaaucccaacaguagaaaacucuauuuuccacauggcagcuuggagcggguccgcaugccaugauggcagagaauggacuuacaucggaguugaugguccagacaguaaugcauugcucaaaauaaaauauggagaagcauauacugacacauaccauuccuaugcaaaaaacauccuaaggacacaagaaagugccugcaauugcaucgggggagauuguuaucugaugauaacugauggcccagcuucagggauuagugaaugcagauuccuuaagauucgagagggccgaauaauaaaagaaauauuuccaacaggaagaguaaaacauacugaggaaugcacaugcggauuugccagcaacaaaaccauagaaugugccuguagagauaacaguuacacagcaaaaagacccuuugucaaauuaaauguggagacugauacagcggaaauaagauugaugugcacaaagacuuauuuggacacccccagaccaaaugauggaagcauaacagggccuugcgaaucugauggggacgaagggaguggaggcaucaagggaggauuuguucaccaaagaauggcauccaagauuggaaggugguacucucggacgaugucuaaaacuaaaagaauggggaugggacuguauguaaaguaugauggagacccauggacugacagugaagcccuugcucuuaguggaguaaugguuucaauggaagaaccugguugguauuccuuuggcuucgaaauaaaagauaagaaaugugauguccccuguauugggauagaaaugguacaugauggugggaaaacgacuuggcacucagcggcaacagccauuuacuguuuaaugggcucaggacaacugcugugggacacugucacagguguuaauaugacucuguaa

SEQ ID NO: 62409 - RNA, 1401 nt, Artificial Sequence
  derived and/or modified CDS sequence (wt) from neuraminidase__InfluenzaB__AKA54837
augcuaccuucaacuauacaaacguuaacccuauuucucacaucagggggaguauuauuaucacuauaugugucagcuucauuaucauacuuacuauauucggauauauugcuaaaauucucaccaacagaaauaacugcaccaacaaugccauuggauugugcaaacgcaucaaauguucaagcugugaaccguucugcaacaaaaggggugacacuucuucucccagaaccggaguggacauacccgcguuuaucuugcccgggcucaaccuuucaaaaagcacuccuaauuagcccucauagauucggagaaaccaauggaaacucagcucccuugauaguaagggaaccuuuuauugcuuguggaccaaaugaaugcaaacacuuugcucuaacccauuaugcagcccaaccagggggauacuacaauggaacaagaggagacagaaacaagcugaggcaucuaauuucagucaaauugggcaaaaucccaacaguagaaaacuccauuuuccacauggcagcauggagcggguccgcgugccaugaugguaaggaauggacauauaucggaguugauggcccugacaauaaugcauugcucaaaguaaaauauggagaagcauauacugacacauaccauuccuaugcaaacaaaauccuaagaacacaagaaagugccugcaauugcaucgggggaaauuguuaucuaaugauaacugauggcucagcuucagguguuagugaaugcagauuucuuaagauucgagagggccgaauaauaaaagaaauauuuccaacaggaagaguaaaacacacugaggaaugcacaugcggauuugccagcaauaaaaccauagaaugugccuguagagacaacagguacacagcaaaaagaccuuuugucaaauuaaacguggagacugauacagcagaaauaagauugaugugcacagauacuuauuuggacacccccagaccaaaugauggaagcauaacaggcccuugugaaucugaugggaacgaagggaguggaggcaucaagggaggauuuguucaucaaagaaugaaauccaagauuggaaggugguacucucgaacgaugucuaaaacugaaaggauggggaugggacuguaugucaaauaugauggagacccaugggccgacagugaugcccuagcuuuuaguggaguaaugguuucaaugaaagaaccugguugguacuccuuuggcuucgaaauaaaagauaagaaaugcgauguccccuguauugggauagagaugguacaugaugguggaaaagagacuuggcacucagcagcaacagccauuuacuguuuaaugggcucaggacagcugcugugggacacugucacagguguugacauggcucuguaa

SEQ ID NO: 62410 - RNA, 1401 nt, Artificial Sequence
  derived and/or modified CDS sequence (wt) from neuraminidase__InfluenzaB__AKA54839
augcuaccuucaacuauacaaacguuaacccuauuucucacaucagggggaguauuauuaucacuauaugugucagcuucauuaucauacuuacuauauucggauauauugcuaaaauucucaccaacagaaauaacugcaccaacaaugccauuggauugugcaaacgcaucaaauguucaggcugugaaccguucugcaacaaaagaggugacacuucuucucccagaaccggaguggacauacccgcguuuaucuugcccgggcucaaccuuucagaaagcacuccuaauuagcccucauagauucggagaaaccaaaggaaacucagcucccuuaauaauaagggaaccuuuuauugcuuguggaccaaaugaaugcaaacacuuugcucuaacccauuaugcagcccaaccagggggauacuacaauggaacaagaggagacagaaacaagcugaggcaucuaauuucagucaaauugggcaaaaucccaacaguagagaacuccauuuuccacauggcagcauggagcggguccgcgugccaugaugguaaggaauggacauauaucggaguugauggcccugacaauaaugcauugcucaaaguaaaauauggagaagcauauacugacacauaccauuccuaugcaaacaaaauccuaagaacacaagaaagugccugcaauugcaucgggggaaauuguuaucuaaugauaacugauggcucagcuucagguguuagugaaugcagauuucuuaagauucgagagggccgaauaauaaaagaaauauuuccaacaggaagaguaaaacacacugaggaaugcacaugcggauuugccagcaauaaaaccauagaaugugccuguagagacaacagguacacagcaaaaagaccuuuugucaaauuaaacguggagacugauacagcagaaauaagauugaugugcacagauacuuauuuggacacccccagaccaaaugauggaagcauaacaggcccuugugaaucugauggggacaaagggaguggaggcaucaagggaggauuuguucaucaaagaaugaaauccaagauuggaaggugguacucucgaacgaugucuaaaacugaaaggauggggaugggacuauaugucaaguaugauggagacccaugggcugacagugaugcccuagcuuuuaguggaguaaugguuucaaugaaagaaccugguugguauuccuuuggcuucgaaauaaaagauaagaaaugcgauguccccuguauugggauagagaugguacaugaugguggaaaagagacuuggcacucagcagcaacagccauuuacuguuuaaugggcucaggacagcugcugugggacacugucacagguguugacauggcucuguaa

SEQ ID NO: 62411 - RNA, 1401 nt, Artificial Sequence
  derived and/or modified CDS sequence (wt) from neuraminidase__InfluenzaB__AKA54841
augcuaccuucaacuauacaaacguuaacccuauuucucacaucagggggaguauuauuaucacuauaugugucagcuucauuaucauacuuacuauauucggauauauugcuaaaauucucaccaacagaaauaacugcaccaacaaugccauuggauugugcaaacgcaucaaauguucaggcugugaaccguucugcaacaaaaggggugacacuucuucucccagaaccggaguggacauacccgcguuuaucuugcccgggcucaaccuuucagaaagcacuccuaauuagcccucauagauucggagaaaccaaaggaaacucagcucccuugauaauaagggaaccuuuuauugcuuguggaccaaaugaaugcaaacacuuugcucuaacccauuaugcagcccaaccagggggauacuacaauggaacaagaggagacagaaacaagcugaggcaucuaauuucagucaaauugggcaaaaucccaacaguagaaaacuccauuuuccacauggcagcauggagcggguccgcgugccaugaugguaaggaauggacauauaucggaguugauggcccugacaauaaugcauugcucaaaguaaaauauggagaagcauauacugacacauaccauuccuaugcaaacaaaauccuaagaacacaagaaagugccugcaauugcaucgggggaaauuguuaucuaaugauaacugauggcucagcuucagguguuagugaaugcagauuucuuaagauucgagagggccgaauaauaaaagaaauauuuccaacaggaagaguaaaacacacugaggaaugcacaugcggauuugccagcaauaaaaccauagaaugugccuguagagacaacagguacacagcaaaaagaccuuuugucaaauuaaacguggagacugauacagcagaaauaagauugaugugcacagauacuuauuuggacacccccagaccaaaugauggaagcauaacaggcccuugugaaucugauggggacgaagggaguggaggcaucaagggaggauuuguucaucaaagaaugaaauccaagauugggaggugguacucucgaacgaugucuaaaacugaaaggauggggaugggacuguaugucaaguaugauggagacccaugggccgacagugaugcccuagcuuucaguggaguaaugguuucagugaaagaaccugguugguacuccuuuggcuuugaaauaaaagauaagaaaugcgauguccccuguauugggauagagaugguacaugaugguggaaaagagacuuggcacucagcagcaacagccauuuacuguuuaaugggcucaggacagcugcugugggacacugucacagguguugacauagcucuguaa

SEQ ID NO: 62412 - RNA, 1401 nt, Artificial Sequence
  derived and/or modified CDS sequence (wt) from neuraminidase__InfluenzaB__AKA54843
augcuaccuucaacuauacaaacguuaacccuauuucucacaucagggggaguauuauuaucacuauaugugucagcuucauuaucauacuuacuauauucggauauauugcuaaaauucucaccaacagaaauaacugcaccaacaaugccauuggauugugcaaacgcaucaaauguucaggcugugaaccguucugcaacaaaaggggugacacuucuucucccagaaccggaguggacauacccgcguuuaucuugcccgggcucaaccuuucagaaagcacuccuaauuagcccucauagauucggagaaaccaaaggaaacucagcucccuugauaauaagggaaccuuuuauugcuuguggaccaaaugaaugcaaacacuuugcucuaacccauuaugcagcccaaccagggggauacuacaauggaacaagaggagacagaaacaagcugaggcaucuaauuucagucaaauugggcaaaaucccaacaguagaaaacuccauuuuccacauggcagcauggagcggguccgcgugccaugaugguaaggaauggacauauaucggaguugauggcccugacaauaaugcauugcucaaaguaaaauauggagaagcauauacugacacauaccauuccuaugcaaacaaaauccuaagaacacaagaaagugccugcaauugcaucgggggaaauuguuaucuaaugauaacugauggcucagcuucagguguuagugaaugcagauuucuuaagauucgagagggccgaauaauaaaagaaauauuuccaacaggaagaguaaaacacacugaggaaugcacaugcggauuugccagcaauaaaaccauagaaugugccuguagagacaacagguacacagcaaaaagaccuuuugucaaauuaaacguggagacugauacagcagaaauaagauugaugugcacagauacuuauuuggacacccccagaccgaaugauggaagcauaacaggcccuugugaaucugauggggacgaagggaguggaggcaucaagggaggauuuguucaucaaagaaugaaauccaagauugggaggugguacucucgaacgaugucuaaaacugaaaggauggggaugggacuguaugucaaguaugauggagacccaugggccgacagugaugcccuagcuuucaguggaguaaugguuucagugaaagaaccugguugguacuccuuuggcuuugaaauaaaagauaagaaaugcgauguccccuguauugggauagagaugguacaugaugguggaaaagagacuuggcacucagcagcaacagccauuuacuguuuaaugggcucaggacagcugcugugggacacugucacagguguugacauggcucuguaa

SEQ ID NO: 62413 - RNA, 1401 nt, Artificial Sequence
  derived and/or modified CDS sequence (wt) from neuraminidase__InfluenzaB__AKA54845
augcuaccuucaacuauacaaacguuaacccuauuucucacaucagggggaguauuauuaucacuauaugugucagcuucauuaucauacuuacuauauucggauauauugcuaaaauucucaccaacagaaauaacugcaccaacaaugccauuggauugugcaaacgcaucaaauguucaggcugugaaccguucugcaacaaaaggggugacacuucuucucccagaaccggaguggacauacccgcguuuaucuugcccaggcucaaccuuucagaaagcacuccuaauuagcccucauagauucggagaaaccaauggaaacucagcucccuugauaauaagggaaccuuuuauugcuuguggaccaaaugaaugcaaacacuuugcucuaacccauuaugcagcccaaccagggggauacuacaauggaacaagaggagacagaaacaagcugaggcaucuaauuucagucaaauugggcaaaaucccaacaguagaaaacuccauuuuccacauggcagcauggagcggguccgcgugccaugaugguaaggaauggacauauaucggaguggauggcccugacaauaaugcauugcucaaaguaaaauauggagaagcauauacugacacauaccauuccuaugcaaacaaaauccuaagaacacaagaaagugccugcaauugcaucgggggaaauuguuaucuaaugauaacugauggcucagcuucagguguuagugaaugcagauuucuuaagauucgagagggccgaauaauaaaagaaauauuuccaacaggaagaguaaaacacacugaggaaugcacaugcggauuugccagcaauaaaaccauagaaugugccuguagagacaacagguacacagcaaaaagaccuuuugucaaauuaaacguggagacugauacagcagaaauaagauugaugugcacagauacuuauuuggacacccccagaccaaaugauggaagcauaacaggcccuugugaaucugauggggacgaagggaguggaggcaucaagggaggauuuguucaucaaagaaugaaauccaagauuggaaggugguacucucgaacgaugucuaaaacugaaaggauggggaugggacuguaugucaaguaugauggagacccaugggccgacagugaugcccuagcuuuuaguggaguaaugguuucaaugaaagaaccugguugguacuccuuuggcuucgaaauaaaagauaagaaaugcgauguccccuguauugggauagagaugguacaugaugguggaaaagagacuuggcacucagcagcaacagccauuuacuguuuaaugggcucaggacagcugcugugggacacugucacagguguugacauggcucuguaa

SEQ ID NO: 62414 - RNA, 1401 nt, Artificial Sequence
  derived and/or modified CDS sequence (wt) from neuraminidase__InfluenzaB__AKA54847
augcuaccuucaacuauacaaacguuaacccuauuucucacaucagggggaguauuauuaucacuauaugugucagcuucauuaucauacuuacuauauucggauauauugcuaaaauucucaccaacagaaauaacugcaccaacaaugccauuggauugugcaaacgcaucaaauguucaggcugugaaccguucugcaacaaaaggggugacacuucuucucccagaaccggaguggacauacccgcguuuaucuugcccgggcucaaccuuucagaaagcacuccuaauuagcccucauagauucggagaaaccaaaggaaacucagcucccuuaauaauaagggaaccuuuuauugcuuguggaccaaaugaaugcaaacacuuugcucuaacccauuaugcagcccaaccagggggauacuacaauggaacaagaggagacagaaacaagcugaggcaucuaauuucagucaaauugggcaaaaucccaacaguagagaacuccauuuuccacauggcagcauggagcggguccgcgugccaugaugguaaggaauggacauauaucggaguugauggcccugacaauaaugcauugcucaaaguaaaauauggagaagcauauacugacacauaccauuccuaugcaaacaaaauccuaagaacacaagaaagugccugcaauugcaucgggggaaauuguuaucuaaugauaacugauggcucagcuucagguguuagugaaugcagauuucuuaagauucgagagggccgaauaauaaaagaaauauuuccaacaggaagaguaaaacacacugaggaaugcacaugcggauuugccagcaauaaaaccauagaaugugccuguagagacaacagguacacagcaaaaagaccuuuugucaaauuaaacguggagacugauacagcagaaauaagauugaugugcacagauacuuauuuggacacccccagaccaaaugauggaagcauaacaggcccuugugaaucugauggggacaaagggaguggaggcaucaagggaggauuuguucaucaaagaaugaaauccaagauuggaaggugguacucucgaacgaugucuaaaacugaaaggauggggaugggacuauaugucaaguaugauggagacccaugggcugacagugaugcccuagcuuuuaguggaguaaugguuucaaugaaagaaccugguugguauuccuuuggcuucgaaauaaaagauaagaaaugcgauguccccuguauugggauagagaugguacaugaugguggaaaagagacuuggcacucagcagcaacagccauuuacuguuuaaugggcucaggacagcugcugugggacacugucacagguguugacauggcucuguaa

SEQ ID NO: 62415 - RNA, 1401 nt, Artificial Sequence
  derived and/or modified CDS sequence (wt) from neuraminidase__InfluenzaB__AKA54849
augcuaccuucaacuauacaaacguuaacccuauuucucacaucagggggaguauuauuaucacuauaugugucagcuucauuaucauacuuauuauauucggauauauugcuaaaauucucaucaacagaaauaacugcaccaacaaugccauuggauugugcaaacgcaucaaauguucaggcugugaaccguucugcaacaaaaggggugacacuucuucucccagaaccggaguggacauacccgcguuuaucuugcccgggcucaaccuuucagaaagcacuccuaauuagcccucauagauucggagaaaccaauggaaacucagcucccuugauaauaagggaaccuuuuauugcuuguggaccaaaugaaugcaaacacuuugcucuaacccauuaugcagcccaaccagggggauacuacaauggaacaagaggagacagaaacaagcugaggcaucuaauuucagucaaauugggcaaaaucccaacaguagaaaacuccauuuuccacauggcagcauggagcggguccgcgugccaugaugguaaggaauggacauauaucggaguugauggcccugacaauaaugcauugcucaaaguaaaauauggagaagcauauacugacacauaccauuccuaugcaaacaaaauccuaagaacacaagaaagugccugcaauugcaucgggggaaauuguuaucuaaugauaacugauggcucagcuucagguguuagugaaugcagauuucuuaagauucgagagggccgaauaauaaaagaaauauuuccaacaggaagaguaaaacacacugaggaaugcacaugcggauuugccagcaauaaaaccauagaaugugccuguagagacaacagguacacagcaaaaagaccuuuugucaaauuaaacguggagacugauacagcagaaauaagauugaugugcacagauacuuauuuggacacccccagaccaaaugauggaagcauaacaggcccuugugaaucugauggggacgaaggggguggaggcaucaagggaggauuuguucaucaaagaaugaaauccaagauuggaaggugguacucucgaacgaugucuaaaacugaaaggauggggaugggacuguaugucaaauaugauggagacccaugggccgacagugaugcccuagcuuuuaguggaguaaugguuucaaugaaagaaccugguugguacuccuuuggcuucgaaauaaaagauaagaaaugcgauguccccuguauugggauagagaugguacaugaugguggaaaagagacuuggcacucagcagcaacagccauuuacuguuuaaugggcucaggacagcugcugugggacacugucacagguguugacauggcucuguaa

SEQ ID NO: 62416 - RNA, 1401 nt, Artificial Sequence
  derived and/or modified CDS sequence (wt) from neuraminidase__InfluenzaB__AKA54851
augcuaccuucaacuauacaaacguuaacccuauuucucacaucagggggaguauuauuaucacuauaugugucagcuucauuaucauacuuacuauauucggauauauugcuaaaauucucaccaacagaaauaacugcaccaacaaugccauuggauugugcaaacgcaucaaauguucaggcugugaaccguucugcaacaaaaggggugacacuucuucucccagaaccggaguggacauacccgcguuuaucuugcccgggcucaaccuuucagaaagcacuccuaauuagcccucauagauucggagaaaccaaaggaaacucagcucccuuaauaauaagggaaccuuuuauugcuuguggaccaaaugaaugcaaacacuuugcucuaacccauuaugcagcccaaccagggggauacuacaauggaacaagaggagacagaaacaagcugaggcaucuaauuucagucaaauugggcaaaaucccaacaguagagaacuccauuuuccacauggcagcauggagcggguccgcgugccaugaugguaaggaauggacauauaucggaguugauggcccugacaauaaugcauugcucaaaguaaaauauggagaagcauauauugacacauaccauuccuaugcaaacaaaauccuaagaacacaagaaagugccugcaauugcaucgggggaaauuguuaucuaaugauaacugauggcucagcuucagguguuagugaaugcagauuucuuaagauucgagagggccgaauaauaaaagaaauauuuccaacaggaagaguaaaacacacugaggaaugcacaugcggauuugccagcaauaaaaccauagaaugugccuguagagacaacagguacacagcaaaaagaccuuuugucaaauuaaacguggagacugauacagcagaaauaagauugaugugcacagauacuuauuuggacacccccagaccaaaugauggaagcauaacaggcccuugugaaucugauggggacaaagggaguggaggcaucaagggaggauuuguucaucaaagaaugaaauccaagauuggaaggugguacucucgaacgaugucuaaaacugaaaggauggggaugggacuauaugucaaguaugauggagacccaugggcugacagugaugcccuagcuuuuaguggaguaaugguuucaaugaaagaaccugguugguauuccuuuggcuucgaaauaaaagauaagaaaugcgauguccccuguauugggauagagaugguacaugaugguggaaaagagacuuggcacucagcagcaacagccauuuacuguuuaaugggcucaggacagcugcugugggacacugucacagguguugacauggcucuguaa

SEQ ID NO: 62417 - RNA, 1401 nt, Artificial Sequence
  derived and/or modified CDS sequence (wt) from neuraminidase__InfluenzaB__AKA54853
augcuaccuucaacuauacaaacguuaacccuauuucucacaucagggggaguauuauuaucacuauaugugucagcuucauuaucauacuuacuauauucggauauauugcuaaaauucucaccaacagaaauaacugcaccaacaaugccauuggauugugcaaacgcaucaaauguucaggcugugaaccguucugcaacaaaaggggugacacuucuucucccagaaccggaguggacauacccgcguuuaucuugcccgggcucaaccuuucagaaagcacuccuaauuagcccucauagauucggagaaaccaaaggaaacucagcucccuugauaauaagggaaccuuuuauugcuuguggaccaaaugaaugcaaacacuuugcucuaacccauuaugcagcccaaccagggggauacuacaauggaacaagaggagacagaaacaagcugaggcaucuaauuucagucaaauugggcaaaaucccaacaguagaaaacuccauuuuccacauggcagcauggagcggguccgcgugccaugaugguaaggaauggacauauaucggaguugauggcccugacaauaaugcauugcucaaaguaaaauauggagaagcauauacugacacauaccauuccuaugcaaacaaaauccuaagaacacaagaaagugccugcaauugcaucgggggaaauuguuaucuaaugauaacugauggcucagcuucagguguuagugaaugcagauuucuuaagauucgagagggccgaauaauaaaagaaauauuuccaacaggaagaguaaaacacacugaggaaugcacaugcggauuugccagcaauaaaaccauagaaugugccuguagagacaacagguacacagcaaaaagaccuuuugucaaauuaaacguggagacugauacagcagaaauaagauugaugugcacagauacuuauuuggacacccccagaccaaaugauggaagcauaacaggcccuugugaaucugauggggacgaagggaguggaggcgucaagggaggauuuguucaucaaagaaugaaauccaagauugggaggugguacucucgaacgaugucuaaaacugaaaggauggggaugggacuguaugucaaguaugauggagacccaugggccgacagugaugcccuagcuuucaguggaguaaugguuucagugaaagaaccugguugguacuccuuuggcuuugaaauaaaagauaagaaaugcgauguccccuguauugggauagagaugguacaugaugguggaaaagagacuuggcacucagcagcaacagccauuuacuguuuaaugggcucaggacagcugcugugggacacugucacagguguugacauggcucuguaa

SEQ ID NO: 62418 - RNA, 1401 nt, Artificial Sequence
  derived and/or modified CDS sequence (wt) from neuraminidase__InfluenzaB__AKA54855
augcuaccuucaacuauacaaacguuaacccuauuucucacaucagggggaguauuauuaucacuauaugugucagcuucauuaucauacuuacuauauucggauauauugcuaaaauucucaccaacagaaauaacugcaccaacaaugccauuggauugugcaaacgcaucaaauguucaggcugugaaccguucugcaacaaaaggggugacacuucuucucccagaaccggaguggacauacccgcguuuaucuugcccgggcucaaccuuucagaaagcacuccuaauuagcccucauagauucggagaaaccaaaggaaacucagcucccuuaauaauaagggaaccuuuuauugcuuguggaccaaaugaaugcaaacacuuugcucuaacccauuaugcagcccaaccagggggauacuacaauggaacaagaggagacagaaacaagcugaggcaucuaauuucagucaaauugggcaaaaucccaacaguagagaacuccauuuuccacauggcagcauggagcggguccgcgugccaugaugguaaggaauggacauauaucggaguugauggcccugacaauaaugcauugcucaaaguaaaauauggagaagcauauacugacacauaccauuccuaugcaaacaaaauccuaagaacacaagaaagugccugcaauugcaucgggggaaauuguuaucuaaugauaacugauggcucagcuucagguguuagugaaugcagauuucuuaagauucgagagggccgaauaauaaaagaaauauuuccaacaggaagaguaaaacacacugaggaaugcacaugcggauuugccagcaauaaaaccauagaaugugccuguagagacaacagguacacagcaaaaagaccuuuugucaaauuagacguggagacugauacagcagaaauaagauugaugugcacagauacuuauuuggacacccccagaccaaaugauggaagcauaacaggcccuugugaaucugauggggacaaagggaguggaggcaucaagggaggauuuguucaucaaagaaugaaauccaagauuggaaggugguacucucgaacgaugucuaaaacugaaaggauggggaugggacuauaugucaaguaugauggagacccaugggcugacagugaugcccuagcuuuuaguggaguaaugguuucaaugaaagaaccugguugguauuccuuuggcuucgaaauaaaagauaagaaaugcgauguccccuguauugggauagagaugguacaugaugguggaaaagagacuuggcacucagcagcaacagccauuuacuguuuaaugggcucaggacagcugcugugggacacugucacagguguugacauggcucuguaa

SEQ ID NO: 62419 - RNA, 1401 nt, Artificial Sequence
  derived and/or modified CDS sequence (wt) from neuraminidase__InfluenzaB__AKT07927
augccaccuucaacuauacaaacguuaacccuauuucucacaucagggggaguauuauuaucacuauaugugucagcuucauuaucauacuuacuauauucggauauauugcuaaaauucucaccaacagaaauaacugcaccaacaaugccauuggauugugcaaacgcaucaaauguucaggcugugaaccguucugcaacaaaaggggugacacuucuucucccagaaccggaguggacauacccgcguuuaucuugcccgggcucaaccuuucagaaagcacuccuaauuagcccucauagauucggagaaaccagaggaaacucagcucccuugauaauaagggaaccuuuuauugcuuguggaccaaaugaaugcaaacacuuugcucuaacccauuaugcagcccaaccagggggauacuacaauggaacaagaggagacagaaacaagcugaggcaucuaauuucagucaaauugggcaaaaucccaacaguagaaaacuccauuuuccacauggcagcauggagcggguccgcgugccaugaugguaaggaauggacauauaucggaguugauggcccugacaacaaugcauugcucaaaguaaaauauggagaagcauauacugacacauaccauuccuaugcaaacaaaauccuaagaacacaagaaagugccugcaauugcaucgggggaaauuguuaucuuaugauaacugauggcucagcuucagguguuagugaaugcagauuucuuaagauucgagagggccgaauaauaaaagaaauauuuccaacaggaagaguaaaacacacugaggaaugcacaugcggauuugccagcaauaaaaccauagaaugugccuguagagauaacaguuacacagcaaaaagaccuuuugucaaauuaaacguggagacugauacagcagaaauaagauugaugugcacagauacuuauuuggacacccccagaccaaaugauggaagcauaacaggcccuugugaaucugauggggacaaagggaguggaggcaucaagggaggauuuguucaucaaagaauggaauccaagauuggaaggugguacucccgaacgaugucuaaaacugaaaggauggggaugggacuguaugucaaguaugauggagacccauggacugacagugaugcccuagcuuuugguggaguaaugguuucaaugaaagaaccugguugguacuccuuuggcuucgaaauaaaagauaagaaaugcgauguccccuguauugggauagagaugguacaugaugguggaaaagagacuuggcacucagcagcaacagccauuuacuguuuaaugggcucaggacagcugcugugggacacugucacagguguugacauggcucuguaa

SEQ ID NO: 62420 - RNA, 1401 nt, Artificial Sequence; identical to SEQ ID NO: 61131
  derived and/or modified CDS sequence (wt) from neuraminidase__InfluenzaB__AKT07931

SEQ ID NO: 62421 - RNA, 1401 nt, Artificial Sequence
  derived and/or modified CDS sequence (wt) from neuraminidase__InfluenzaB__AKT07933
augcuaccuucaacuauacaaacguuaacccuauuucucacaucagggggaguauuauuaucacuauaugugucagcuucauuaucauacuuacuauauucggauauauugcuaaaauucucaccaacagaaauaacugcaccagcaaugccauuggauugugcaaacgcaucaaauguucaggcugugaaccguucugcaacaaaaggggugacauuucuucucccagaaccggaguggacauacccgcguuuaucuugcccgggcucaaccuuucagaaagcacuccuaauuagcccucauagauucggagaaaccaaaggaaacucagcucccuugauaauaagggaaccuuuuauugcuuguggaccaaaugaaugcaaacacuuugcucuaacccauuaugcagcccaaccagggggauacuacaauggaacaagaggagacagaaacaagcugaggcaucuaauuucagucaaauugggcaaaaucccaacaguagaaaacuccauuuuccacauggcagcauggagcggguccgcgugccaugaugguaaggaauggacauauaucggaguugauggcccugacaauaaugcauugcucaaaguaaaauauggagaagcauauacugacacauaccauuccuaugcaaacaaaauccuaagaacacaagaaagugccugcaauugcaucgggggaaauuguuaucuuaugauaacugauggcucagcuucagguguuagugaaugcagauuucuuaagauucgagagggccgaauaauaaaagaaauauuuccaacaggaagaguaaaacacacugaggaaugcacaugcggauuugccagcaauaaaaccauagaaugugccuguagagauaacaguuacacagcaaaaagaccuuuugucaaauuaaacguggagacugauacagcagaaauaagauugaugugcacagauacuuauuuggacacccccagaccaaaugauggaagcauaacaggcccuugugaaucugauggggacaaagggaguggaggcaucaagggaggauuuguucaucaaagaauggaauccaagauuggaaggugguacucucgaacgaugucuaaaacugaaaggauggggaugggacuguaugucaaguaugauggagacccaugggcugacagugaugcccuagcuuuuaguggaguaaugguuucaaugaaagaaccugguugguacuccuuuggcuucgaaauaaaagauaagaaaugcgauguccccuguauugggauagagaugguacaugaugguggaaaagagacuuggcacucagcagcaacagccauuuacuguuuaaugggcucaggacagcugcugugggacacugucacagguguugacauggcucuguaa

SEQ ID NO: 62422 - RNA, 1401 nt, Artificial Sequence; identical to SEQ ID NO: 61131
  derived and/or modified CDS sequence (wt) from neuraminidase__InfluenzaB__AKT07935

SEQ ID NO: 62423 - RNA, 1401 nt, Artificial Sequence; identical to SEQ ID NO: 61131
  derived and/or modified CDS sequence (wt) from neuraminidase__InfluenzaB__AKT07937

SEQ ID NO: 62424 - RNA, 1401 nt, Artificial Sequence
  derived and/or modified CDS sequence (wt) from neuraminidase__InfluenzaB__AKT07939
augcuaccuucaacuauacaaacguuaacccuauuucucacaucagggggaguauuauuaucacuauaugugucagcuucauuaucauacuuacuauauucggauauauugcuaaaauucucaccaacagaaauaacugcaccaacaaugccauuggauugugcaaacgcaucaaauguucaggcugugaaccguucugcaacaaaaggggugacacuucuucucccagaaccggaguggacauacccgcguuuaucuugcccgggcucaaccuuucagaaagcacuccuaauuagcccucauagauucggagaaaccaaaggaaacucagcucccuugauaauaagggaaccuuuuauugcuuguggaccaaaugaaugcaaacacuuugcucuaacccauuaugcagcccaaccagggggauacuacaauggaacaagaggagacagaaacaagcugaggcaucuaauuucagucaaauugggcaaaaucccaacaguagaaaacuccauuuuccacauggcagcauggagcggguccgcgugccaugaugguaaggaauggacauauaucggcguugauggcccugacaauaaugcauugcucaaaguaaaauauggagaagcauauacugacacauaccauuccuaugcaaacaaaauccuaagaacacaagaaagugccugcaauugcaucgggggaaauuguuaucuuaugauaaccgauggcucagcuucagguguuagugaaugcagauuucuuaagauucgagagggccgaauaauaaaagaaauauuuccaacaggaagaguaaaacacacugaggaaugcacaugcggauuugccagcaauaaaaccauagaaugugccuguagagauaacaguuacacagcaaaaagaccuuuugucaaauuaaacguggagacugauacagcagaaauaagauugaugugcacagauacuuauuuggacacccccagaccaaaugauggaagcauaacaggcccuugugaaucuaauggggacaaagggaguggaggcaucaagggaggauuuguucaucaaagaauggaauccaagauuggaaggugguacucucgaacgaugucuaaaacugaaaggauggggaugggacuguaugucaaguaugauggggacccaugggcugacagugaugcccuagcuuuuaguggaguaaugguuucaaugaaagaaccugguugguacuccuuuggcuucgaaauaaaagacaagaaaugcgauguccccuguauugggauagagaugguacaugaugguggaaaagagacuuggcacucagcagcaacagccauuuacuguuuaaugggcucaggacagcuguugugggacacugucacagguguugacauggcucuguaa

SEQ ID NO: 62425 - RNA, 1401 nt, Artificial Sequence
  derived and/or modified CDS sequence (wt) from neuraminidase__InfluenzaB__AKT07941
augcuaccuucaacuauacaaacguuaacccuauuucucacaucagggggaguauuauuaucacuauaugugucagcuucauuaucauacuuacuauauucggauauauugcuaaaauucucaccaacagaaauaacugcaccagcaaugccauuggauugugcaaacgcaucaaauguucaagcugugaaccguucugcaacaaaaggggugacacuucuucucccagaaccggaguggacauacccgcguuuaucuugcccgggcucaaccuuucagaaagcacuccuaauuagcccucauagauucggagaaaccaaaggaaacucagcucccuugauaauaagggaaccuuuuauugcuuguggaccaaaugaaugcaaacacuuugcucuaacccauuaugcagcccaaccagggggauacuacaauggaacaagaggagacagaaacaagcugaggcaucuaauuucagucaaauugggcaaaaucccaacaguagaaaacuccauuuuccacauggcagcauggagcggguccgcgugccaugaugguaaggaauggacauauaucggaguugauggcccugacaauaaugcauugcucaaaguaaaauauggagaagcauauacugacacauaccauuccuaugcaaacaaaauccuaagaacacaagaaagugccugcaauugcaucgggggaaauuguuaucuuaugauaacugauggcucagcuucagguguuagugaaugcagauuucuuaagauucgagagggccgaauaauaaaagaaauauuuccaacaggaagaguaaaacacacugaggaaugcacaugcggauuugccagcaauaaaaccauagaaugugccuguagagauaacaguuacacagcaaaaagaccuuuugucaaauuaaacguggagacugauacagcagaaauaagauugaugugcacagauacuuauuuggacacccccagaccaaaugauggaagcauaacaggcccuugugaaucugauggggacaaagggaguggaggcaucaagggaggauuuguucaucaaagaauggaauccaagauuggaaggugguacucucgaacgaugucuaaaacugaaaggauggggaugggacuguaugucaaguaugauggagacccaugggcugacagugaugcccuagcuuuuaguggaguaaugguuucaaugaaagaaccugguugguacuccuuuggcuucgaaauaaaagauaagaaaugcgauguccccuguauugggauagagaugguacaugaugguggaaaagagacuuggcacucagcagcaacagccauuuacuguuuaaugggcucaggacagcugcugugggacacugucacagguguugacauggcucuguaa

SEQ ID NO: 62426 - RNA, 1401 nt, Artificial Sequence; identical to SEQ ID NO: 61131
  derived and/or modified CDS sequence (wt) from neuraminidase__InfluenzaB__AKT07945

SEQ ID NO: 62427 - RNA, 1401 nt, Artificial Sequence
  derived and/or modified CDS sequence (wt) from neuraminidase__InfluenzaB__AKT07947
augcuaccuucaacuauacaaacguuaacccuauuucucacaucagggggaguauuauuaucacuauaugugucagcuucauuaucauacuuacuauauucggauauauugcuaaaauucucaccaacagaaauaacugcaccagcaaugccauuggauugugcaaacgcaucaaauguucaggcugugaaccguucugcaacaaaaggggugacacuucuucucccagaaccggaguggacauacccgcguuuaucuugcccgggcucaaccuuucagaaagcacuccuaauuagcccucauagauucggagaaaccaaaggaaacucagcucccuugauaauaagggaaccuuuuauugcuuguggaccaaaugaaugcaaacacuuugcucuaacccauuaugcagcccaaccagggggauacuacaauggaacaagaggagacagaaacaagcugaggcaucuaauuucagucaaauugggcaaaaucccaacaguagaaaacuccauuuuccacauggcagcauggagcggguccgcgugccaugaugguaaggaauggacauauaucggaguugauggcccugacaauaaugcauuacucaaaguaaaauauggagaagcauauacugacacauaccauuccuaugcaaacaaaauccuaagaacacaagaaagugccugcaauugcaucgggggaaauuguuaucuuaugauaacugauggcucagcuucagguguuagugaaugcagauuucuuaagauucgagagggccgaauaauaaaagaaauauuuccaacaggaagaguaaaacacacugaggaaugcacaugcggauuugccagcaauaaaaccauagaaugugccuguagagauaacaguuacacagcaaaaagaccuuuugucaaauuaaacguggagacugauacagcagaaauaagauugaugugcacagauacuuauuuggacacccccagaccaaaugauggaagcauaacaggcccuugugaaucugauggggacaaagggaguggaggcaucaagggaggauuuguucaucaaagaauggaauccaagauuggaaggugguacucucgaacgaugucuaaaacugaaaggauggggaugggacuauaugucaaguaugauggagacccaugggcugacagugaugcccuagcuuuuaguggaguaaugguuucaaugaaagaaccugguugguacuccuuuggcuucgaaauaaaagauaagaaaugcgauguccccuguauugggguugauaugguacaugauugugggaaagagacuuggcacucagcagcaacagccauuuacuguuuaaugggcucaggacaguugcugugggacacugucacagguguugacauggcucuguaa

SEQ ID NO: 62428 - RNA, 1401 nt, Artificial Sequence; identical to SEQ ID NO: 62397
  derived and/or modified CDS sequence (wt) from neuraminidase__InfluenzaB__AKU40585

SEQ ID NO: 62429 - RNA, 1401 nt, Artificial Sequence; identical to SEQ ID NO: 62397
  derived and/or modified CDS sequence (wt) from neuraminidase__InfluenzaB__AKU40596

SEQ ID NO: 62430 - RNA, 1401 nt, Artificial Sequence
  derived and/or modified CDS sequence (wt) from neuraminidase__InfluenzaB__AKU40607
augcuaccuucaacuauacaaacguuaaccuuauuucucacaucagggggaguguuauuaucacuauaugugucagcuucauugucauacuuacuauauucggauauauugcuaaaauuuucacgaacagaaguaacugcaccaauaacgccauuggauugugcaaacgcaucaaaugcucaggcugugaaccguucugcaacaaaaggggugacaccucuucucccagaaccggaguggacguacccucguuuaucuugcccgggcucaaccuuucagaaagcacuccuaauuagcccccauagauucggagaaaccaaaggaaacucagcucccuugauaauaagggaaccuuuuauugcuuguggaccaaaggaaugcaaacauuuugcucuaacccauuaugcagcucaaccagggggauacuacaauggaacaagagaagacagaaacaagcugaggcaucuaauuucagucaaauugggcaaaaucccaacaguagaaaacucuauuuuccacauggcagcuuggagcggguccgcaugccaugaugguagagaauggacuuacaucggaguugauggcccagacaguaaugcauugcucaaaauaaaauauggagaagcauauacugacacauaccauuccuaugcaaaaaacauccuaaggacacaagaaagugccugcaauugcaucgggggagauuguuaucugaugauaacugauggcccagcuucagggauuagugaaugcagauuccuuaagauucgagagggccgaauaauaaaagaaauauuuccaacaggaagaguaaaacauacugaggaaugcacaugcggauuugccagcaacaaaaccauagaaugugccuguagagauaacaguuacacagcaaaaagacccuuugucaaauuaaauguggagacugauacagcggaaauaagauugaugugcacaaagacuuauuuggacacccccagaccaaaugaugggagcauaacagggccuugcgaaucugauggggacgaagggaguggaggcaucaagggaggauuuguucaccaaagaauggcauccaagauuggaaggugguacucucggacgaugucuaaaacuaaaagaauggggaugggacuguauguaaaguaugauggagacccauggacugacagugaagcccuugcucuuaguggaguaaugguuucaauggaagaaccugguugguauuccuuuggcuucgaaauaaaagauaagaaaugugauguccccuguauugggauagaaaugguacaugauggugggaaaacgacuuggcacucagcagcaacagccauuuacuguuuaaugggcucaggacaacugcugugggacacugucacagguguuaauaugacucuguaa

SEQ ID NO: 62431 - RNA, 1401 nt, Artificial Sequence
  derived and/or modified CDS sequence (wt) from neuraminidase__InfluenzaB__AKU40618
augcuaccuucaacuauacaaacguuaaccuuauuucucacaucagggggaguguuauuaucacuauaugugucagcuucauugucauacuuacuauauucggauauauugcuaaaauuuucacgaacagaaguaacugcaccaauaaugccauuggauugugcaaacgcaucaaauguucaggcugugaaccguucugcaacaaaaggggugacaccucuucucccagaaccggaguggacguacccucguuuaucuugcccgggcucaaccuuucagaaagcacuccuaauuagcccccauagauucggagaaaccaaaggaaacucagcucccuugauaauaagggaaccuuuuauugcuuguggaccaaaggaaugcaaacauuuugcucuaacccauuaugcagcucaaccagggggauauuacaauggaacaagagaagacagaaacaagcugaggcaucuaauuucagucaaauugggcaaaaucccaacaguagaaaacucuauuuuccacauggcagcuuggagcggguccgcaugccaugaugguagagaauggacuuacaucggaguugauggcccagacaguaaugcauugcucaaaauaaaauauggagaagcauauacugacacauaccauuccuaugcaaaaaacauccuaaggacacaagaaagugccugcaauugcaucgggggagauuguuaucugaugauaacugauggcccagcuucagggauuagugaaugcagauuccuuaagauucgagagggccgaauaauaaaagaaauauuuccaacaggaagaguaaaacauacugaggaaugcacaugcggauuugccagcaacaaaaccauagaaugugccuguagagauaacaguuacacagcaaaaagacccuuugucaaauuaaauguggagacugauacagcggaaauaagauugaugugcacaaagacuuauuuggacacccccagaccaaaugauggaagcauaacagggccuugcgaaucugauggggacgaagggaguggaggcaucaagggaggauuuguucaccaaagaauggcauccaagauuggaaggugguacucucggacgaugucuaaaacuaaaagaauggggaugggacuguauguaaaguaugauggagacccauggacugacagugaagcccuugcucuuaguggaguaaugguuucaauggaagaaccugguugguauuccuuuggcuucgaaauaaaagauaauaaaugugauguccccuguauugggauagaaaugguacaugauggugggaaaacgacuuggcacucagcggcaacagccauuuacuguuuaaugggcucaggacaacugcugugggacacugucacagguguuaauaugacucuguaa

SEQ ID NO: 62432 - RNA, 1401 nt, Artificial Sequence
  derived and/or modified CDS sequence (wt) from neuraminidase__InfluenzaB__AKU40640
augcuaccuucaacuauacaaacguuaaccuuauuucucacaucagggggaguguuauuaucacuauaugugucagcuucauugucauacuuacuauauucggauauauuacuaaaauuuucacgaacagaaauagcugcaccaauaaugccauuggauugugcaaaugcaucaaauguucaggcugugaaccguucugcaacaaaagggguggcacuucuucucccagaaccggaguggacguacccucguuuaucuugcccgggcucaaccuuucagaaagcacuccuaauuagcccccauagauucggagaaaccaaaggaaacucagcucccuugauaauaagggaaccuuuuauugcuuguggaccaaaggaaugcaaacauuuugcucuaacccacuaugcagcucaaccagggggauacuacaauggaacaagagaagacagaaacaagcugaggcaucuaauuucagucaaauugggcaaaaucccaacaguagaaaacucuauuuuccacauggcagccuggagcggguccgcaugccaugaugguagagaauggacuuauaucggaguugauggccccgacaauaaugcauugcucaaaauaaaauauggagaagcauauacugacacauaccauuccuaugcaaaaaacauccuaaggacacaagaaagugccugcaauugcaucgggggagauuguuaucuuaugauaacugauggcccagcuucagggauuagugaaugcagauuccuuaagauucgagaaggccgaauaauaaaagaaauauuuccaacaggaagaguaaaacauacugaggaaugcacaugcggauuugccagcaauaaaaccauagaaugugccuguagagauaacaguuacacagcaaaaagacccuuugucaaauuaaauguggagacugauacagcggaaauaagauugaugugcacagagacuuauuuggacacccccagaccaaaugauggaagcauaacagggccuugcgaaucuaauggggacaaagggaguggaggcaucaagggaggauuuguucaccaaaggauggcauccaagauuggaaggugguacucucgaacgaugucuaaaacuaaaagaauggggaugggacuguauguaaaguaugauggagacccauggacugacagugaagcccuugcucuuaguggaguaaugguuucaauggaagaaccugguugguauuccuuuggcuucgaaauaaaagauaagaaaugugauguccccuguauugggauagaaaugguacaugauggugggaaaacgacuuggcacucagcagcaacagccauuuacuguuuaaugggcucaggacaacugcugugggacacugucacagguguuaauaugacucuguaa

SEQ ID NO: 62433 - RNA, 1401 nt, Artificial Sequence; identical to SEQ ID NO: 62397
  derived and/or modified CDS sequence (wt) from neuraminidase__InfluenzaB__AKU40662

SEQ ID NO: 62434 - RNA, 1401 nt, Artificial Sequence
  derived and/or modified CDS sequence (wt) from neuraminidase__InfluenzaB__AKU40673
augcuaccuucaacuauacaaacguuaaccuuauuucucacaucagggggaguguuauuaucacuauaugugucagcuucauugucauacuuacuauauucggauauauugcuaaaauuuucacgaacagaaguaacugcaccaauaaugccauuggauugugcaaacgcaucaaauguucaggcugugaaccguucugcaacaaaaggggugacaccucuucucccagaaucggaguggacguacccucguuuaucuugcccgggcucaaccuuucagaaagcacuccuaauuagcccccauagauucggagaaaccaaaggaaacucagcucccuugauaauaagggaaccuuuuauugcuuguggaccaaaggaaugcaaacauuuugcucuaacccauuaugcagcucaaccagggggauauuacaauggaacaagagaagacagaaacaagcugaggcaucuaauuucagucaaauugggcaaaaucccaacaguagaaaacucuauuuuccacauggcagcuuggagcggguccgcaugccaugaugguagagaauggacuuacaucggaguugauggcccagacaguaaugcauugcucaaaauaaaauauggagaagcauauacugacacauaccauuccuaugcaaaaaacauccuaaggacacaagaaagugccugcaauugcaucgggggagauuguuaucugaugauaacugauggcccagcuucagggauuagugaaugcagauuccuuaagauucgagagggccgaauaauaaaagaaauauuuccaacaggaagaguaaaacauacugaggaaugcacaugcggauuugccagcaacaaaaccauagaaugugccuguagagauaacaguuacacagcaaaaagacccuuugucaaauuaaauguggagacugauacagcggaaauaagauugaugugcacaaagacuuauuuggacacccccagaccaaaugauggaagcauaacagggccuugcgaaucugauggggacgaagggaguggaggcaucaagggaggauuuguucaccaaagaauggcauccaagauuggaaggugguacucucggacgaugucuaaaacuaaaagaauggggaugggacuguauguaaaguaugauggagacccauggacugacagugaagcccuugcucuuaguggaguaaugguuucaauggaagaaccugguugguauuccuuuggcuucgaaauaaaagauaagaaaugugauguccccuguauugggauagaaaugguacaugauggugggaaaacgacuuggcacucagcggcaacagccauuuacuguuuaaugggcucaggacaacugcugugggacacugucacagguguuaauaugacucuguaa

SEQ ID NO: 62435 - RNA, 1401 nt, Artificial Sequence; identical to SEQ ID NO: 62397
  derived and/or modified CDS sequence (wt) from neuraminidase__InfluenzaB__AKU40684

SEQ ID NO: 62436 - RNA, 1401 nt, Artificial Sequence; identical to SEQ ID NO: 62397
  derived and/or modified CDS sequence (wt) from neuraminidase__InfluenzaB__AKU40695

SEQ ID NO: 62437 - RNA, 1401 nt, Artificial Sequence; identical to SEQ ID NO: 62404
  derived and/or modified CDS sequence (wt) from neuraminidase__InfluenzaB__AKU40706

SEQ ID NO: 62438 - RNA, 1401 nt, Artificial Sequence
  derived and/or modified CDS sequence (wt) from neuraminidase__InfluenzaB__AKU40717
augcuaccuucaacuauacaaacauuaaccuuauuucucacaucagggggaguguuauuaucacuauaugugucagcuucauugucauacuuacuauauucggauauauugcuaaaauuuucacgaacagaaguaacugcaccaauaaugccauuggauugugcaaacgcaucaaauguucaggcugugaaccguucugcaacaaaaggggugacaccucuucucccagaaccggaguggacguacccucguuuaucuugcccgggcucaaccuuucagaaagcacuccuaauuagcccccauagauucggagaaaccaaaggaaacucagcucccuugauaauaagggaaccuuuuauugcuuguggaccaaaggaaugcaaacauuuugcucuaacccauuaugcagcucaaccagggggauauuacaauggaacaagagaagacagaaacaagcugaggcaucuaauuucagucaaauugggcaaaaucccaacaguagaaaacucuauuuuccacauggcagcuuggagcggguccgcaugccaugaugguagagaauggacuuacaucggaguugauggcccagacaguaaugcauugcucaaaauaaaauauggagaagcauauacugacacauaccauuccuaugcaaaaaacauccuaaggacacaagaaagugccugcaauugcaucgggggagauuguuaucugaugauaacugauggcccagcuucagggauuagugaaugcagauuccuuaagauucgagagggccgaauaauaaaagaaauauuuccaacaggaagaguaaaacauacugaggaaugcacaugcggauuugccagcaacaaaaccauagaaugugccuguagagauaacaguuacacagcaaaaagacccuuugucaaauuaaauguggagacugauacagcggaaauaagauugaugugcacaaagacuuauuuggacacccccagaccaaaugauggaagcauaacagggccuugcgaaucugauggggacgaagggaguggaggcaucaagggaggauuuguucaccaaagaauggcauccaagauuggaaggugguacucucggacgaugucuaaaacuaaaagaauggggaugggacuguauguaaaguaugauggagacccauggacugacagugaagcccuugcucuuaguggaguaaugguuucaauggaagaaccugguugguauuccuuuggcuucgaaauaaaagauaagaaaugugauguccccuguauugggauagaaaugguacaugauggugggaaaacgacuuggcacucagcggcaacagccauuuacuguuuaaugggcucaggacaacugcugugggacacugucacagguguuaauaugacucuguaa

SEQ ID NO: 62439 - RNA, 1401 nt, Artificial Sequence
  derived and/or modified CDS sequence (wt) from neuraminidase__InfluenzaB__AKU40728
augcuaccuucaacuauacaaacguuaaccuuauuucucacaucagggggaguguuauuaucacuauaugugucagcuucauugucauacuuacuauauucggauauauugcuaaaauuuucacgaacagaaguaacugcaccaauaaugccauuggauugugcaaacgcaucaaaugcucaggcugugaaccguucugcaacaaaaggggugacaccucuucucccagaaccggaguggacguacccucguuuaucuugcccgggcucaaccuuucagaaagcacuccuaauuagcccccauagauucggagaaaccaaaggaaacucagcucccuugauaauaagggaaccuuuuauugcuuguggaccaaaggaaugcaaacauuuugcucuaacccauuaugcagcucaaccagggggauacuacaauggaacaagagaagacagaaacaagcugaggcaucuaauuucagucaaauugggcaaaaucccaacaguagaaaacucuauuuuccacauggcagcuuggagcggguccgcaugccaugaugguagagaauggacuuacaucggaguugauggcccagacaguaaugcauugcucaaaauaaaauauggagaagcauauacugacacauaccauuccuaugcaaaaaacauccuaaggacacaagaaagugccugcaauugcaucgggggagauuguuaucugaugauaacugauggcccagcuucagggauuagugaaugcagauuccuuaagauucgagagggccgaauaauaaaagaaauauuuccaacaggaagaguaaaacauacugaggaaugcacaugcggauuugccagcaacaaaaccauagaaugugccuguagagauaacaguuacacagcaaaaagacccuuugucaaauuaaauguggagacugauacagcggaaauaagauugaugugcacaaagacuuauuuggacacccccagaccaaaugaugggagcauaacagggccuugcgaaucugauggggacgaagggaguggaggcaucaagggaggauuuguucaccaaagaauggcauccaagauuggaaggugguacucucggacgaugucuaaaacuaaaagaaugggaaugggacuguauguaaaguaugauggagacccauggacugacagugaagcccuugcucuuaguggaguaaugguuucaauggaagaaccugguugguauuccuuuggcuucgaaauaaaagauaagaaaugugauguccccuguauugggauagaaaugguacaugauggugggaaaacgacuuggcacucagcagcaacagccauuuacuguuuaaugggcucaggacaacugcugugggacacugucacagguguuaauaugacucuguaa

SEQ ID NO: 62440 - RNA, 1401 nt, Artificial Sequence
  derived and/or modified CDS sequence (wt) from neuraminidase__InfluenzaB__AKU40739
augcuaccuucaacuauacaaacguuaaccuuauuucucacaucagggggaguguuauuaucacuauaugugucagcuucauugucauacuuacuauauucggauauauugcuaaaauuuucacgaacagaaguaacugcaccaauaaugccauuggauugugcaaacgcaucaaauguucaggcugugaaccguucugcaacaaaaggggugacaccucuucucccagaaccggaguggacguacccucguuuaucuugcccgggcucaaccuuucagaaagcacuccuaauuagcccccauagauucggagaaaccaaaggaaacucagcucccuugauaauaagggaaccuuuuauugcuuguggaccaaaggaaugcaaacauuuugcucuaacccauuaugcagcucaaccagggggauauuacaauggaacaagagaagacagaaacaagcugaggcaucuaauuucagucaaauugggcaaaaucccaacaguagaaaacucuauuuuccacauggcagcuuggagcggguccgcaugccaugaugguagagaauggacuuacaucggaguugauggcccagacaguaaugcauugcucaaaauaaaauauggagaaacauauacugacacauaccauuccuaugcaaaaaacauccuaaggacacaagaaagugccugcaauugcaucgggggagauuguuaucugaugauaacugauggcccagcuucagggauuagugaaugcagauuccuuaagauucgagagggccgaauaauaaaagaaauauuuccaacaggaagaguaaaacauacugaggaaugcacaugcggauuugccagcaacaaaaccauagaaugugccuguagagauaacaguuacacagcaaaaagacccuuugucaaauuaaauguggagacugauacagcggaaauaagauugaugugcacaaagacuuauuuggacacccccagaccaaaugauggaagcauaacagggccuugcgaaucugauggggacgaagggaguggaggcaucaagggaggauuuguucaccaaagaauggcauccaagauuggaaggugguacucucggacgaugucuaaaacuaaaagaauggggaugggacuguauguaaaguaugauggagacccauggacugacagugaagcccuugcucuuaguggaguaaugguuucaauggaagaaccugguugguauuccuuuggcuucgaaauaaaagauaagaaaugugauguccccuguauugggauagaaaugguacaugauggugggaaaacgacuuggcacucagcggcaacagccauuuacuguuuaaugggcucaggacaacugcugugggacacugucacagguguuaauaugacucuguaa

SEQ ID NO: 62441 - RNA, 1401 nt, Artificial Sequence
  derived and/or modified CDS sequence (wt) from neuraminidase__InfluenzaB__AKU40750
augcuaccuucaacuauacaaacguuaaccuuauuucucacaucagggggaguguuauuaucacuauaugugucagcuucauugucauacuuacuauauucggauauauugcuaaaauuuucacgaacagaaguaacugcaccaauaaugccauuggauugugcaaacgcaucaaauguucaggcugugaaccguucugcaacaaaaggggugauaccucuucucccagaaccggaguggacguacccucguuuaucuugcccgggcucaaccuuucagaaagcacuccuaauuagcccccauagauucggagaaaccaaaggaaacucagcucccuugauaauaagggaaccuuuuauugcuuguggaccaaaggaaugcaaacauuuugcucuaacccauuaugcagcucaaccagggggauauuacaauggaacaagagaagacagaaacaagcugaggcaucuaauuucagucaaauugggcaaaaucccaacaguagaaaacucuauuuuccacauggcagcuuggagcggguccgcaugccaugaugguagagaauggacuuacaucggaguugauggcccagacaguaaugcauugcucaaaauaaaauauggagaagcauauacugacacauaccauuccuaugcaaaaaacauccuaaggacacaagaaagugccugcaauugcaucgggggagauuguuaucugaugauaacugauggcccagcuucagggauuagugaaugcagauuccuuaagauucgagagggccgaauaauaaaagaaauauuuccaacaggaagaguaaaacauacugaggaaugcacaugcggauuugccagcaacaaaaccauagaaugugccuguagagauaacaguuacacagcaaaaagacccuuugucaaauuaaauguggagacugauacagcggaaauaagauugaugugcacaaagacuuauuuggacacccccagaccaaaugauggaagcauaacagggccuugcgaaucugauggggacgaagggaguggaggcaucaagggaggauuuguucaccaaagaauggcauccaagauuggaaggugguacucucggacgaugucuaaaacuaaaagaauggggaugggacuguauguaaaguaugauggagacccauggacugacagugaagcccuugcucuuaguggaguaaugguuucaauggaagaaccugguugguauuccuuuggcuucgaaauaaaagauaagaaaugugauguccccuguauugggauagaaaugguacaugauggugggaaaacgacuuggcacucagcggcaacagccauuuacuguuuaaugggcucaggacaacugcugugggacacugucacagguguuaauaugacucuguaa

SEQ ID NO: 62442 - RNA, 1401 nt, Artificial Sequence; identical to SEQ ID NO: 62397
  derived and/or modified CDS sequence (wt) from neuraminidase__InfluenzaB__AKU40761

SEQ ID NO: 62443 - RNA, 1401 nt, Artificial Sequence; identical to SEQ ID NO: 62397
  derived and/or modified CDS sequence (wt) from neuraminidase__InfluenzaB__AKU40772

SEQ ID NO: 62444 - RNA, 1401 nt, Artificial Sequence; identical to SEQ ID NO: 62397
  derived and/or modified CDS sequence (wt) from neuraminidase__InfluenzaB__AKU40783

SEQ ID NO: 62445 - RNA, 1401 nt, Artificial Sequence
  derived and/or modified CDS sequence (wt) from neuraminidase__InfluenzaB__AKU40794
augcuaccuucaacuauacaaacguuaaccuuauuucucacaucagggggaguguuauuaucacuauaugugucagcuucauugucauacuuacuauauucggauauauugcuaaaauuuucacgaacagaaguaacugcaccaauaaugccauuggauugugcaaacacaucaaauguucaggcugugaaccguucugcaacaaaaggggugacaccucuucucccagaaccggaguggacguacccucguuuaucuugcccgggcucaaccuuucagaaagcacuccuaauuagcccccauagauucggagaaaccaaaggaaaaucagcucccuugauaauaagggaaccuuuuauugcuuguggaccaaaggaaugcaaacauuuugcucuaacccauuaugcagcucaaccagggggauacuacaauggaacaagagaagacagaaacaagcugaggcaucuaauuucagucaaauugggcaaaaucccaacaguagaaaacucuauuuuccacauggcagcuuggagcggguccgcaugccaugaugguagagaauggacuuacaucggaguugauggcccagacaguaacgcauugcucaaaauaaaauauggagaagcauauacugacacauaccauuccuaugcaaaaaacauccuaaggacacaagaaagugccugcaauugcaucgggggagauuguuaucugaugauaacugauggcccagcuucagggauuagugaaugcagauuccuuaagauucgagaaggccgaauaauaaaagaaauauuuccaacaggaagaguaaaacauacugaggaaugcacaugcggauuugccagcaacaaaaccauagaaugugccuguagagauaacaguuacacagcaaaaagacccuuugucaaauuaaauguggagacugauacagcggaaauaagauugaugugcacaaagacuuauuuggacacccccagaccaaaugauggaagcauaacagggccuugcgaaucugauggggacgaagggaguggaggcaucaagggaggauuuguucaccaaagaauggcauccaagauuggaaggugguacucucggacgaugucuaaaacuaaaagaauggggaugggacuguauguaaaguaugauggagacccauggacugacagugaagcccuugcucuuaguggaguaaugguuucaauggaagaaccugguugguauuccuuuggcuucgaaauaaaagauaagaaaugugauguccccuguauugggauagaaaugguacaugauggugggaaaacgacuuggcacucagcggcaacagccauuuacuguuuaaugggcucaggacaacugcugugggacacugucacagguguuaauaugacucuguaa

SEQ ID NO: 62446 - RNA, 1401 nt, Artificial Sequence; identical to SEQ ID NO: 62397
  derived and/or modified CDS sequence (wt) from neuraminidase__InfluenzaB__AKU40805

SEQ ID NO: 62447 - RNA, 1401 nt, Artificial Sequence
  derived and/or modified CDS sequence (wt) from neuraminidase__InfluenzaB__AKU40816
augcuaccuucaacuauacaaacguuaaccuuauuucucacaucagggggaguguuauuaucacuauaugugucagcuucauugucauacuuacuauauucggauauauugcuaaaauuuucacgaacagaaguaacugcaccaauaaugccauuggauugugcaaacgcaucaaauguucaggcugugaaccguucugcaacaaaaggggugacaccucuucucccagaaccggaguggacguacccucguuuaucuugcccgggcucaaccuuucagaaagcacuccuaauuagcccccauagauucggagaaaccaaaggaaacucagcucccuugauaauaagggaaccuuuuauugcuuguggaccaaaggaaugcaaacauuuugcucuaacccauuaugcagcucaaccagggggauauuacaauggaacaagagaagacagaaacaagcugaggcaucuaauuucagucaaacugggcaaaaucccaacaguagaaaacucuauuuuccacauggcagcuuggagcggguccgcaugccaugaugguagagaauggacuuacaucggaguugauggcccagacaguaaugcauugcucaaaauaaaauauggagaagcauauacugacacauaccauuccuaugcaaaaaacauccuaaggacacaagaaagugccugcaauugcaucgggggagauuguuaucugaugauaacugauggcccagcuucagggauuagugaaugcagauuccuuaagauucgagagggccgaauaauaaaagaaauauuuccaacaggaagaguaaaacauacugaggaaugcacaugcggauuugccagcaacaaaaccauagaaugugccuguagagauaacaguuacacagcaaaaagacccuuugucaaauuaaauguggagacugauacagcggaaauaagauugaugugcacaaagacuuauuuggacacccccagaccaaaugauggaagcauaacagggccuugcgaaucugauggggacgaagggaguggaggcaucaagggaggauuuguucaccaaagaauggcauccaagauuggaaggugguacucucggacgaugucuaaaacuaaaagaauggggaugggacuguauguaaaguaugauggagacccauggacugacagugaagcccuugcucuuaguggaguaaugguuucaauggaggaaccugguugguauuccuuuggcuucgaaauaaaagauaagaaaugugauguccccuguauugggauagaaaugguacaugauggugggaaaacgacuuggcacucagcggcaacagccauuuacuguuuaaugggcucaggacaacugcugugggacacugucacagguguuaauaugacucuguaa

SEQ ID NO: 62448 - RNA, 1401 nt, Artificial Sequence; identical to SEQ ID NO: 62397
  derived and/or modified CDS sequence (wt) from neuraminidase__InfluenzaB__AKU40827

SEQ ID NO: 62449 - RNA, 1401 nt, Artificial Sequence; identical to SEQ ID NO: 62397
  derived and/or modified CDS sequence (wt) from neuraminidase__InfluenzaB__AKU40838

SEQ ID NO: 62450 - RNA, 1401 nt, Artificial Sequence; identical to SEQ ID NO: 62397
  derived and/or modified CDS sequence (wt) from neuraminidase__InfluenzaB__AKU40849

SEQ ID NO: 62451 - RNA, 1401 nt, Artificial Sequence; identical to SEQ ID NO: 62402
  derived and/or modified CDS sequence (wt) from neuraminidase__InfluenzaB__AKU40860

SEQ ID NO: 62452 - RNA, 1401 nt, Artificial Sequence
  derived and/or modified CDS sequence (wt) from neuraminidase__InfluenzaB__AKU40871
augcuaccuucaacuauacaaacguuaaccuuauuucucacaucagggggaguguuauuaucacuauaugugucagcuucauugucauacuuacuauauucggauauauugcuaaaauuuucacgaacagaaguaacugcaccaauaaugccauuggauugugcaaacgcaucaaauguucaggcugugaaccguucugcaacaaaagggguggcaccucuucucccagaaccggaguggacguacccucguuuaucuugcccgggcucaaccuuucagaaagcacuccuaauuagcccccauagauucggagaaaccaaaggaaacucagcucccuugauaauaagggaaccuuuuauugcuuguggaccaaaggaaugcaaacauuuugcucuaacccauuaugcagcucaaccagggggauacuacaauggaacaagagaagacagaaacaagcugaggcaucuaauuucagucaaauugggcaaaaucccaacaguagaaaacucuauuuuccacauggcagcuuggagcggguccgcaugccaugaugguagagaauggacuuacaucggaguugauggcccagacaguaaugcauugcucaaaauaaaauauggagaagcauauacugacacauaccauuccuaugcaaaaaacauccuaaggacacaagaaagugccugcaauugcaucgggggagauuguuaucugaugauaacugauggcccagcuucagggauuagugaaugcagauuccuuaagauucgagagggccgaauaauaaaagaaauauuuccaacaggaagaguaaaacauacugaggaaugcacaugcggauuugccagcaacaaaaccauagaaugugccuguagagauaacaguuacacagcaaaaagacccuuugucaaauuaaauguggagacugauacagcggaaauaagauugaugugcacaaagacuuauuuggacacccccagaccaaaugauggaagcauaacagggccuugcgaaucugauggggacgaagggaguggaggcaucaagggaggauuuguucaccaaagaauggcauccaagauuggaaggugguacucucggacgaugucuaaaacuaaaagaauggggaugggacuguauguaaaguaugauggagacccauggacugacagugaagcccuuacucuuaguggaguaaugguuucaauggaagaaccugguugguauuccuuuggcuucgaaauaaaagauaagaaaugugauguccccuguauugggauagaaaugguacaugauggugggaaaacgacuuggcacucagcggcaacagccauuuacuguuuaaugggcucaggacaacugcugugggacacugucacagguguuaauaugacucuguaa

SEQ ID NO: 62453 - RNA, 1401 nt, Artificial Sequence
  derived and/or modified CDS sequence (wt) from neuraminidase__InfluenzaB__AKU40882
augcuaccuucaacuauacaaacguuaaccuuauuucucacaucagggggaguguuauuaucacuauaugugucagcuucauugucauacuuacuauauucggauauauugcuaaaauuuucacgaacagaaguaacugcaccaauaaugccauuggauugugcaaacgcaucaaauguucaggcugugaaccguucugcaacaaaaggggugacaccucuucucccagaaccggaguggacguacccucguuuaucuugcccgggcucaaccuuucagaaagcacuccuaauuagcccccauagauucggagaaaccaaaggaaacucagcucccuugauaauaagggaaccuuuuauugcuuguggaccaaaggaaugcaaacauuuugcucuaacccauuaugcagcucaaccagggggauauuacaauggaacaagagaagacagaaacaagcugaggcaucuaauuucagucaaauugggcaaaaucccaacaguagaaaacucuauuuuccacauggcagcuuggagcggguccgcaugccaugaugguagagaauggacuuacaucggaguugauggcccagacaguaaugcauugcucaaaauaaaauauggagaagcauauacugacacauaccauuccuaugcaaaaaacauccuaaggacacaagaaagugccugcaauugcaucgggggagauuguuaucugaugauaacugauggcccagcuucagggauuagugaaugcagauuccuuaaaauucgagagggccgaauaauaaaagaaauauuuccaacaggaagaguaaaacauacugaggaaugcacaugcggauuugccagcaacaaaaccauagaaugugccuguagagauaacaguuacacagcaaaaagacccuuugucaaauuaaauguggagacugauacagcggaaauaagauugaugugcacaaagacuuauuuggacacccccagaccaaaugauggaagcauaacagggccuugcgaaucugauggggacgaagggaguggaggcaucaagggaggauuuguucaccaaagaauggcauccaagauuggaaggugguacucucggacgaugucuaaaacuaaaagaauggggaugggacuguauguaaaguaugauggagacccauggacugacagugaagcccuugcucuuaguggaguaaugguuucaauggaagaaccugguugguauuccuuuggcuucgaaauaaaagauaagaaaugugauguccccuguauugggauagaaaugguacaugauggugggaaaacgacuuggcacucagcggcaacagccauuuacuguuuaaugggcucaggacaacugcugugggacacugucacagguguuaauaugacucuguaa

SEQ ID NO: 62454 - RNA, 1401 nt, Artificial Sequence
  derived and/or modified CDS sequence (wt) from neuraminidase__InfluenzaB__AKU40893
augcuaccuucaacuauacaaacguuaacccuauuucucacaucagggggaguauuauuaucacuauaugugucagcuucauuaucauacuuacuauauucggauauauugcuaaaauucucaccaacagaaauaacugcaccaacaaugccauuggauugugcaaacgcaucaaauguucaggcugugaaccguucugcaacaaaaggggugacacuucuucucccagaaccggaguggacauacccgcguuuaucuugcccgggcucaaccuuucagaaagcacuccuaauuagcccucauagauucggagaaaccaaaggaaacucagcucccuuaauaauaagggaaccuuuuauugcuuguggaccaaaugaaugcaaacacuuugcucuaacccauuaugcagcccaaccagggggauacuacaauggaacaagaggagacagaaacaagcugaggcaucuaauuucagucaaauugggcaaaaucccaacaguagagaacuccauuuuccacauggcagcauggagcggguccgcgugccaugaugguaaggaauggacauauaucggaguugauggcccugacaauaaugcauugcucaaaguaaaauauggagaagcauauacugacacauaccauuccuaugcaaacaaaauccuaagaacacaagaaagugccugcaauugcaucgggggaaauuguuaucuaaugauaacugauggcucagcuucagguguuagugaaugcagauuucuuaagauucgagagggccgaauaauaaaagaaauauuuccaacaggaagaguaaaacacacugaggaaugcacaugcggauuugccagcaauaaaaccauagaaugugccuguagagacaacagguacacagcaaaaagaccuuuugucaaauuaaacguggagacugauacagcagaaauaagauugaugugcacagauacuuauuuggacacccccagaccaaaugauggaagcauaacaggcccuugugaaucugauggggacaaagggaguggaggcaucaagggaggauuuguucaucaaagaaugaaauccaagauuggaaggugguacucucgaacgaugucuaaaacugaaaggauggggaugggacuauaugucaaguaugauggagacccaugggcugacaguggugcccuagcuuuuaguggaguaaugguuucaaugaaagaaccugguugguauuccuuuggcuucgaaauaaaagauaagaaaugcgauguccccuguauugggauagagaugguacaugaugguggaaaagagacuuggcacucagcagcaacagccauuuacuguuuaaugggcucaggacagcugcugugggacacugucacagguguugacauggcucuguaa

SEQ ID NO: 62455 - RNA, 1401 nt, Artificial Sequence; identical to SEQ ID NO: 62397
  derived and/or modified CDS sequence (wt) from neuraminidase__InfluenzaB__AKU40904

SEQ ID NO: 62456 - RNA, 1401 nt, Artificial Sequence
  derived and/or modified CDS sequence (wt) from neuraminidase__InfluenzaB__AKU40915
augcuaccuucaacuauacaaacguuaaccuuauuucucacaucagggggaguguuauuaucacuauaugugucagcuucauugucauacuuacuauauucggauauauugcuaaaauuuucacgaacagaaguaacugcaccaauaaugccauuggauugugcaaacgcaucaaauguucaggcugugaaccguucugcaacaaaaggggugacaccucuucucccagaaccggaguggacguacccucguuuaucuugcccgggcucaaccuuucagaaagcacuccuaauuagcccccauagauucggagaaaccaaaggaaacucagcucccuugauaauaagggaaccuuuuauugcuuguggaccaaaggaaugcaaacauuuugcucuaacccauuaugcagcccaaccagggggauacuacaauggaacaagagaagacagaaacaagcugaggcaucuaauuucagucaaauugggcaaaaucccaacaguagaaaacucuauuuuccacauggcagcuuggagcggguccgcaugccaugaugguagagaauggacuuacaucggaguugauggcccagacaguaaugcauugcucaaaauaaaauauggagaagcauauacugacacauaccauuccuaugcaaaaaacauccuaaggacacaagaaagugccugcaauugcaucgggggagauuguuaucugaugauaacugauggcccagcuucagggauuagugaaugcagauuccuuaagauucgagagggccgaauaauaaaagaaauauuuccaacaggaagaguaaaacauacugaggaaugcacaugcggauuugccagcaacaaaaccauagaaugugccuguagagauaacaguuacacagcaaaaagacccuuugucaaauuaaauguggagacugauacagcggaaauaagauugaugugcacaaagacuuauuuggacacccccagaccaaaugauggaagcauaacagggccuugcgaaucugauggggacgaagggaguggaggcaucaagggaggauuuguucaccaaagaauggcauccaagauuggaaggugguacucucggacgaugucuaaaacuaaaagaauggggaugggacuguauguaaaguaugauggagacccauggacugacagugaagcccuugcucuuaguggaguaaugguuccaauggaagaaccugguugguauuccuuuggcuucgaaauaaaagauaagaaaugugauguccccuguauugggauagaaaugguacaugauggugggaaaacgacuuggcacucagcagcaacagccauuuacuguuuaaugggcucaggacaacuguugugggacacugucacagguguuaauaugacucuguaa

SEQ ID NO: 62457 - RNA, 1401 nt, Artificial Sequence; identical to SEQ ID NO: 62397
  derived and/or modified CDS sequence (wt) from neuraminidase__InfluenzaB__AKU40926

SEQ ID NO: 62458 - RNA, 1401 nt, Artificial Sequence; identical to SEQ ID NO: 62440
  derived and/or modified CDS sequence (wt) from neuraminidase__InfluenzaB__AKU40937

SEQ ID NO: 62459 - RNA, 1401 nt, Artificial Sequence; identical to SEQ ID NO: 62438
  derived and/or modified CDS sequence (wt) from neuraminidase__InfluenzaB__AKU40948

SEQ ID NO: 62460 - RNA, 1401 nt, Artificial Sequence; identical to SEQ ID NO: 62397
  derived and/or modified CDS sequence (wt) from neuraminidase__InfluenzaB__AKU40959

SEQ ID NO: 62461 - RNA, 1401 nt, Artificial Sequence
  derived and/or modified CDS sequence (wt) from neuraminidase__InfluenzaB__AKU40970
augcuaccuucaacuauacaaacguuaaccuuauuucucacaucagggggaguguuauuaucacuauaugugucagcuucauugucauacuuacuauauucggauauauugcuaaaauuuucacgaacagaaguaacugcaccaauaaugccauuggauugugcaaacgcaucaaauguucaggcugugaaccguucugcaacaaaaggggugacaccucuucucccagaaccggaguggacguacccucguuuaucuugcccgggcucaaccuuucagaaagcacuccuaauuagcccccauagauucggagaaaccaaaggaaacucagcucccuugauaauaagggaaccuuuuauugcuuguggaccaaaggaaugcaaacauuuugcucuaacccauuaugcagcucaaccagggggauauuacaauggaacaagagaagacagaaacaagcugaggcaucuaauuucagucaaauugggcaaaaucccaacaguagaaaacucuauuuuccacauggcagcuuggagcggguccgcaugccaugaugguagagaauggacuuacaucggaguugauggcccagacaguaaugcauugcucaaaauaaaauauggagaagcauauacugacacauaccauuccuaugcaaaaaacauccuaaggacacaagaaagugccugcaauugcaucgggggagauuguuaucugaugauaacugauggcccagcuucagggauuagugaaugcagauuccuuaagauucgagagggccgaauaauaaaagaaauauuuccaacaggaagaguaaaacauacugaggaaugcacaugcggauuugccagcaacaaaaccauagaaugugccuguagagauaacaguuacacagcaaaaagacccuuugucaaauuaaauguggagacugauacagcggaaauaagauugaugugcacaaagacuuauuuggacacccccagaccaaaugauggaagcauaacagggccuugcgaaucugauggggaugaagggaguggaggcaucaagggaggauuuguucaccaaagaauggcauccaagauuggaaggugguacucucggacgaugucuaaaacuaaaagaauggggaugggacuguauguaaaguaugauggagacccauggacugacagugaagcccuugcucuuaguggaguaaugguuucaauggaagaaccugguugguauuccuuuggcuucgaaauaaaagauaagaaaugugauguccccuguauugggauagaaaugguacaugauggugggaaaacgacuuggcacucagcggcaacagccauuuacuguuuaaugggcucaggacaacugcugugggacacugucacagguguuaauaugacucuguaa

SEQ ID NO: 62462 - RNA, 1401 nt, Artificial Sequence; identical to SEQ ID NO: 62397
  derived and/or modified CDS sequence (wt) from neuraminidase__InfluenzaB__AKU40981

SEQ ID NO: 62463 - RNA, 1401 nt, Artificial Sequence
  derived and/or modified CDS sequence (wt) from neuraminidase__InfluenzaB__AKU40991
augcuaccuucaacuauacaaacguuaaccuuauuucucacaucagggggaguguuauuaucacuauaugugucagcuucauugucauacuuacuauauucggauauauugcuaaaauuuucacgaacagaaguaacugcaccaauaaugccauuggauugugcgaacgcaucaaauguucaggcugugaaccguucugcaacaaaaggggugacaccucuucucccagaaccggaguggacguacccucguuuaucuugcccgggcucaaccuuucagaaagcacuccuaauuagcccccauagauucggagaaaccaaaggaaacucagcucccuugauaauaagggaaccuuuuauugcuuguggaccaaaggaaugcaaacauuuugcucuaacccauuaugcagcucaaccagggggauauuacaauggaacaagagaagacagaaacaagcugaggcaucuaauuucagucaaauugggcaaaaucccaacaguagaaaacucuauuuuccacauggcagcuuggagcggguccgcaugccaugaugguagagaauggacuuacaucggaguugauggcccagacaguaaugcauugcucaaaauaaaauauggagaagcauauacugacacauaccauuccuaugcaaaaaacauccuaaggacacaagaaagugccugcaauugcaucgggggagauuguuaucugaugauaacugauggcccagcuucagggauuagugaaugcagauuccuuaagauucgagagggccgaauaauaaaagaaauauuuccaacaggaagaguaaaacauacugaggaaugcacaugcggauuugccagcaacaaaaccauagaaugugccuguagagauaacaguuacacagcaaaaagacccuuugucaaauuaaauguggagacugauacagcggaaauaagauugaugugcacaaagacuuauuuggacacccccagaccaaaugauggaagcauaacagggccuugcgaaucugauggggacgaagggaguggaggcaucaagggaggauuuguucaccaaagaauggcauccaagauuggaaggugguacucucggacgaugucuaaaacuaaaagaauggggaugggacuguauguaaaguaugauggagacccauggacugacagugaagcccuugcucuuaguggaguaaugguuucaauggaagaaccugguugguauuccuuuggcuucgaaauaaaagauaagaaaugugauguccccuguauugggauagaaaugguacaugauggugggaaaacgacuuggcacucagcggcaacagccauuuacuguuuaaugggcucaggacaacugcugugggacacugucacagguguuaauaugacucuguaa

SEQ ID NO: 62464 - RNA, 1401 nt, Artificial Sequence; identical to SEQ ID NO: 62397
  derived and/or modified CDS sequence (wt) from neuraminidase__InfluenzaB__AKU41002

SEQ ID NO: 62465 - RNA, 1401 nt, Artificial Sequence; identical to SEQ ID NO: 62397
  derived and/or modified CDS sequence (wt) from neuraminidase__InfluenzaB__AKU41013

SEQ ID NO: 62466 - RNA, 1401 nt, Artificial Sequence
  derived and/or modified CDS sequence (wt) from neuraminidase__InfluenzaB__AKU41024
augcuaccuucaacuauacaaacgcuaaccuuauuucucacaucagggggaguguuauuaucacuauaugugucagcuucauugucauacuuacuauauucggauauauugcuaaaauuuucacgaacagaaguaacugcaccaauaaugccauuggauugugcaaacgcaucaaauguucaggcugugaaccguucugcaacaaaaggggugacaccucuucucccagaaccggaguggacguacccucguuuaucuugcccgggcucaaccuuucagaaagcacuccuaauuagcccccauagauucggagaaaccaaaggaaacucagcucccuugauaauaagggaaccuuuuauugcuuguggaccaaaggaaugcaaacauuuugcucuaacccauuaugcagcucaaccagggggauauuacaauggaacaagagaagacagaaacaagcugaggcaucuaauuucagucaaauugggcaaaaucccaacaguagaaaacucuauuuuccacauggcagcuuggagcggguccgcaugccaugaugguagagaauggacuuacaucggaguugauggcccagacaguaaugcauugcucaaaauaaaauauggagaagcauauacugacacauaccauuccuaugcaaaaaacauccuaaggacacaagaaagugccugcaauugcaucgggggagauuguuaucugaugauaacugauggcccagcuucagggauuagugaaugcagauuccuuaagauucgagagggccgaauaauaaaagaaauauuuccaacaggaagaguaaaacauacugaggaaugcacaugcggauuugccagcaacaaaaccauagaaugugccuguagagauaacaguuacacagcaaaaagacccuuugucaaauuaaauguggagacugauacagcggaaauaagauugaugugcacaaagacuuauuuggacacccccagaccaaaugauggaagcauaacagggccuugcgaaucugauggggacgaagggagugggggcaucaagggaggauuuguucaccaaagaauggcauccaagauuggaaggugguacucucggacgaugucuaaaacuaaaagaauggggaugggacuguauguaaaguaugauggagacccauggacugacagugaagcccuugcucuuaguggaguaaugguuucaauggaagaaccugguugguauuccuuuggcuucgaaauaaaagauaagaaaugugauguccccuguauugggauagaaaugguacaugauggugggaaaacgacuuggcacucagcggcaacagccauuuacuguuuaaugggcucaggacaacugcugugggacacugucacagguguuaauaugacucuguaa

SEQ ID NO: 62467 - RNA, 1401 nt, Artificial Sequence; identical to SEQ ID NO: 60973
  derived and/or modified CDS sequence (wt) from neuraminidase__InfluenzaB__EPI173278

SEQ ID NO: 62468 - RNA, 1401 nt, Artificial Sequence; identical to SEQ ID NO: 60973
  derived and/or modified CDS sequence (wt) from neuraminidase__InfluenzaB__EPI498049

SEQ ID NO: 62469 - RNA, 1401 nt, Artificial Sequence; identical to SEQ ID NO: 60973
  derived and/or modified CDS sequence (wt) from neuraminidase__InfluenzaB__AFH57913

SEQ ID NO: 62470 - RNA, 1401 nt, Artificial Sequence; identical to SEQ ID NO: 60973
  derived and/or modified CDS sequence (wt) from neuraminidase__InfluenzaB__EPI827074

SEQ ID NO: 62471 - RNA, 1401 nt, Artificial Sequence; identical to SEQ ID NO: 60973
  derived and/or modified CDS sequence (wt) from neuraminidase__InfluenzaB__EPI244698

SEQ ID NO: 62472 - RNA, 1401 nt, Artificial Sequence; identical to SEQ ID NO: 60973
  derived and/or modified CDS sequence (wt) from neuraminidase__InfluenzaB__EPI244701

SEQ ID NO: 62473 - RNA, 1401 nt, Artificial Sequence; identical to SEQ ID NO: 62402
  derived and/or modified CDS sequence (wt) from neuraminidase__InfluenzaB__EPI540672

SEQ ID NO: 62474 - RNA, 1401 nt, Artificial Sequence
  derived and/or modified CDS sequence (wt) from neuraminidase__InfluenzaB__EPI829465
augcuaccuucaacuauacaaacguuaaccuuauuucucacaucagggggaguguuauuaucacuauaugugucagcuucauugucauacuuacuauauucggauauauugcuaaaauuuucacgaacagaaguaacugcaccaauaaugccauuggacugugcaaacgcaucaaauguucaggcugugaaccguucugcaacaaaaggggugacaccucuucucccagaaccggaguggacguacccucguuuaucuugcccgggcucaaccuuucagaaagcacuccuaauuagcccccauagauucggagaaaccaaaggaaacucagcucccuugauaauaagggaaccuuuuauugcuuguggaccaaaggaaugcaaacauuuugcucuaacccauuaugcagcucaaccagggggauacuacaauggaacaagagaagacagaaacaagcugaggcaucuaauuucagucaaauugggcaaaaucccaacaguagaaaacucuauuuuccacauggcagcuuggagcggguccgcaugccaugaugguagagaauggacuuacaucggaguugauggcccagacaguaaugcauugcucaaaauaaaauauggagaagcauauacugacacauaccauuccuaugcaaaaaacauccuaaggacacaagaaagugccugcaauugcaucgggggagauuguuaucugaugauaacugauggcccagcuucagggauuagugaaugcagauuccuuaagauucgagagggccgaauaauaaaagaaauauuuccaacaggaagaguaaaacauacugaggaaugcacaugcggauuugccagcaacaaaaccauagaaugugccuguagagauaacaguuacacagcaaaaagacccuuugucaaauuaaauguggagacugauacagcggaaauaagauugaugugcacaaagacuuauuuggacacccccagaccaaaugauggaagcauaacagggccuugcgaaucugauggggacgaagggaguggaggcaucaagggaggauuuguucaccaaagaauggcauccaagauuggaaggugguacucucggacgaugucuaaaacuaaaagaauggggaugggacuguauguaaaguaugauggagacccauggacugacagugaagcccuugcucuuaguggaguaaugguuucaauggaagaaccugguugguauuccuuuggcuucgaaauaaaagauaagaaaugugauguccccuguauugggauagaaaugguacaugauggugggaaaacgacuuggcacucagcggcaacagccauuuacuguuuaaugggcucaggacaacugcugugggacacugucacagguguuaauaugacucuguaa

SEQ ID NO: 62475 - RNA, 1401 nt, Artificial Sequence
  derived and/or modified CDS sequence (wt) from neuraminidase__InfluenzaB__EPI684428
augcuaccuucaacuauacaaacguuaaccuuauuucucacaucagggggaguguuauuaucacuauaugugucagcuucauugucauacuuacuauauucggauauauugcuaaaauuuucacgaacagaaguaacugcaccaacaaugccauuggauugugcaaacgcaucaaauguucaggcugugaaccguucuacaacaaaaggggugacaccucuuuucccagaaccggaguggacguacccucguuuaucuugcccgggcucaaccuuucagaaagcacuccuaauuagcccccauagauucggagaaaccaaaggaaacucagcucccuugauaauaagggaaccuuuuauugcuuguggaccaaaggaauguaaacauuuugcucuaacccauuaugcagcucaaccagggggauacuacaauggaacaagagaagacagaaacaagcugaggcaucuaauuucagucaaauugggcaaaaucccaacaguagaaaacucuauuuuccacauggcagcuuggagcggguccgcaugccaugaugguagagaauggacuuacaucggaguugauggcccagacaguaaugcauugcucaaaauaaaauauggagaagcauauacugacacauaccauuccuaugcaaaaaacauccuaaggacacaagaaagugccugcaauugcaucgggggagauuguuaucugaugauaacugauggcccagcuucagggguuagugaaugcagauuccuuaagauucgagagggccgaauaauaaaagaaauauuuccaacaggaagaguaaaacauacugaggaaugcacaugcggauuugccagcaacaaaaccauagaaugugccuguagagauaaccguuacacagcaaaaagacccuuugucaaauuaaauguggagacugauacagcggaaauaagauugaugugcacaaagacuuauuuggacacccccagaccaaaugauggaagcauaacagggccuugcgaaucugauggggacgaagggaguggaggcaucaagggaggauuuguucaccaaagaauggcauccaagauuggaaggugguacucucggacgaugucuaaaacuaaaagaauggggaugggacuguauguaaaguaugauggagacccauggacugacagugaagcccuugcucuuaguggaguaaugguuucaauggaagaaccugguugguauuccuuuggcuucgaaauaaaagauaagaaaugugauguccccuguauugggauagaaaugguacaugauggugggaaaacgacuuggcacucagcggcaacagccauuuacugcuuaaugggcucaggacaacugcugugggacacugucacagguguuaauaugacucuguaa

SEQ ID NO: 62476 - RNA, 1401 nt, Artificial Sequence; identical to SEQ ID NO: 60995
  derived and/or modified CDS sequence (wt) from neuraminidase__InfluenzaB__AFH58451

SEQ ID NO: 62477 - RNA, 1401 nt, Artificial Sequence; identical to SEQ ID NO: 61113
  derived and/or modified CDS sequence (wt) from neuraminidase__InfluenzaB__EPI173280

SEQ ID NO: 62478 - RNA, 1401 nt, Artificial Sequence; identical to SEQ ID NO: 61113
  derived and/or modified CDS sequence (wt) from neuraminidase__InfluenzaB__EPI186302

SEQ ID NO: 62479 - RNA, 1401 nt, Artificial Sequence
  derived and/or modified CDS sequence (wt) from neuraminidase__InfluenzaB__EPI636339
augcuaccuucaacuauacaaacguuaacccuauuucucacaucagggggaguauuauuaucacuauaugugucagcuucauuaucauacuuacuauauucggauauauugcuaaaauucucaccaacagaaauaacugcaccaacaaugccauuggauugugcaaacgcaucaaauguucaggcugugaaccguucugcaacaaaaggggugacacuucuucucccagaaccggaguggacauacccgcguuuaucuugcccgggcucaaccuuucagaaagcacuccuaauuagcccucauagauucggagaaaccaaaggaaacucagcucccuugauaauaagggaaccuuuuguugcuuguggaccaaaugaaugcaaacacuuugcuuuaacccauuaugcagcccaaccagggggauacuacaauggaacaagaggagacagaaacaagcugaggcaucuaauuucagucaaauugggcaaaaucccaacaguagagaacuccauuuuccacauggcagcauggagcggguccgcgugccaugaugguaaggaauggacauauaucggaguugauggcccugacaauaaugcauugcucaaaguaaaauauggagaagcauauacugacacauaccauuccuaugcaaacaacauccuaagaacacaagaaagugccugcaauugcaucgggggaaauuguuaucuaaugauaacugauggcucagcuucagguguuagugaaugcagauuucuuaagauucgagagggccgaauaauaaaagaaauauuuccaacaggaagaguaaaacacacugaggaaugcacaugcggauuugccagcaauaaaaccauagaaugugccuguagagacaacagguacacagcaaaaagaccuuuugucaaauuaaacguggagacugauacagcagaaauaagguugaugugcacagauacuuauuuggacacccccagaccaaaugauggaagcauaacaggcccuugugaaucugauggggacaaagggaguggaggcaucaagggaggauuuguucaucaaagaaugaaauccaagauuggaaggugguacucucgaacgaugucuaaaacugaaaggauggggaugggacuguaugucaaguaugguggagacccaugggcugacagugaugcccuagcuuuuaguggaguaaugguuucaaugaaagaaccugguugguauuccuuuggcuucgaaauaaaagauaagaaaugcgauguccccuguauugggauagagaugguacaugaugguggaaaagagacuuggcacucagcagcaacagccauuuacuguuuaaugggcucaggacagcugcugugggacacugucacagguguugacauggcucuguaa

SEQ ID NO: 62480 - RNA, 1401 nt, Artificial Sequence; identical to SEQ ID NO: 62479
  derived and/or modified CDS sequence (wt) from neuraminidase__InfluenzaB__EPI645996

SEQ ID NO: 62481 - RNA, 1401 nt, Artificial Sequence
  derived and/or modified CDS sequence (wt) from neuraminidase__InfluenzaB__EPI539770
augcuaccuucaacuauacaaacguuaaccuuauuucucacaucagggggaguguuauuaucacuauaugugucagcuucauugucauacuuacuauauucggauauauugcuaaaauuuucacgaacagaaguaacugcaccaauaaugccauuggauugugcaaacgcaucaaaugcucaggcugugaaccguucugcaacaaaaggggugacaccucuucucccagaaccggaguggacguacccucguuuaucuugcccgggcucaaccuuucagaaagcacuccuaauuagcccccauagauucggagaaaccaaaggaaacucagcucccuugauaauaagggaaccuuuuauugcuuguggaccaaaggaaugcaaacauuuugcucuaacccauuaugcagcucaaccagggggauacuacaauggaacaagagaagacagaaacaagcugaggcaucuaauuucagucaaauugggcaaaaucccaacaguagaaaacucuauuuuccacauggcagcuuggagcggguccgcaugccaugaugguagagaauggacuuacaucggaguugauggcccagacaguaaugcauugcucaaaauaaaauauggagaagcauauacugacacauaccauuccuaugcaaaaaacauccuaaggacacaagaaagugccugcaauugcaucgggggagauuguuaucugaugauaacugauggcccagcuucagggauuagugaaugcagauuccuuaagauucgagagggccgaauaauaaaagaaauauuuccaacaggaagaguaaaacauacugaggaaugcacaugcggauuugccagcaacaaaaccauagaaugugccuguagagauaacaguuacacagcaaaaagacccuuugucaaauuaaauguggagacugauacagcggaaauaagauugaugugcacaaagacuuauuuggacacccccagaccaaaugaugggagcauaacagggccuugcgaaucugauggggacgaagggaguggaggcaucaagggaggauuuguucaccaaagaauggcauccaagauuggaaggugguacucucggacgaugucuaaaacuaaaagaauggggaugggacuguauguaaaguaugauggagacccauggacugacagugaagcccuugcucuuaguggaguaaugguuucaauggaagaaccugguugguauuccuuuggcuucgaaauaaaagauaagaaaugugauguccccuguauugggauagaaaugguacaugauggugggaaaacgacuuggcacucagcagcaacaaccauuuacuguuuaaugggcucaggacaacugcugugggacacugucacagguguuaauauaacucuguaa

SEQ ID NO: 62482 - RNA, 1401 nt, Artificial Sequence; identical to SEQ ID NO: 62481
  derived and/or modified CDS sequence (wt) from neuraminidase__InfluenzaB__EPI551248

SEQ ID NO: 62483 - RNA, 1401 nt, Artificial Sequence; identical to SEQ ID NO: 62481
  derived and/or modified CDS sequence (wt) from neuraminidase__InfluenzaB__EPI544258

SEQ ID NO: 62484 - RNA, 1401 nt, Artificial Sequence
  derived and/or modified CDS sequence (wt) from neuraminidase__InfluenzaB__EPI592698
augcuaccuucaacuauacaaacguuaaccuuauuucucacaucagggggaguguuauuaucacuauaugugucagcuucauugucauacuuacuauauucggauauauugcuaaaauuuucacgaacagaaguaacugcaccaauaaugccauuggauugugcaaacgcaucaaauguucaggcugugaaccguucugcaacaaaaggggugacaccucuucucccagaaccggaguggacguacccucguuuaucuugcccgggcucaaccuuucagaaagcacuccuaauuagcccccauagauucggagaaaccaaaggaaacucagcucccuugauaauaagggaaccuuuuauugcuuguggaccaaaggaaugcaaacauuuugcucuaacccauuaugcagcucagccagggggauauuacaauggaacaagagaagacagaaacaagcugaggcaucuaauuucagucaaauugggcaaaaucccaacaguagaaaacucuauuuuccacauggcagcuuggagcggguccgcaugccaugaugguagagaauggacuuacaucggaguugauggcccagacaguaaugcauugcucaaaauaaaauauggagaagcauauacugacacauaccauuccuaugcaaaaaacauccuaaggacacaagaaagugccugcaauugcaucgggggagauuguuaucugaugauaacugauggcccagcuucagggauuagugaaugcagauuccuuaagauucgagagggccgaauaauaaaagaaauauuuccaacaggaagaguaaaacauacugaggaaugcacaugcggauuugccagcaacaaaaccauagaaugugccuguagagauaacaguuacacagcaaaaagacccuuugucaaauuaaauguggagacugauacagcggaaauaagauugaugugcacaaagacuuauuuggacacccccagaccaaaugauggaagcauaacagggccuugcgaaucugauggggacgaagggaguggaggcaucaagggaggauuuguucaccaaagaauggcauccaagauuggaaggugguacucucggacgaugucuaaaacuaaaagaauggggaugggacuguauguaaaguaugauggagacccauggacugacagugaagcccuugcucuuaguggaguaaugguuucaauggaagaaccugguugguauuccuuuggcuucgaaauaaaagauaagaaaugugauguccccuguauugggauagaaaugguacaugauggugggaaaacgacuuggcacucagcggcaacagccauuuacuguuuaaugggcucaggacaacugcugugggacacugucacagguguuaauaugacucuguaa

SEQ ID NO: 62485 - RNA, 1401 nt, Artificial Sequence; identical to SEQ ID NO: 62484
  derived and/or modified CDS sequence (wt) from neuraminidase__InfluenzaB__EPI592706

SEQ ID NO: 62486 - RNA, 1401 nt, Artificial Sequence
  derived and/or modified CDS sequence (wt) from neuraminidase__InfluenzaB__EPI693093
augcuaccuucaacuauacaaacguuaaccuuauuucucacaucagggggaguguuauuaucacuauaugugucagcuucauugucauacuuacuauauucggauauauugcuaaaauuuucacgaacagaaguaacugcaccaauaaugccauuggauugugcaaacgcaucaaauguucaggcugugaaccguucugcaacaaaaggggugacaccucuucucccagaaccggaguggacguacccucguuuaucuugcccgggcucaaccuuucagaaagcacuccuaauuagcccccauagauucggagaaaccaaaggaaacucagcucccuugauaauaagggaaccuuuuauugcuuguggaccaaaggaaugcaaacauuuugcucuaacccauuaugcagcucagccagggggauauuacaauggaacaagagaagacagaaacaagcugaggcaucuaauuucagucaaauugggcaaaaucccaacaguagaaaacucuauuuuccacauggcagcuuggagcggguccgcaugccaugaugguagagaauggacuuacaucggaguugauggcccagacaguaaugcauugcucaaaauaaaauauggagaagcauauacugacacauaccauuccuaugcaaaaaacauccuaaggacacaagaaagugccugcaauugcaucgggggagauuguuaucugaugauaacugauggcccagcuucagggauuagugaaugcagauuccuuaagauucgagagggccgaauaauaaaagaaauauuuccaacaggaagaguaaaacauacugaggaaugcacaugcggauuugccagcaacaaaaccauagaaugugccuguagagauaacaguuacacagcaaaaagacccuuugucaaauuaaauguggagacugauacagcggaaauaagauugaugugcacaaagacuuauuuggacacccccagaccaaaugauggaagcauaacagggccuugcgaaucugauggggacgaagggaguggaggcaucaagggaggauuuguucaccaaagaauggaauccaagauuggaaggugguacucucggacgaugucuaaaacuaaaagaauggggaugggacuguauguaaaguaugauggagacccauggacugacagugaagcccuugcucuuaguggaguaaugguuucaauggaagaaccugguugguauuccuuuggcuucgaaauaaaagauaagaaaugugauguccccuguauugggauagaaaugguacaugauggugggaaaacgacuuggcacucagcggcaacagccauuuacuguuuaaugggcucaggacaacugcugugggacacugucacagguguuaauaugacucuguaa

SEQ ID NO: 62487 - RNA, 1401 nt, Artificial Sequence
  derived and/or modified CDS sequence (wt) from neuraminidase__InfluenzaB__EPI678795
augcuaccuucaacuauacaaacguuaacccuauuucucacaucagggggaguauuauuaucacuauaugugucagcuucauuaucauacuuacuauauucggauauauugcuaaaauucucaccaacagaaauaacugcaccaacaaugccauuggauugugcaaacgcaucaaauguucaggcugugaaccguucugcaacaaaaggggugacauuucuucucccagaaccggaguggacauacccgcguuuaucuugcccgggcucaaccuuucagaaagcacuccuaauuagcccucauagauucggagaaaccaaaggaaacucagcucccuugauaauaagggaaccuuuuguugcuuguggaccaaaugaaugcaaacacuuugcuuuaacccauuaugcagcccaaccagggggauacuacaauggaacaagaggagacagaaacaagcugaggcaucuaauuucagucaaauugggcaaaaucccaacaguagagaacuccauuuuccacauggcagcauggagcggguccgcgugccaugaugguaaggaauggacauauaucggaguugauggcccugacaauaaugcauugcucaaaguaaaauauggagaagcauauacugacacauaccauuccuaugcaaacaacauccuaagaacacaagaaagugccugcaauugcaucgggggaaauuguuaucuaaugauaacugauggcucagcuucagguguuagugaaugcagauuucuuaagauucgagaaggccgaauaauaaaagaaauauuuccaacaggaagaguaaaacacacugaggaaugcacaugcggauuugccagcaauaaaaccauagaaugugccuguagagacaacagguacacagcaaaaagaccuuuugucaaauuaaacguggagacugacacagcagaaauaagauugaugugcacagauacuuauuuggacacccccagaccaaaugauggaagcauaacaggcccuugugaaucugauggggacaaagggaguggaggcaucaagggaggauuuguucaucaaagaaugaaauccaagauuggaaggugguacucucgaacaaugucuaaaacugaaaggauggggaugggacuguaugucaaguaugguggaaacccaugggcugacagugaugcccuaacuuuuaguggaguaaugguuucaaugaaagaaccugguugguauuccuuuggcuucgaaauaaaagauaagaaaugcgauguccccuguauugggauagagaugguacaugauggcggaaaagagacuuggcacucagcagcaacagccauuuacuguuuaaugggcucaggacagcugcugugggacacugucacagguguugacauggcucuguga

SEQ ID NO: 62488 - RNA, 1401 nt, Artificial Sequence
  derived and/or modified CDS sequence (wt) from neuraminidase__InfluenzaB__EPI721063
augcuaccuucaacuauacaaacguuaacccuauuucucacaucagggggaguauuauuaucacuauaugugucagcuucauuaucauacuuacuauauucggauauauugcuaaaauucucaccaacagaaauaacugcaccaacaaugccauuggauugugcaaacgcaucaaauguucaggcugugaaccguucugcaacaaaaggggugacauuucuucucccagaaccggaguggacauacccgcguuuaucuugcccgggcucaaccuuucagaaagcacuccuaauuagcccucauagauucggagaaaccaaaggaaacucagcucccuugauaauaagggaaccuuuuguugcuuguggaccaaaugaaugcaaacacuuugcuuuaacccauuaugcagcccaaccagggggauacuacaauggaacaagaggagacagaaacaagcugaggcaucuaauuucagucaaauugggcaaaaucccaacaguagagaacuccauuuuccacauggcagcauggagcggguccgcgugccaugaugguaaggaauggacauauaucggaguugauggcccugacaauaaugcauugcucaaaguaaaauauggagaagcauauacugacacauaccauuccuaugcaaacaacauccuaagaacacaagaaagugcaugcaauugcaucgggggaaauuguuaucuaaugauaacugauggcucagcuucagguguuagugaaugcagauuucuuaagauucgagaaggccgaauaauaaaagaaauauuuccaacaggaagaguaaaacacacugaggaaugcacaugcggauuugccagcaauaaaaccauagaaugugccuguagagacaacagguacacagcaaaaagaccuuuugucaaauuaaacguggagacugacacagcagaaauaagauugaugugcacagauacuuauuuggacacccccagaccaaaugauggaagcauaacaggcccuugugaaucugauggggacaaagggaguggaggcaucaagggaggauuuguucaucaaagaaugaaauccaagauuggaaggugguacucucgaacaaugucuaaaacugaaaggauggggaugggacuguaugucaaguaugguggaaacccaugggcugacagugaugcccuaacuuuuaguggaguaaugguuucaaugaaagaaccugguugguauuccuuuggcuucgaaauaaaagauaagaaaugcgauguccccuguauugggauagagaugguacaugauggcggaaaagagacuuggcacucagcagcaacagccauuuacuguuuaaugggcucaggacagcugcugugggacacugucacagguguugacauggcucuguga

SEQ ID NO: 62489 - RNA, 1401 nt, Artificial Sequence; identical to SEQ ID NO: 60977
  derived and/or modified CDS sequence (wt) from neuraminidase__InfluenzaB__EPI328903

SEQ ID NO: 62490 - RNA, 1401 nt, Artificial Sequence
  derived and/or modified CDS sequence (wt) from neuraminidase__InfluenzaB__EPI543192
augcuacccucaacuauacaaacguuaacccuauuucucacaucagggggaguauuauuaucacuauaugugucagcuucauugucauacuuacuauauuuggauauauugcuaaaauucccaucaacagaaauuacugcaccaacaaugccauuagauugugcaaacgcaucaaauguucaggcugugaaccguucugcaacaaaaggggugacacuucuucucccagaaccggaguggacauacccgcguuuaucuugcccgggcucaaccuuucagaaagcacuccuaauuagcccucauagauucggagaaaccaaaggaaacucagcucccuugauaauaagggaaccuuuuauugcuuguggaccaaaggaaugcaaacacuuugcucuaacccacuaugcagcccaaccagggggauacuacaauggaacaagaggagacagaaacaagcugaggcaucuaauuucagucaaauugggcaaaaucccaacaguagaaaacuccauuuuccacauggcagcauggagcggguccgcaugucaugaugguaaggaauggacauauaucggaguugauggcccugacaauaaugcauugcucaaaauaaaauauggggaagcauauacugacacauaccauuccuaugcaaauaacauccuaagaacacaagaaagugccugcaauugcaucggaggaaauuguuaucuuaugauaacugauggcucagcuucagguguuagugaaugcagauuucuuaagauucgagagggccgaauaaugaaagaaauauuuccaacaggaagaacacaacauacugaagaaugcacaugcggauuugcuagcaauaaaaccauagaaugugccuguagagauaacaguuacacagcaaaaagacccuuugucaaauuaaacguggagacugauacagcagaaauaagauugaugugcacaaagacuuauuuggacacccccagaccagaugauggaagcauaacagggccuugugaaucuaauggaggcaaagggaguggaggcaucaagggaggauuuguccaucaaagaauggcauccaagauuggaaggugguacucucgaacgaugucuaaaacugaaaggaaggggauggggcuguauaucaaguauaauggagacccaugggcugacagugaugcccuuacuuuuaguggaguaaugguuucaauggaagaaccugguugguacuccuuuggcuucgaaauaaaagacaagaaaugugauguccccuguauugggauagagaugguacaugaugguggaaaagagacuuggcacucagcagcuacagccauuuacuguuuaaugggcucaggacagcugcugugggacacugucacagguguuaauaugacucuguaa

SEQ ID NO: 62491 - RNA, 1401 nt, Artificial Sequence; identical to SEQ ID NO: 62490
  derived and/or modified CDS sequence (wt) from neuraminidase__InfluenzaB__EPI500360

SEQ ID NO: 62492 - RNA, 1401 nt, Artificial Sequence
  derived and/or modified CDS sequence (wt) from neuraminidase__InfluenzaB__EPI543186
augcuaccuucaacuauacaaacguuaaccuuauuucucacaucagggggaguguuauuaucacuauaugugucagcuucauugucauacuuacuauauucggauauauugcuaaaauuuucacgaacagaaguaacugcaccaauaaugccauuggauugugcaaacgcaucaaauguucaggcugugaaccguucugcaacaaaaggggugacaccucuucucccagaaccggaguggacguacccucguuuaucuugcccgggcucaaccuuucagaaagcacuccuaauuagcccccauagauucggagaaaccaaaggaaacucagcucccuugauaauaagggaaccuuuuauugcuuguggaccaaaggaaugcaaacauuuugcucuaacccauuaugcagcucaaccagggggauacuacaauggaacaagagaagacagaaacaagcugaggcaucuaauuucagucaaauugggcaaaaucccaacaguagaaaacucuauuuuccacauggcagcuuggagcggguccgcaugccaugaugguagagaauggacuuacaucggaguugauggcccagacaguaaugcauugcucaaaauaaaauauggagaagcauauacugacacauaccauuccuaugcaaaaaacauccuaaggacacaagaaagugccugcaauugcaucgggggagauuguuaucugaugauaacugauggcccagcuucagggauuagugaaugcagauuccuuaagauucgagagggccgaauaauaaaagaaauauuuccaacaggaagaguaaaacauacugaggaaugcacaugcggauuugccagcaacaaaaccauagaaugugccuguagagauaacaguuacacagcaaaaagacccuuugucaaauuaaauguggagacugauacagcggaaauaagauugaugugcacaaagacuuauuuggacacccccagaccaaaugauggaagcauaacagggccuugcgaaucugauggggacgaagggaguggaggcaucaagggaggauuuguucaccaaagaauggcauccaagauuggaaggugguacucucggacgaugucuaaaacuaaaagaauggggaugggacuguauguaaaguaugauggagacccauggacugacagugaagcccuugcucuuaguggaguaaugguuucaauggaagaaccugguugguauuccuuuggcuucgaaauaaaagauaagaaaugugauguccccuguauugggauagaaaugguacaugauggugggaaaacuacuuggcacucagcggcaacagucauuuacuguuuaaugggcucaggacaacugcugugggacacugucacagguguuaauaugacucuguaa

SEQ ID NO: 62493 - RNA, 1401 nt, Artificial Sequence; identical to SEQ ID NO: 62492
  derived and/or modified CDS sequence (wt) from neuraminidase__InfluenzaB__EPI536448

SEQ ID NO: 62494 - RNA, 1401 nt, Artificial Sequence
  derived and/or modified CDS sequence (wt) from neuraminidase__InfluenzaB__NP_056663
augcuaccuucaacuguacaaacauuaacccuauuacucacaucagggggaguauuauuaucacuauaugugucagccucauugucauacuuauuguauucggauguauugcuaaaauuuucaucaacaaaaacaacugcaccaacaaugucauuagagugcacaaacgcaucaaaugcccagacugugaaccauucugcaacaaaagagaugacauuuccacccccagagccggaguggacauacccucguuuaucuugccagggcucaaccuuucagaaggcacuccuaauuagcccucauagguucggagagaucaaaggaaacucagcucccuugauaauaagagaaccuuuuguugcuuguggaccaaaagaaugcagacacuuugcucugacccauuaugcagcucagccggggggauacuacaauggaacaagaaaggacagaaacaagcugaggcaucuaguaucagucaaauugggaaaaaucccaacuguggaaaacuccauuuuccacauggcagcuuggagcggauccgcaugccaugaugguagagaauggacauauaucggaguugaugguccugacaaugaugcauuggucaaaauaaaauauggagaagcauauacugacacauaucauuccuaugcacacaacauccuaagaacacaagaaagugccugcaauugcaucgggggagauuguuaucuuaugauaacagacggcucagcuucaggaauuaguaaaugcagauuucuuaaaauuagagagggucgaauaauaaaagaaauacuuccaacaggaagaguggagcacacugaagagugcacaugcggguucgccagcaauaaaaccauagaaugugccuguagagacaacaguuacacagcaaaaagacccuuugucaaauuaaauguggaaacugauacagcugaaauaagauugaugugcacaaagacuuaucuagacacucccagaccggaugauggaagcauagcagggccuugcgaaucuaauggagacaaguggcuuggaggcaucaaaggaggauucguccaucaaagaauggcaucuaagauuggaagaugguacucccgaacgaugucuaaaacuaacagaauggggauggaacuguauguaaaguaugauggugacccauggacugacagugaugcucuuacucuuaguggaguaaugguuuccauagaagaaccugguugguauucuuuuggcuucgaaauaaaggacaagaaaugugaugucccuuguauugggauagagaugguacacgaugguggaaaagauacuuggcauucagcugcaacagccauuuacuguuugaugggcucaggacaauugcuaugggacacugucacaggcguugauauggcuuuauaa

SEQ ID NO: 62495 - RNA, 1401 nt, Artificial Sequence
  derived and/or modified CDS sequence (wt) from neuraminidase__InfluenzaB__ABG85180
augcuaccuucaacuguacaaacauuaacccuauuacucacaucagggggaguauuauuaucacuauaugugucagccucauugucauacuuauuguauucggauguauugcuaaaauuuucaucaacaaaaacaacugcaccaacaaugucauuagagugcacaaacgcaucaaaugcccagacugugaacuauucugcaacaaaagagaugacauuuccacccccagagccggaguggacauacccucguuuaucuugccagggcucaacuuuucagaaggcacuccuaauuagcccucauagguucggagagaucaaaggaaacucagcucccuugauaauaagagaaccuuuuguugcuuguggaccaaaagaaugcagacacuuugcucugacccauuaugcagcucagccggggggauacuaccauggaacaagaaaggacagaaacaagcugaggcaucuaguaucagucaaauugggaaaaaucccaacuguggaaaacuccauuuuccacauggcagcuuggagcggauccgcaugccaugaugguagagaauggacauauaucggaguugaugguccugacaaugaugcauuggucaaaauaaaauauggagaagcauauacugacacauaucauuccuaugcacacaacauccuaagaacacaagaaagugccugcaauugcaucgggggagauuguuaucuuaugauaacagacggcucagcuucaggaauuaguaaaugcagauuucuuaaaauuagagagggucgaauaauaaaagaaauacuuccaacagggagaguggagcacacugaagagugcacaugcggguucgccagcaauaaaaccauagaaugugccuguagagacaacaguuacacagcaaaaagacccuuugucaaauuaaauguggaaacugauacagcugaaauaagauugaugugcacaaagacuuaucuagacacucccagaccggaugauggaagcauagcagggccuugcgaaucuaauggagacaagggccuuggaggcaucaaaggaggauuuguccaucaaagaauggcauuuaagauuggaagaugguacucccgaacgaugucuaaaacuaacagaauggggauggaacuguauguaaaguaugauggugacccauggacugacagugaugcucuuacucuuaguggaguaaugguuuccauagaagaaccugguugguauucuuuuggcuucgaaauaaaggacaagaaaugugaugucccuuguauugggauagagaugguacacgaugguggagaagauacuuggcauucagcugcaacagccauuuacuguuugaugggcucaggacaauugcuaugggacacugucacaggcauugauauggcuuuauaa

SEQ ID NO: 62496 - RNA, 1401 nt, Artificial Sequence
  derived and/or modified CDS sequence (wt) from neuraminidase__InfluenzaB__EPI376345
augcuaccuucaacuauacaaacguuaacccuauuucucacaucagggggaguguuauuaucacuauaugugucagcuucauugucauacuuacuauauucggauauauugcuaaaauuuucacagacagaaauaacugcaccaauaaugccauuggauugugcaaacgcaucaaauguucaggcuguaaaucauucugcagcaaaaggggugacacuucuucucccagaaccggaauggacauacccucguuuaucuugcccgggcucaaccuuucagaaagcacuccuaauuagcccccauagauucggagaaaucaaaggaaacucagcucccuugauaauaagggaaccuuuuauugcuuguggaccaacggaaugcaaacacuuugcucuaacccauuaugcagcucaaccagggggauacuacaauggaacaagagaagacagaaacaagcugaggcaucuaauuucagucaaauugggcaaaaucccaacaguagaaaacuccauuuuccacauggcagcuuggagcggguccgcaugccaugaugguaaagaauggacauauaucggaguugauggccccgacaguaaugcauugcucaaaauaaaauauggagaagcauauacugacacauaccauuccuaugcaaaaaacauccuaaggacacaagaaagugccugcaauugcaucgggggagauuguuaucuuaugauaacugauggcccagcuucagggguuagugaaugcagauuccuuaagauucgagagggcagaauaauaaaagaaauauuuccaacaggaagaguaaaacauacugaggaaugcacaugcggauuugccagcaacaaaaccauagaaugugcuuguagagauaaccguuacacagcaaaaagacccuuugucaaauuaaauguggagacugauacagcggaaauaagauugaugugcacagagacuuauuuggacacccccagaccaaaugauggaagcauaacagggccuugcgaaucugauggggacaaagggaguggaggcaucaagggaggauuuguucaucaaagaauggcauccaagauuggaaggugguacucucgaacgaugucuaaaaccaaaagaauggggaugggacuguauguaaaauaugauggagacccauggacugacagugaagcccuugcucuuaguggaguaaugguuucaauggaagaaccugguugguauuccuuuggcuucgaaauaaaagauaagaaaugugauguccccuguauugggauagaaaugguacaugauggugggaaaacgacuuggcacucagcagcaacagccauuuauuguuuaaugggcucaggacaauugcugugggacacugucacagguguugauauggcucuguaa

SEQ ID NO: 62497 - RNA, 1401 nt, Artificial Sequence; identical to SEQ ID NO: 62496
  derived and/or modified CDS sequence (wt) from neuraminidase__InfluenzaB__EPI368424

SEQ ID NO: 62498 - RNA, 1401 nt, Artificial Sequence
  derived and/or modified CDS sequence (wt) from neuraminidase__InfluenzaB__EPI331150
augcuaccuucaacuauacaaacguugacccuauuucucacaucagggggaguauuauuaucacuauaugugucagcuucauuaucauacuuacuauauucggauauauugcuaaaauucucaccaacagaaauaacugcaccaacaaugccauuggauugugcaaacgcaucaaauguucaggcuaugaaccguucugcaacaaaaggggugacacuucuucucccagaaccggaguggacauacccgcguuuaucuugcccgggcucaaccuuucagaaagcacuccuaauuagcccucauagauucggagaaaccaaaggaaacucagcucccuugauaauaagggaaccuuuuauugcuuguggaccaaaugaaugcaaacacuuugcucuaacccauuaugcagcccaaccagggggauacuacaauggaacaagaggagacagaaacaagcugaggcaucuaauuucagucaaauugggcaaaaucccaacaguagaaaacuccauuuuccacauggcagcauggagcggguccgcgugccaugaugguaaggaauggacauauaucggaguugauggcccugacaauaaugcauugcucaaaguaaaauauggagaagcauauacugacacauaccauuccuaugcaaacaaaauccuaagaacacaagaaagugccugcaauugcaucgggggaaauuguuaucuuaugauaacugauggcucagcuucagguguuagugaaugcagauuucuuaagauucgagagggccgaauaauaaaagaaauauuuccaacaggaagaguaaaacacacugaggaaugcacaugcggauuugccagcaauaaaaccauagaaugugccuguagagauaacaguuacacagcaaaaagaccuuuugucaaauuaaacguggagacugauacagcagaaauaagauugaugugcacagauacuuauuuggacacccccagaccaaaugauggaagcauaacaggcccuugugaaucugauggggacaaagggaguggaggcaucaagggaggauuuguucaucaaagaauggaauccaagauuggaagaugguacucucgaacgaugucuaaaacugaaaggauggggaugggacuguaugucaaguaugauggagacccaugggcugacagugaugcccuagcuuuuaguggaguaaugguuucaaugaaagaaccugguugguacuccuuuggcuucgaaauaaaagauaagaaaugcgauguccccuguauugggauagagaugguacaugaugguggaaaagagacuuggcacucagcagcaacagccauuuacuguuuaaugggcucaggacagcugcugugggacacugucacagguguugacauggcucuguaa

SEQ ID NO: 62499 - RNA, 1401 nt, Artificial Sequence; identical to SEQ ID NO: 62498
  derived and/or modified CDS sequence (wt) from neuraminidase__InfluenzaB__EPI358089

SEQ ID NO: 62500 - RNA, 1401 nt, Artificial Sequence; identical to SEQ ID NO: 60644
  derived and/or modified CDS sequence (wt) from neuraminidase__InfluenzaB__ABL76698

SEQ ID NO: 62501 - RNA, 1401 nt, Artificial Sequence
  derived and/or modified CDS sequence (wt) from neuraminidase__InfluenzaB__AAD42328
augcuaccuucaacuauacaaacguuaacccuauuucucacaucagggggaguguuauuaucacuauaugugucagcuucacugucauacuuacuguauucggauauauugcuaaaauuuucaccaacagaaauaacugcaccaacaaugccauuggauugugcaaacgcaucaaauguucaggcugugaaccguucugcaacaaaagggaugacacuucuucucccagaaccggaguggacauacccucguuuaucuugcccgggcucaaccuuucagaaagcacuccuaauuagcccucauagauucggagaaaccagaggaaacucagcucccuugacaauaagggaaccuuuuauugcuuguggaccaaaggaaugcaaacacuuugcucuaacccauuaugcagcucaaccagggggauacuacaauggaacaagagaggacagaaacaagcugaggcaucugauuucagucaaauugggcaaaauaccaacaguagaaaacuccauuuuccacauggcagcuuggagcggguccgcaugccaugaugguagagaauggacauauaucggaguugauggcccugacaguaaugcauugaucaaaauaaaauauggagaagcauauacugacacauaccauuccuaugcaaacaacauccuaagaacacaagaaagugccugcaauugcauugggggagauuguuaucuuaugauaacugauggcucagcuucaggaauuaguaaaugcagauuucuuaagauucgagagggucgaauaauaaaagaaauauuuccaacaggaagaguagaacauacugaagaaugcacaugcggauuugccagcaacaaaaccauagaaugugccuguagagauaacaguuacacagcaaaaagacccuuugucaaauuaaauguggagacugauacagcugaaauaagauugaugugcacagagacuuauuuggacacccccagaccagaugauggaagcauaacagggccuugcgaaucuaauggggacaaagggcguggaggcaucaagggaggauuuguucaucaaagaauggcauccaagauuggaagaugguacucucgaacgaugucuaaaacuaaaagaauggggauggaacuguaugucaaguaugauggagacccauggauugacagugacgcccuugcuccuaguggaguaauggucucaauggaagaaccugguugguauucuuucggcuucgaaauaaaagauaagaaaugugauguccccuguauugggauagagaugguacaugaugguggaaaaaagacuuggcacucagcagcaacagccauuuacuguuuaaugggcucaggacaguugcuaugggacacugucacagguguugauaggucuguauaa

SEQ ID NO: 62502 - RNA, 1401 nt, Artificial Sequence
  derived and/or modified CDS sequence (wt) from neuraminidase__InfluenzaB__EPI541349
augcuaccuucaacuauacaaacguuaacccuauuucucacaucagggggaguguuauuaucacuauaugugucagcuucauugucauacuuacuauauucggauauauugcuaaaauuuucacagacagaaauaacugcaccaauaaugccauuggauugugcaaacgcaucaaauguucaggcuguaaaucguucugcagcaaaaggggugacacuucuucucccagaaccggaguggacauacccucguuuaucuugcccgggcucaaccuuucagaaagcacuccuaauuagcccccauagauucggagagaucaaaggaaacucagcucccuugauaauaagggaaccuuuuauugcuuguggaccaacggaaugcaaacacuuugcucuaacccauuaugcagcucaaccagggggauacuacaauggaacaagagaagacagaaacaagcugaggcaucuaauuucagucaaauugggcaaaaucccaacaguagaaaacuccauuuuccacauggcagcuuggagcggguccgcaugccaugaugguaaagaauggacauauaucggaguugauggccccgacaguaaugcauugcucaaaauaaaauauggagaagcauauacugacacguaccauuccuaugcaaaaaacauccuaaggacacaagaaagugccugcaauugcaucgggggagauuguuaucuuaugauaacugauggcccagcuucagggguuagugaaugcagauuccuuaagauucgagagggcagaauaauaaaagaaauauuuccaacaggaagaguaaaacauacugaggaaugcacaugcggauuugccagcaacaaaaccauagaaugugcuuguagagauaaccguuacacagcaaaaagacccuuugucaaauuaaauguggagacugauacagcggaaauaagguugaugugcacagagacuuauuuggacacccccagaccaaaugauggaagcauaacagggccuugcgaaucugauggggacaaagggaguggaggcaucaagggaggauuuguucaucaaagaauggcauccaagauuggaaggugguacucucgaacgaugucuaaaaccaaaagaauggggaugggacuguauguaaaguaugauggagacccauggacugacagugaagcccuugcucuuaguggaguaaugguuucaauggaagaaccugguugguauuccuuuggcuucgaaauaaaagauaagaaaugugauguccccuguauugggauagaaaugguacaugauggugggaaaacgacuuggcacucagcagcaacagccauuuauuguuuaaugggcucaggacaauugcugugggacacugucacagguguugauauggcucuguaa

SEQ ID NO: 62503 - RNA, 1401 nt, Artificial Sequence
  derived and/or modified CDS sequence (wt) from neuraminidase__InfluenzaB__EPI541759
augcuaccuucaacuauacaaacguuaaccuuauuucucacaucagggggaguguuauuaucacuauaugugucagcuucauugucauacuuacuauauucggauauauugcuaaaauuuucacgaacagaaguaacugcaccaauaaugccauuggauugugcaaacgcaucaaauguucaggcugugaaccguucugcaacaaaaggggugacaccucuucucccagaaccggaguggacguacccucguuuaucuugcccgggcucaaccuuucagaaagcacuccuaauuagcccccauagauucggagaaaccaaaggaaacucagcucccuugauaauaagggaaccuuuuauugcuuguggaccaaaggaaugcaaacauuuugcucuaacccauuaugcagcucaaccagggggauacuacaauggaacaagagaagacagaaacaagcugaggcaucuaauuucagucaaauugggcaaaaucccaacaguagaaaacucuauuuuccacauggcagcuuggagcggauccgcaugccaugaugguagagaauggacuuacaucggaguugauggcccagacaguaaugcauugcucaaaauaaaauauggagaagcauauacugacacauaccauuccuaugcaaaaaacauccuaaggacacaagaaagugccugcaauugcaucgggggagauuguuaucugaugauaacugauggcccagcuucagggauuagugaaugcagauuccuuaagauucgagagggccgaauaauaaaagaaauauuuccaacaggaagaguaaaacauacugaggaaugcacauguggauuugccagcaacaaaaccauagaaugugccuguagagauaacaguuacacagcaaaaagacccuuugucaaauuaaauguggagacugauacagcggaaauaagauugaugugcacaaagacuuauuuggacacccccagaccaaaugauggaagcauaacagggccuugcgaaucugauggggacgaagggaguggaggcaucaagggaggauuuguucaccaaagaauggcauccaagauuggaaggugguacucucggacgaugucuaaaaccaaaagaauggggaugggacuguauguaaaguaugauggagacccauggacugacagugaagcccuugcucuuaguggaguaaugguuucaauggaagaaccugguugguauuccuuuggcuucgaaauaaaagauaagaaaugugauguccccuguauugggauagaaaugguacaugauggugggaaaacgacuuggcacucagcggcaacagccauuuacuguuuaaugggcucaggacaacugcugugggacacugucacagguguuaauaugacucuguaa

SEQ ID NO: 62504 - RNA, 1401 nt, Artificial Sequence
  derived and/or modified CDS sequence (wt) from neuraminidase__InfluenzaB__EPI826201
augcuaccuucaacuauacaaacguuaacccuauuucucacaucagggggaguauuauuaucacuauaugugucagcuucauuaucauacuuacuauauucggauauauugcuaaaauucucaccaacagaaauaacugcaccaacaaugccauuggauugugcaaacgcaucaaauguucaggcugugaaccguucugcaacaaaaggggugacacuucuucucccagaaccggaguggacauacccgcguuuaucuugcccgggcucaaccuuucagaaagcacuccuaauuagcccucauagauucggagaaaccaaaggaaacucagcucccuugauaauaagggaaccuuuuguugcuuguggaccaaaugaaugcaaacacuuugcuuuaacccauuaugcagcccaaccagggggauacuacaauggaacaagaggagacagaaacaagcugaggcaucuaauuucagucaaauugggcaaaaucccaacaguagagaacuccauuuuccacauggcagcauggagcggguccgcgugccaugaugguaaggaauggacauauaucggaguugauggcccugacaauaaugcauugcucaaaguaaaauauggagaagcauauacugacacauaccauuccuaugcaaacaacauccuaagaacacaagaaagugcaugcaauugcaucgggggaaauuguuaucuaaugauaacugauggcucagcuucagguguuagugaaugcagauuucuuaagauucgagagggccgaauaauaaaagaaauauuuccaacaggaagaguaaaacacacugaggaaugcacaugcggauuugccagcaauaaaaccauagaaugugccuguagagacaacagguacacagcaaaaagaccuuuugucaaauuaaacguggagacugauacagcagaaauaagguugaugugcacagauacuuauuuggacacccccagaccaaaugauggaagcauaacaggcccuugugaaucugauggggacaaagggaguggaggcaucaagggaggauuuguucaucaaagaaugaaauccaagauuggaaggugguacucucgaacgaugucuaaaacugaaaggauggggaugggacuguaugucaaguaugguggagacccaugggcugacagugaugcccuagcuuuuaguggaguaaugguuucaaugaaagaaccugguugguauuccuuuggcuucgaaauaaaagauaagaaaugcgauguccccuguauugggauagagaugguacaugaugguggaaaagagacuuggcacucagcagcaacagccauuuacuguuuaaugggcucaggacagcugcugugggacacugucacagguguugacauggcucuguaa

SEQ ID NO: 62505 - RNA, 1401 nt, Artificial Sequence
  derived and/or modified CDS sequence (wt) from neuraminidase__InfluenzaB__EPI477398
augcuaccuucaacuauacaaacguuaacccuauuucucacaucagggggaguauuauuaucacuauaugugucagcuucauuaucauacuuacuguauucggauauauugcuaaaauucucaccaacagaaauaacugcaccaacaaugccauuggauugugcaaacgcaucaaauguucaggcugugaaccguucugcaacaaaaggggugacacuucuucucccagaaccggaguggacauacccgcguuuaucuugcccgggcucaaccuuucagaaagcacuccuaauuagcccucauagauucggagaaaccaaaggaaacucagcucccuuaauaauaagggaaccuuuuauugcuuguggaccaaaugaaugcaaacacuuugcucuaacccauuaugcagcccaaccagggggauacuacaauggaacaagaggagacagaaacaagcugaggcaucuaauuucagucaaauugggcaaaaucccaacaguagagaacuccauuuuccacauggcagcauggagcggguccgcgugccaugaugguaaggaauggacauauaucggaguugauggcccugacaauaaugcauugcucaaaguaaaauauggagaagcauauacugacacauaccauuccuaugcaaacaaaauccuaagaacacaagaaagugccugcaauugcaucgggggaaauuguuaucuaaugauaacugauggcucagcuucagguguuagugaaugcagauuucuuaagauucgagagggccgaauaauaaaagaaauauuuccaacaggaagaguaaaacacacugaggaaugcacaugcggauuugccagcaauaaaaccauagaaugugccuguagagacaacagguacacagcaaaaagaccuuuugucaaauuaaacguggagacugauacagcagaaauaagauugaugugcacagauacuuauuuggacacccccagaccaaaugauggaagcauaacaggcccuugugaaucugauggggacaaagggaguggaggcaucaagggaggauuuguucaucaaagaaugaaauccaagauuggaaggugguacucucgaacgaugucuaaaacugaaaggauggggaugggacuguaugucaaguaugauggagacccaugggcugacagugaugcccuagcuuuuaguggaguaaugguuucaaugaaagaaccugguugguauuccuuuggcuucgaaauaaaagauaagaaaugcgauguccccuguauugggauagagaugguacaugaugguggaaaagagacuuggcacucagcagcaacagccauuuacuguuuaaugggcucaggacagcugcugugggacacugucacagguguugacauggcucuguaa

SEQ ID NO: 62506 - RNA, 1401 nt, Artificial Sequence; identical to SEQ ID NO: 62505
  derived and/or modified CDS sequence (wt) from neuraminidase__InfluenzaB__EPI492570

SEQ ID NO: 62507 - RNA, 1401 nt, Artificial Sequence; identical to SEQ ID NO: 62505
  derived and/or modified CDS sequence (wt) from neuraminidase__InfluenzaB__EPI498339

SEQ ID NO: 62508 - RNA, 1401 nt, Artificial Sequence
  derived and/or modified CDS sequence (wt) from neuraminidase__InfluenzaB__EPI538118
augcuaccuucaacuauacaaacguuaaccuuauuucucacaucagggggaguguuauuaucacuauaugugucagcuucauugucauacuuacuauauucggauauauugcuaaaauuuucacgaacagaaguaacugcaccaauaaugccauuggauugugcaaacgcaucaaaugcucaggcugugaaccguucugcaacaaaaggggugacaccucuucucccagaaccggaguggacguacccucguuuaucuugcccgggcucaaccuuucagaaagcacuccuaauuagcccccauagauucggagaaaccaaaggaaacucagcucccuugauaauaagggaaccuuuuauugcuuguggaccaaaggaaugcaaacauuuugcucuaacccauuaugcagcucaaccagggggauacuacaauggaacaagagaagacagaaacaagcugaggcaucuaauuucagucaaauugggcaaaaucccaacaguagaaaacucuauuuuccacauggcagcuuggagcggguccgcaugccaugaugguagagaauggacuuacaucggaguugauggcccagacaguaaugcauugcucaaaauaaaauauggagaagcauauacugacacauaccauuccuaugcaaaaaacauccuaaggacacaagaaagugccuguaauugcaucgggggagauuguuaucugaugauaacugauggcccagcuucagggauuagugaaugcagauuccuuaagauucgagagggccgaauaauaaaagaaauauuuccaacaggaagaguaaaacacacugaggaaugcacaugcggauuugccagcaacaaaaccauagaaugugccuguagagauaacaguuacacagcaaaaagacccuuugucaaauuaaauguggagacugauacagcggaaauaagauugaugugcacaaagacuuauuuggauacccccagaccaaaugaugggagcauaacagggccuugcgaaucugauggggacgaagggaguggaggcaucaagggaggauuuguucaccaaagaauggcauccaagauuggaaggugguacucucggacgaugucuaaaacuaaaagaauggggaugggacuguauguaaaguaugauggagacccauggacugacagugaagcccuugcucuuaguggaguaaugguuucaauggaagaaccugguugguauuccuuuggcuucgaaauaaaagauaagaaaugugauguccccuguauugggauagaaaugguacaugauggugggaaaacgacuuggcacucagcagcaacagccauuuacuguuuaaugggcucaggacaacugcugugggacacugucacagguguuaauaugacucuguaa

SEQ ID NO: 62509 - RNA, 1401 nt, Artificial Sequence; identical to SEQ ID NO: 62508
  derived and/or modified CDS sequence (wt) from neuraminidase__InfluenzaB__EPI538124

SEQ ID NO: 62510 - RNA, 1401 nt, Artificial Sequence; identical to SEQ ID NO: 62508
  derived and/or modified CDS sequence (wt) from neuraminidase__InfluenzaB__EPI556421

SEQ ID NO: 62511 - RNA, 1401 nt, Artificial Sequence; identical to SEQ ID NO: 62508
  derived and/or modified CDS sequence (wt) from neuraminidase__InfluenzaB__EPI614609

SEQ ID NO: 62512 - RNA, 1401 nt, Artificial Sequence; identical to SEQ ID NO: 60683
  derived and/or modified CDS sequence (wt) from neuraminidase__InfluenzaB__BAB32609

SEQ ID NO: 62513 - RNA, 1401 nt, Artificial Sequence; identical to SEQ ID NO: 60976
  derived and/or modified CDS sequence (wt) from neuraminidase__InfluenzaB__EPI271544

SEQ ID NO: 62514 - RNA, 1401 nt, Artificial Sequence; identical to SEQ ID NO: 60976
  derived and/or modified CDS sequence (wt) from neuraminidase__InfluenzaB__AFH57957

SEQ ID NO: 62515 - RNA, 1401 nt, Artificial Sequence; identical to SEQ ID NO: 60976
  derived and/or modified CDS sequence (wt) from neuraminidase__InfluenzaB__EPI294881

SEQ ID NO: 62516 - RNA, 1401 nt, Artificial Sequence; identical to SEQ ID NO: 60684
  derived and/or modified CDS sequence (wt) from neuraminidase__InfluenzaB__ABL77259

SEQ ID NO: 62517 - RNA, 1575 nt, Artificial Sequence
  derived and/or modified CDS sequence (wt) from glycoprotein__RABV__AB009663.2
augguuccgcaagcucuuuugcuuguacccauucuggguuuuuccuuguguuucgggaaauucccuauuuacacgauaccagacacacuuggucccuggagcccgaucgauauacaucaucucaguugcccaaacaauuugguuguagaggacgaaggaugcaccaaccugucaggguucucauacauggaacuuaaaguuggauacaccucagccauaaaggugaacggguucacuugcacaggcguuguaacagaggcagaaaccuacacuaacuuuguugguuaugucaccaccacuuucaaaagaaagcauuuccgcccaacaccagaugcuuguagagcugcguacaacuggaagauggccggugaccccagauaugaagagucucuacacaguccguacccugacuaccauuggcuucgaacuguaaaaaccacaaaggagucccucguuaucauaucuccaaguguggcagauuuggacccauaugacaacucccuccacucgagggucuucccuagcggaaagugcucaggaauaacaagaucuucugucuacugcucaacuaaccacgauuacaccguuuggaugccugaaauucugagacuagggacaucuugugacauuuuuaccaauaguagagggaagagaguauccaaggggagcacgaccuguggcuuuauagaugaaagaggccuauacaagucucuaaaaggcgcaugcaaacucaaguuguguggaguucuuggacugagacuuauggacggaacaugggucucgaugcagacaucaaaugagaccaaaugguguccucccaaucaguugguuaaucugcacgaccuucgcucagaugaacucgagcaucuuguuauagaggaguuggucaagaaaagagaggagugucuggaugcauuagaguccaucauaaccaccaagucagugaguuucagacgucucagucauuuaagaaaacuuguccccggguucggaaaagcauauaccauauucaacaagaccuugauggaggcugaagcucacuacaagucagucaggacuuggaaugagaucauccccucaaaaggauguuugagaguuggagggaggugucauccucauguaaacgggguguuuuucaaugguauaauauuagggccugacggucauguuuuaaucccagagaugcaaucaucccuccuccagcaacauauagaguuauuggaauccucaguuauuccccugaugcacccccuugcagacccguucacaguuuucaaggacggcgaugagacugaggauuuuauagaaguucaccuucccgaugugcacgaacaggucucagggguugaccugggucucccgaacugggggaaguauguauuacuaagugcagggaccuugauugccuugguguugauaauuuuccuaaugacauguuguagaaaagucgaucggccagaaucuacacaacgcagucucagagggacaggaaggaacgugucagucaccucccaaagcgggaaauucauaaauucaugggagucguauaaaagugggggugagacuggacuguga

SEQ ID NO: 62518 - RNA, 1575 nt, Artificial Sequence
  derived and/or modified CDS sequence (wt) from glycoprotein__RABV__AB044824.1
augguuccgcaagcucuucugcuuguacccauucuggguuuuuccucguguuucgggaaauucccuauuuacacgauaccagacacacuuggucccuggagcccgaucgauauacaucaucucaguugcccaaacaauuugguuguagaggacgaaggaugcaccaaccugucaggguucuccuacauggaacuuaaaguuggauacaucucagccauaaaggugaacggguucacuugcacaggcguuguaacagaggcagaaaccuacacuaacuuuguugguuaugucaccaccacuuucaaaagaaagcauuuccgcccaacaccagaugcuuguagagcugcguacaacuggaagauggccggugaccccagauaugaagagucucuacacaguccguacccugacuaccauuggcuucgaacuguaaaaaccacaaaggagucccucguuaucauaucuccaaguguggcagauuuggacccauaugacaacucccuucacucgagggucuucccuagcggaaagugcucaggaauaacaguaucuucugucuacugcucaacuaaccacgauuacaccguuuggaugccugaaagucugagacuagggacaucuugugacauuuuuaccaauaguagagggaagagagcauccaaggggagcaagaccuguggcuuuguagaugaaagaggccuauauaagucucuaaaaggcgcaugcaaacucaaguuguguggaguucuuggacuuagacuuauggacggaacaugggucgcgaugcagacaucaaaugagaccaaaugguguccucccgaucaguugguuaaucugcacgaccuucgcucagaugaaaucgagcaucuuguuauagaggaguuggucaagaaaagagaggagugucuggaugcauuagaguccaucauaaccaccaagucagugaguuucagacgucucaguuauuuaagaaaacuuguccccggguucggaaaagcauauaccauauucaacaagaccuugauggaggcugaagcucacuacaagucagucaggacuuggaaugagaucauccccucaaaaggauguuugagaguuggagggaggugucauccucauguaaacgggguguuuuucaaugguauaauauuagggccugacggucauguuuuaaucccagagaugcaaucaucccuccuccagcaacauauagaguuauuggaauccucaguuauuccccugaugcacccccuugcagacccguucacaguuuucaaggacggcgaugagacugaggauuuuauagaaguucaccuucccgaugugcacgaacaagucucagggguugaccugggucucccgaacuggggggaguauguauuacuaagugcagggaccuugauugccuugauguugauaauuuuccuaaugacauguuguagaaaagucgaucggccagaaucuacacaacgcagucucagagggacaggaaggaaugugucagucaccucccaaagcgggaaauucauaccuucaugggagucguauaaaagugggggugagacuggacuguga

SEQ ID NO: 62519 - RNA, 1575 nt, Artificial Sequence
  derived and/or modified CDS sequence (wt) from glycoprotein__RABV__AB052666.1
augauuccucaggcucuuuuguuuguaccccuuuugguuuucucauugugcuucgggaaauuccccaucuacacgauaccagauaaacuuggcccuuggagucccaucgauauacaucaucucaguugcccuaacaauuuaguuguggaggaugaagggugcaccaaccugucaggauucuccuauauggagcucaaaguaggguacauuucagccauaaaagugaacggguucacuugcacggguguggugacagaagcagagaccuacacaaauuuugucggcuacgucaccaccacguuuaagagaaagcacuuccgcccgacacccgaugccugcagagcagcauauaacuggaagauggcaggugacccuagauaugaggaaucucuucauaauccguaucccgauuaucacuggcuccggacuguaaagaccaccaaggagucucuuguuaucauaucuccaagugugucggacuuagacccguacgauaaaucucuucauuccagaguuuuccccagcgguaaaugcucaggaauaacggugucuucuaccuauugucccacuaaccaugacuauaccaucuggaugccggaaaauccgagacuagggaccucuugugacauuuucaccaauagcagggggaagagagcauccaaagggagcaagaccuguggauuuguggacgaaagaggcuuguacaagucucuaaaaggggcaugcaaguugaagcuauguggaguucuuggacuuagacuuauggacggaacaugggcugcgauucaaacaucugaugaggucaaauggugcccuccugaucaguuagugaauauacaugauuuucgcucggaugagauugaacaucuuguuguggaagaguuaguaaagaaaagggaggagugucuagaugcacuggagucuaucaugaccaccaagucaguaagcuucagacgccucagucacuugaggaagcuuguccccggguuugggaaagcauauaccauauucaacaaaaccuugauggaggcugaugcucacuacaaaucaguccguacauggaaugagaucauccccucuaaagggugcuuaagaguuggggggagaugucacccccaugugaacgggguguuuuucaaugguaucauccuggguccugauggacauguucuaaucccagagaugcagucgucucuccuucaacagcauauggaguuguuggaauccucgguaaucccgcuaaugcaucccuuggcagaucccucaacaguuuuuaaggacggugacgaggcggaagauuuugucgagguucaccuuccggauguccacaagcaggucucgggaguugaucucggucucccaagcugggggaaguaugugcugaugaguguaggcgcuaugauugcacugauguugaugauuuucuugaugacguguugcagaaaagcuaauggagcagaaucaauacaacaccgucucggagagacaggaaggaaagugucagucaccucucaaagcgggagggucauaucuuccugggagucauauaaaagcggaggugagaccaagcuguag

SEQ ID NO: 62520 - RNA, 1575 nt, Artificial Sequence
  derived and/or modified CDS sequence (wt) from glycoprotein__RABV__AB085828.1
augguuccucagguucuuuuguuugcaccccuccugguuucuccauuguguuucgggaaguuccccauuuacacgauaccagacaaacuuggucccuggagcccuauugacuuacaccaucucagcuguccaaauaaccugguuguggaggacgaaggauguaccaaccuguccggguucucuuacauggaacuuaaagugggauacaucucagccauaaaagugaacggguucacuugcacagguguugugacagaggcagaaaccuacaccaacuuuguugguuaugucacaaccacauucaagagaaagcauuuccgccccaccccagacgcauguagagccgcguauaacuggaagauggccggugaccccagauaugaagagucucuacacaauccguaccccgacuaccauuggcuucgaacuguaaaaaccaccaaagagucucucguuaucauauccccaagugugacagauuuggacccauaugacaaaucccuucacucaagggucuucccuggcggaaauugcucaggaauaacgguguccucgaccuacugcucaacuaaucaugauuacaccaucuggaugccugagaaucugagacuagggacaucuugugacauuuuuacccauagcagagggaagagagcauccaaaggagacaagacuugcggcuuuguggaugaaagaggccuguauaagucuuuaaagggagcaugcaaacucaaguuauguggaguucucggacuuagacuuauggauggaacaugggucgcgaugcaaacaucagaugagaccaaauggugcccuccaggucaguuggugaauuugcacgacuuucgcucagacgagauugagcaucucguugaggaagaguuagucaagaaaagagaggagugucuggaugcacuagaguccaucaugaccaccaagucagugaguuucagacgucucagucaccugagaaaacuugucccuggguuuggaaaagcauauaccauauucaacaaaaccuugauggaggcugaugcucacuacaagucuguccagaccuggaaugagaucauccccucaaaaggguguuugagaguuggggagaggugucauccccaugugaacgggguguuuuucaaugguauaauauuagggucugacggccauguucuaaucccagagaugcagucaucccuccuccagcaacauauggaguuguuggaaucuucaguuaucccccugaugcaccccuuggcagacccuucuacaguuuucaaagacggugaugagguugaggauuuuguugaaguucaccuccccgaugugcauaaacaggucucaggaguugaccugggucucccgaaaugggggaaguauguauugaugauugcaggggccuugauugcccugauguugauaauuuuccugaugacauguugcagaagagucaaucgaccagaaucuacacaaagcaaucuuggagggacagggagaaaugugucagucccuucccaaagcggaaaagucauaucuucaugggagucauauaagaguggaggcgagaccagacuguga

SEQ ID NO: 62521 - RNA, 1575 nt, Artificial Sequence
  derived and/or modified CDS sequence (wt) from glycoprotein__RABV__AB110656.1
augguuccucaggcucuuuuguucguaccccuucuggcuuucucauucuguuucgggaaauuccccauuuacacaauaccagacaaacuuggucccuggagcccgauugacauacaucaucuuagcuguccaaacaauuugguuguggaggaugaaggaugcacuaaccugucaggguuuuccuacauggaacuuaaagugggauacaucucugccauaaaagugaacggguucacuugcacaggcguugugacggaggcagaaaccuacaccaacuuugucgguuaugucacaaccacguuuaagagaaagcacuuccgcccaacaccagaugcauguagaucugcguacaacuggaaaauggcuggagacccaagauaugaagagucucuacacaauccguaccccgacuaccauuggcuucggacuguaaagaccaccaaagaaucucucguuaucauauccccaaguguggcagauuuggacccauacgacaaaucccuucacucaagggucuuccccaacgggaagugcucgggaauaacggugucuucuaccuacugcucaaccaaccacgauuacaccauuuggcugcccgagaauccgagacuaggaacaucuugugauaucuucaccaauaguagagggaagagagcauccaaagggggcaagacuugcggcuuuguggaugaaagaggccuguauaaguccuuaaagggagcaugcaaacucaaguuauguggaguucuuggacuuagacuuauggauggaacauggguagcgaugcuaacaucagaugagaccaaauggugcccuccugaucaauuggugaaucugcacgacuuucgcucggacgagauugagcaucucguuguggaggaguuggucaagaaaagagaggagugucuggaugcauuagaauccaucaugaccaccaagucagugaguuucagacgucucagucauuuaagaaaacuuguccccggauucggaaaggcauacacuauauucaacaagacccugauggaggcugaugcucacuacaagucgauccggacuuggaacgaaaucauccccucaaaagggugucuaagagugggagggaggugucauccucaugugaacgggguauucuucaacgguauaauacuggggccugacggccauguucuaaucccagagaugcagucaucccuccuccagcaacauauggaguuguuggaguccucagucaucccccuaaugcacccuuuagcagacccaucuacaguuuucaaggacggugaugaggcugaggauuuuguugaaguucaccuucccgaugugcacaaacaggucucugggguugaccugggucucccaaacugggggaaguauguauuaaugagugcagggguccugauugccuugauguugacaauuuuccuaaugacauguuguagaagagucaaucgaccagacucuacacaacgcagucuuggaaugacagggaggaaggugucggucacuucccaaagcgggaaggucauaucuucaugggaaucauauaaaaguggaggugagaccaggcuguga

SEQ ID NO: 62522 - RNA, 1575 nt, Artificial Sequence
  derived and/or modified CDS sequence (wt) from glycoprotein__RABV__AB110657.1
augguuccucaggcucuuuuguucguaccccuucuggcuuucucauucuguuucgggaaauuccccauuuacacaauaccagacaaacuuggucccuggagcccgauugacauacaucaucuuagcuguccaaacaauuugguuguggaggaugaaggaugcacuaaccugucaggguuuuccuacauggaacuuaaagugggauacaucucugccauaaaagugaacggguucacuugcacaggcguugugacggaggcagaaaccuacaccaacuuugucgguuaugucacaaccacguuuaagagaaagcacuuccgcccaacaccagaugcauguagaucugcguacaacuggaaaauggcuggagacccaagauaugaagagucucuacacaauccguaccccgacuaccauuggcuucggacuguaaagaccaccaaagaaucucucguuaucauauccccaaguguggcagauuuggacccauacgacaaaucccuucacucaagggucuuccccaacgggaagugcucgggaauaacggugucuucuaccuacugcucaaccaaccacgauuacaccauuuggcugcccgagaauccgagacuaggaaccucuugugauaucuucaccaauaguagagggaagagagcauccaaagggggcaagacuugcggcuuuguggaugaaagaggccuguauaaguccuuaaagggagcaugcaaacucaaguuauguggaguucuuggacuuagacuuauggauggaacauggguagcgaugcaaacaucagaugagaccaaauggugcccuccugaucaauuggugaaucugcacgacuuucgcucggacgagauugagcaucucguuguggaggaguuggucaagaaaagagaggagugucuggaugcauuagaauccaucaugaccaccaagucagugaguuucagacgucucagucauuuaagaaaacuuguccccggauucggaaaggcauacacuauauucaacaagacccugauggaggcugaugcucacuacaagucgauccggacuuggaacgaaaucauccccucaaaagggugucuaagagugggagggaggugucauccucaugugaacgggguauucuucaacgguauaauacuggggccugacggccauguucuaaucccagagaugcagucaucccuccuccagcaacauauggaguuguuggaguccucagucaucccccuaaugcacccuuuagcagacccaucuacaguuuucaaggacggugaugaggcugaggauuuuguugaaguucaccuucccgaugugcacaaacaggucucugggguugaccugggucucccaaacugggggaaguauguauuaaugagugcagggguccugauugccuugauguugacaauuuuccuaaugacauguuguagaagagucaaucgaccagacucuacacaacgcagucuuggaaugacagggaggaaggugucggucacuucccaaagcgggaaggucauaucuucaugggaaucauauaaaaguggaggugagaccaggcuguga

SEQ ID NO: 62523 - RNA, 1575 nt, Artificial Sequence
  derived and/or modified CDS sequence (wt) from glycoprotein__RABV__AB110658.1
augguuccucaggcucuuuuguucguaccccuucuggcuuucucauucuguuucgggaaauuccccauuuacacaauaccagacaaacuuggucccuggagcccgauugacauacaucaucuuagcuguccaaacaauuugguuguggaggaugaaggaugcacuaaccugucaggguuuuccuacauggaacuuaaagugggauacaucucugccauaaaagugaacggguucacuugcacagguguugugacggaagcagaaaccuacaccaacuuugucgguuaugucacaaccacguuuaagagaaagcacuuccgcccaacaccagaugcauguagaucugcguacaacuggaaaauggccggcgacccaagauaugaggagucccuacacaauccguaccccgacuaccauuggcuucggacuguaaagaccaccaaagagucucucguuaucauauccccaaguguggcagauuuggacccauacgacaaaucccuucacucaagggucuuccccaacgggaagugcucgggaauaacggugucuuccaccuacugcucaaccaaccacgauuacaccauuuggcugcccgagaauccgagacugggaacaucuugugauaucuucaccaauaguagagggaagagagcauccaaagggagcaagacuugcggcuuuguggaugagagaggccuguauaaguccuuaaagggagcaugcaaacucaaguuauguggaguucuuggacuuagacuuauggauggaacauggguagcgaugcaaacaucagaugagaccaaauggugcucuccugaucaguuggugaaucugcacgacuuucgcucggacgagauugagcaucucguuguggaggaguuggucaagaaaagagaggagugucuggaugcauuagaguccaucaugaccaccaagucagugaguuucagacgucucagucauuuaagaaaacuuguccccggguucggaaaggcauauacuauauucaacaaaacccugauggaggcugaugcucacuacaagucgauccggacuuggaacgagaucauccccucaaaagggugucuaagagugggagggaggugucauccucaugugaacgggguguucuucaacgguauaauacuggggccugauggccauguucuaaucccagagaugcagucaucccuccuccagcaacauauggaguuguuggaguccucagucaucccccuaaugcacccuuuagcagacccaucuacaguuuucaaggacggugaugaggcugaggauuuuguugaaguucaccuucccgaugugcacaaacaggucucugggguugaccugggucucccaaacugggggaaguauguauuaaugagugcagggguccugauugccuugauguugacaauuuuccuaaugacauguuguagaagagucaaucgaccagacucuacacaacgcagucuuggaaugacagggaggaaggugucggucacuucccaaagcgggaaggucauaucuucaugggaaucauauaaaaguggaggugagacuaggcuguga

SEQ ID NO: 62524 - RNA, 1575 nt, Artificial Sequence
  derived and/or modified CDS sequence (wt) from glycoprotein__RABV__AB110659.1
augguuccucaggcucuuuuguucguaccccuucuggcuuucucauucuguuucgggaaauuccccauuuacacaauaccagacaaacuuggucccuggagcccgauugacauacaucaucuuagcuguccaaacaauuugguuguggaggaugaaggaugcacuaaccugucaggguuuuccuacauggaacuuaaagugggauacaucucugccauaaaagugaacggguucacuugcacagguguugugacggaagcagaaaccuacaccaacuuugucgguuaugucacaaccacguuuaagagaaagcacuuccgcccaacaccagaugcauguagaucugcguacaacuggaaaauggccggcgacccaagauaugaggagucccuacacaauccguaccccgacuaccauuggcuucggacuguaaagaccaccaaagagucucucguuaucauauccccgaguguggcagauuuggacccauacgacaaaucccuucacucaagggucuuccccaacgggaagugcucgggaauaacggugucuuccaccuacugcucaaccaaccacgauuacaccauuuggcugcccgagaauccgagacugggaacaucuugugauaucuucaccaauaguagagggaagagagcauccaaagggagcaagacuugcggcuuuguggaugagagaggccuguauaaguccuuaaagggagcaugcaaacucaaguuauguggaguucuuggacuuagacuuauggauggaacauggguagcgaugcaaacaucagaugagaccaaauggugcccuccugaucaguuggugaaucugcacgacuuucgcucggacgagauugagcaucucguuguggaggaguuggucaagaaaagagaggagugucuggaugcauuagaguccaucaugaccaccaagucagugaguuucagacgucucagucauuuaagaaaacuuguccccggguucggaaaggcauauacuauauucaacaaaacccugauggaggcugaugcucacuacaagucgauccggacuuggaacgagaucauccccucaaaagggugucuaagagugggagggaggugucauccucaugugaacgggguguucuucuacgguauaauacuggggccugauggccauguucuaaucccagagaugcagucaucccuccuccagcaacauauggaguuguuggaguccucagucaucccccuaaugcacccuuuagcagacccaucuacaguuuucaaggacggugaugaggcugaggauuuuguugaaguucaccuucccgaugugcacaaacaggucucugggguugaccugggucucccaaacugggggaaguauguauuaaugagugcagggguccugauugccuugauguugacaauuuuccuaaugacauguuguagaagagucaaucgaccagacucuacacaacgcagucuuggaaugacagggaggaaggugucggucacuucccaaagcgggaaggucauaucuucaugggaaucauauaaaaguggaggugagacuaggcuguga

SEQ ID NO: 62525 - RNA, 1575 nt, Artificial Sequence
  derived and/or modified CDS sequence (wt) from glycoprotein__RABV__AB110660.1
augguuccucaggcucuuuuguucguaccccuucuggcuuucucauucuguuucgggaaauuccccauuuacacaauaccagacaaacuuggucccuggagcccgauugacauacaucaucuuagcuguccaaacaauuuggucguggaggaugaaggaugcgcuaaccugucaggauuuuccuacauggaacuuaaagugggauacaucucugccauaaaagugaacggguucacuugcacaggcguugugacggaggcagaaaccuacaccaacuuugucgguuaugucacaaccacguuuaagagaaagcacuuccgcccaacaccagaugcauguagaucugccuacaacuggaaaauggcuggagacccaagauaugaggagucucuacacaauccguaccccgacuaccauuggcuucggacuguaaagaccaccaaagaaucucucguuaucauauccccaaguguggcagauuuggacccauacgacaaaucccuucacucaagggucuuccccaacgggaagugcucgggaauaacggugucuucuaccuacugcucaaccaaccacgauuacaccauuuggcugcccgagaauccgagacuaggaacaucuugugauaucuucaccaauaguagagggaagagagcauccaaagggggcaagacuugcggcuuuguggaugaaagaggccuguauaaguccuugaagggagcaugcaaacucaaguuauguggaguucuuggacuuagacuuauggaugggacauggguagcgaugcaaacaucagaugagaccaaauggugcccuccugaucaauuggugaaucugcacgacuuucgcucggacgagauugagcaucucguuguggaggaguuggucaagaaaagagaggagugucuggaugcauuagaguccaucaugaccaccaagucagugaguuucagaggucucagucauuuaagaaaacuuguccccggguucggaaaggcauauacuauauucaacaagacccugauggaggcugaugcucacuacaagucgauccggacuuggaacgaaaucauccccucaaaagggugucuaacagugggagggaggugucauccucaugugaacgggguauucuucaacgguauaauacuggggccugauggccauguucuaaucccagagaugcagucaucccuccuccagcaacauauggaguuguuggaguccucagucaucccccuaaugcacccuuuagcagacccaucuacaguuuucaaggacggugaugaggcugaggauuuuguugaaguucaccuucccgaugugcacaaacaggucucugggguugaccugggucucccaaacugggggaaguauguauuaaugagugcagggguccugauugccuugaugcugacaauuuuccuaaugacauguuguagaagagucaauggaccagacucuacacaacgcagucuuggaaugacagggaggaaggugucggucacuucccaaagcgggaaggucauaucuucaugggaaucauauaaaaguggaggugagaccaggcuguga

SEQ ID NO: 62526 - RNA, 1575 nt, Artificial Sequence
  derived and/or modified CDS sequence (wt) from glycoprotein__RABV__AB110661.1
augguuccucaggcucuuuuguucguaccccuucuggcuuucucauucuguuucgggaaauuccccauuuacacaauaccagacaaacuuggucccuggagcccgauugacauacaucaucuuagcuguccaaacaauuugguuguggaggaugaaggaugcacuaaccugucaggauuuuccuacauggaacuuaaagugggauacaucucugccauaaaagugaacggguucacuugcacaggcguugugacggaggcagaaaccuacaccaacuuugucgguuaugucacaaccacguuuaagagaaagcacuuccgcccaacaccagaugcauguagaucugcuuacaacuggaaaauggcuggagacccaagauaugaggagucucuacacaauccguaccccgacuaccauuggcuucggacuguaaagaccaccaaagaaucucucguuaucauauccccaaguguggcagauuuggacccauacgacaaaucccuucacucaagggucuuccccaacgggaagugcucgggaauaacggugucuucuaccuacugcucaaccaaccacgauuacaccauuuggcugcccgagaauccgagacuaggaacaucuugugauaucuucaccaauaguagagggaagagagcauccaaagggggcaagacuugcggcuuuguggaugaaagaggccuguauaaguccuuaaagggagcaugcaaacucaaguuauguggaguucuuggacuuacacuuauggaugggacauggguagcgaugcaaacaucagaugagaccaaauggugcccuccugaucaauuggugaaucugcacgacuuucgcucggacgagauugagcaucucguuguggaggaguuggucaagaaaagagaggagugucuggaugcauuagaguccaucaugaccaccaagucagugaguuucagacgucucagucauuuaagaaaacuuguccccggguucggaaaggcauauacuauauucaacaagacccugauggaggcugaugcucacuacaagucgauccggacuuggaacgaaaucauccccucaaaagggugucuaagagugggagggaggugucauccucaugugaacgggguauucuuccacgguauaauacuggggccugauggccauguucuaaucccagagaugcagucaucccuccuccagcaacauauggaguuguuggaguccucagucaucccccuaaugcacccuuuagcagacccaucuacaguuuucaaggacggugaugaggcugaggauuuuguugaaguucaccuucccgaugugcacaaacaggucucugggguugaccugggucucccaaacugggggaaguauguauuaaugagugcagggguccugauugccuugauguugacaauuuuccuaaugacauguuguagaagagucaaucgaccagacucuacacaacgcagucuuggaaugacagggaggaaggugucggucacuucccaaagcgggaaggucauaucuucaugggaaucauauaaaaguggaggugagaccaggcuguga

SEQ ID NO: 62527 - RNA, 1575 nt, Artificial Sequence
  derived and/or modified CDS sequence (wt) from glycoprotein__RABV__AB110662.1
augauccuucaggcccuucuguuugugccucuccuaaucucuucguugugucucgggaaauuccccaucuacacaauaccagacaagcuugguccuuggagccccaucgauauacaucaccucagcuguccaaauaauuuaguuguggaggaugaagggugcaccaaucuaucaggauucucuuacauggaacuaaaggugggauacaucucugccauaaaaguaaauggguucacuuguaccgguguugugacagaggcugaaaccuauaccaacuuuguugguuaugucaccaccacauucaagaggaaacauuuccgcccuauaccggaugcaugcagggcugcauacaacuggaagauggcuggugauccuagauaugaggaaucucuucaaaauccuuauccugauuaccacuggcuacggaccguaaaaaccacuaaggagucucuuaucaucauaucuccgaguguggcugauuuagacccauacgacaaaucccuucauucuaggguguucccuggugggaaauguuugggaauaacgguuucuuccaccuacugcucaaccaaccaugauuacaccaucuggaugcccgaggaaccaagacucgggacaucuugcgacauuuuuaccagcagcaaagggaaaaaggcaucuaaaggaggcaagacuugcggauuuguggaugaaaggggcuuguacaagucucuaaaaggagcguguaaacucaagcugugcggaguucucggacuuagacuuauggauggaaccuggguuuccauuccaacaucagacgauaccaaauggugcccuccggaucaauuggugaaucuacaugacuuucacucagacgaaauagagcaucucgucguggaggaguuggucaagaagagggaagaguguuuggacgcauuagaguccaucaugaccaccaaaucuguaaguuuuagacgucucagcuauuugagaaaacuugucccuggguuuggaaaggcauacacuauauucaacaagacuuugauggaggcugacgcccacuacaagucaguucggacuuggaacgagaucauccccuccaaaggguguuugaaagucagagagaggugucauccuccuguggacggaguguucuucaauggcauaauucuggguccagacgggaauguccugauaccagagaugcaaucaucucuacuucaacaacauauggagcuguuggaaucuucuguaauccccuuaaugcaucccuuggcggacccgucaacagucuucaaggaaggggaugaagcggaggauuuuguugaaguucaccucccugauguucacaaacagaucucagggguugaccuuggucucccgaguugggggaaauaucuccugaugauugcagguggucuggcgacacuaguucugauaaucugcucgauggcaugcuguagaagaaccaagcgaacagagucaagaagacgaggcucucgagagucagagaaaaagguaacggcaaccccccagacuaggaaagucguaucuucaugggaguuauacaagagugaaggcgaugccaggcuguga

SEQ ID NO: 62528 - RNA, 1575 nt, Artificial Sequence
  derived and/or modified CDS sequence (wt) from glycoprotein__RABV__AB110663.1
augauucuucaggcccuucuguuugugccucuccuaaucucuucauugugucucgggaaauuccccaucuauacaauaccagauaagcuugguccuuggagccccaucgauauacaucaccucagcuguccaaauaauuuaguuguggaggacgaggggugcaccaaucuaucaggguucucuuacauggaacuaaaggugggauacaucucugccauaaaggugaacggguucacuuguaccgguguggugacagaggcugaaaccuauaccaacuuuguugguuaugucaccaccacauucaagaggaaacauuuucgcccuauaccggaugcaugcagggcugcauacaacuggaagauggcuggugacccuagauaugaggagucucuucaaaauccuuauccugauuaccacuggcuacggaccguaaagaccacuaaggagucucuuaucaucauaucuccgaguguggcugaucuagacccauacgacaaaucccuccauucuaggguguuccccggugggaaguguuugggaauaacgguuucuuccaccuacugcucaaccaaccaugauuacaccaucuggaugcccgaggaaccaagacucgggacaucuugcgacauuuuuaccagcaguaaagggaagaaggcaucuaagggaggcaagacuugcggauuuguggaugaaaggggcuuguacaagucucuaaaaggagcauguaaacucaagcugugcggaguucucggacuuagacuuauggacggaaccuggguuucgauucaaacaucagacgauaccaaauggugcccuccggaucaauuggugaaucuacaugacuuucacucagacgaaauagagcaucucgucguggaggaguuggucaagaagagggaagaguguuuggacgcauuggaguccaucaugaccaccaaaucuguaaguuuuagacgucucagcuaucugagaaaacuugucccuggguuuggaaaggcauauacuauauucaacaagacuuugauggaggcugacgcccacuacaagucaguucggacuuggaacgagaucaucccaucaaaaggguguuugaaagucagagagaggugucauccuccuguggacggaguguucuucaauggcauaauucuggguccggacgggaauguccugauaccugagaugcaaucgucucuacuucaacaacauauggagcuguuggagucuucuguaauccccuuaaugcaucccuuggcggacccgucaacagucuucaaggaaggggaugaagcggaggacuuuguugaaguucaccucccagauguucacaaacagaucucugggguugaccuuggucucccgaguugggggaaauaucuccugaugauugcagguggucuggcggcacuaguucugauaaucugcucaauggcaugcuguagaagaaccaagcgaacagagucaagaagacgaggcucuggagagucagaaaagaagguaacggcaaccccccaaacuaggaaagucguaucuucaugggaguuguacaaaagcgaaggcgaugccagguuguga

SEQ ID NO: 62529 - RNA, 1575 nt, Artificial Sequence
  derived and/or modified CDS sequence (wt) from glycoprotein__RABV__AB110664.1
augauccuucaggcccuccuguuugugccucuccuaaucucuucguugugucucgggaaauuccccaucuacacaauaccggacaagcuugguccuuggagccccaucgauauacaucaccucagcuguccaaauaauuuaguuguggaggaugagggguguaccaaucuaucaggguucucuuacauggaacuaaaggugggauacaucucugccauaaaggugaacggguucacuuguaccgguguugugacagaggcggaaaccuauaccaacuuuguugguuaugucaccaccacauucaagaggaaacauuuccgcccuauaccggaugcaugcagggcugcauacaacuggaagauggcuggugauccuagauaugaggagucucuucaaaauccuuauccugauuaccacuggcuacggaccguaaagaccacuaaggagucucuuaucaucauaucuccgaguguggcugauuuagacccauacgauaaaucccuucauucuaggguguucccuggugggaaguguuugggaauaacgguuucuuccaccuauugcucaaccaaccaugauuacaccaucuggaugcccgaggaaccaagacucgggacaucuugcgacauuuuuaccagcagcaaagggaaaaaggcaucuaagggaggcaggacuugcggauuuguggaugaaaggggcuuguacaagucucuaaaaggagcauguaaacucaaguugugcggaguucucggacuuaggcuuauggauggaaccuggguuucaauucaaaccucagacgacaccaaauggugcccuccggaucaauuggugaaucuacaugacuuucacucagacgaaauagagcaucucgucguggaggaguuggucaagaagagggaagaguguuuggacgcauuggaguccaucaugaccaccaaaucuguaaguuuuagacgucucagcuauuugagaaaacuugucccuggguuuggaaaggcauacacuauauucaacaagacuuugauggaggcugacgcccacuacaagucaguucggacuuggaacgagaucauccccucaaaaugguguuugaaagucagagagaggugucauccuccuguggacggaguguucuucaauggcauaauucuggguccggacgggaauguccugauaccagagaugcaaucgucucuacuucaacaacauauggagcuguuggagucuucuguaauccccuuaaugcaucccuuggcggacccgucaacagucuucaaggaaggggaugaagcggaggauuuuguugaaguucaccucccagauguucacaaacagaucuccgggguugaccuuggucucccgaguugggggaaauaucuccugaugauugcagguggucuggcgacacuaguucugauaaucugcucgauggcaugcuguagaagaaccaagcgaacagagucaagaagacgaggcucuggagagucagagaaaaaggugacggcaaccccccagacuaggaaagucguaucuucaugggaguuguacaagagugaaggcgaugccaggcuguga

SEQ ID NO: 62530 - RNA, 1575 nt, Artificial Sequence
  derived and/or modified CDS sequence (wt) from glycoprotein__RABV__AB110665.1
augauccuucaggcccuucuguuugugccucucuuaaucucuucguugugucucgggaaauuccccaucuacacaauaccggacaagcuugguccuuggagccccaucgauauacaucaccucagcuguccaaauaauuuaguuguggaggacgagggguguaccaaucuaucaggguucucuuacauggaacuaaaggugggauacaucucugccauaaaggugagcggguucacuuguaccgguguugugacagaggcugaaaccuauaccaacuuuguugguuaugucaccaccacauucaagaggaaacauuuccgcccuauaccggaugcaugcagggcugcauacaacuggaagauggcuggugauccuagauaugaggagucucuucacaauccuuauccugauuaccacuggcuacggaccguaaagaccacuaaggagucucuuaucaucauaucuccgaguguggcugauuuagacccguacgauaaaucccuucauucuaggguguucccuggugggaaguguuugggaauaacgguuucuuccaccuauugcucaaccaaccaugauuacaccaucuggaugcccgaggaaccaagacucgggacauccugcgacauuuuuaccaguagcaaagggaaaaaggcaucuaagggaggcaagacuugcggauuuguggaugaaaggggcuuguacaagucucuaaaaggagcauguaaacucaaguugugcggaguucucggacuuagacuuauggauggaacuuggguuucaauucaaaccucagacaauaccaaauggugcccuccggaucaauuggugaaucuacaugacuuucacucagacgaaauagagcaucucguaguggaggaguuggucaagaagagggaagaguguuuggacgcauuggaguccaucaugaccaccaaaucuguaaguuuuagacgucucagcuauuugagaaaacuugucccuggguuuggaaaggcauacacuauauucaacaagacuuugauggaggcugacgcccacuacaagucaguucggacuuggaacgagaucauccccucaaaaggguguuugaaagucagagagaggugucauccuccuguggacggaguguucuucaauggcauaauucuggguccggacgggaauguccugauaccagagaugcagucgucucuacuucaacaacauauggagcuguuggagucuucuguaauccccuuaaugcaucccuuggcggacccgucaacagucuucaaggaaggggaugaagcggaggauuuuguugaaguucaccucccagauguucacaaacagaucuccgggguugaccuuggucucccgaguugggggaaauaucuccugaugauugcagguggucuggcgacacuaguucugauaaucugcucgauggcaugcuguagaagaaccaagcgaacagagucaagaagacgaggcucuggagagucagagaaaaagguaacgguaaccccccagacugggaaagucguaucuucaugggaguuguacaagagugaaggcgaugccaggcuguga

SEQ ID NO: 62531 - RNA, 1575 nt, Artificial Sequence
  derived and/or modified CDS sequence (wt) from glycoprotein__RABV__AB110666.1
augauccuucaggcccuucuguuugugccuuuccuaaucuccucguugugucucgggaaauuccccaucuacacaauaccggacaagcuugguccuuggagccccaucgauauacaucaccucagcuguccaaauaauuuaguuguggaggacgagggaugcaccaaucuaucaggguucucuuacauggaacuaaaggugggauacaucucugccauaaaagugaacggguucacuuguacugguguugugacagaggcugaaaccuauaccaacuuuguugguuaugucacuaccacauucaagaggaaacauuuccgcccuauaccggaugcaugcagggcugcauacaacuggaagauggcuggugauccuagauacgaggagucucuucaaaauccuuauccugauuaccauuggcuacggacaguaaagaccacuaaggagucucuuaucaucauaucuccgaguguggcugauuuagacccauacgacaaaucccuucauucuaggguguucccuggugggaaguguuugggaauaacgguuucuuccaccuacugcucaaccaaccaugauuacaccaucuggaugcccgaggaaccaagacucggaacaucuugcgacauuuuuaccagcagcaaagggaaaaaggcaucuaagggaggcaagacuugcggauuuguggaugaaaggggcuuguacaagucucuaaaaggagcauguaaacucaagcugugcggaguucucggacuuagacuuauggauggaaccuggguuucaauuccaaccucagacgauaccaaauggugcccuccggaucaauuggugaaucuacaugacuuucacucagacgaaauagagcaucucgucguggaggaguuggucaagaagagggaagaguguuuggacgcauuggaguccaucaugaccaccaaaucuguaaguuuuagacgucucagcuauuugagaaaacuugucccuggguuuggaaaggcauacacuauauuuaacaagacuuugauggaggcugacgcccacuacaagucaguucggacuuggaacgagaucauccccucaaaaggguguuugaaagucagagagaggugucauccuccuguggacggaguguucuuuaauggcauaauucuggguccggacgggaauguccugauaccagagaugcaaucgucucuacuucaacaacauauggagcuguuggagucuucuguaauccccuuaaugcaucccuuggcggacccgucaacagucuucaaggaaggggaugaagcggaggauuuuguugaaguucaccucccagauguucacaaacagaucuccggggucgaccuaggucucccgaguugggggaaauaucuccugaugauugcagguggucuggcgacacuaguucugauaaucugcucgauggcaugcugcagaagaaccaagagaacagagucaagaagacgaggcucuggagagucaggggaaaagguaacgacaaccccccagacuaggaaagucguaucuucaugggaguuguacaagagugaaggcgaugccaggcuguga

SEQ ID NO: 62532 - RNA, 1575 nt, Artificial Sequence
  derived and/or modified CDS sequence (wt) from glycoprotein__RABV__AB110667.1
augauccuucaggcccuucuguuugugccucuccuaaucucuucgucgugucucgggaaauuccccaucuacacaauaccagacaagcuugguccuuggagccccaucgauauacaucaccucagcuguccaaauaauuuaguuguggaggacgaggggugcaccaaucuaucaggguucucuuacauggaauuaaaggugggauacaucucugccauaaaggugaacggguucacuuguacugggguugugacagaggcugaaaccuauaccaacuuuguugguuaugucaccaccacauucaagaggaaacauuuucacccuauaccggaugcaugcagggccgcauacaacuggaagauggcuggugauccuagauaugaggagucucuucaaaauccuuauccugauuaccacuggcuacggaccguaaagaccacuaaggagucucuuaucaucauaucuccgaguguggcugauuuagacccauaugacaaaucccuucauucuaggguauucccuggugggaaguguuugggaauaacgguuucuuccaccuacugcucaaccaaccaugauuacaccaucuggaugcccgaggaaccaagacucgggacaucuugcgacauuuuuaccagcagcaaagggaaaaaggcaucuaagggaggcaagacuugcggauuuguggaugaaaggggcuuguacaagucucuaaaaggagcauguaaacucaagcugugcggaguucucggacuuagacucauggauggaaccuggguuucaauucaaacaucagacgauaccaaauggugccccccggaucaauuggugaaucuacaugacuuucacucagaugaaauagagcaucucgucguggaggaguuggucaagaagagggaagaguguuuggacgcauuggaguccaucaugaccaccaaaucuguaaguuuuagacgucucagcuaucugagaaaacuugucccuggguuuggaaaggcauacacuauauucaacaagacuuugauggaggcugaugcccacuacaagucaguucggacuuggaacgagaucauccccucaaaaggguguuugaaagucagagagaggugucauccuccuguggacggaguguuuuuuaauggcauaauucuggguccggacgggaauguccugauaccagagaugcaaucgucucuacuucaacaacauauggagcuguuggagucuucuguaauccccuuaaugcaucccuuggcggauccgucaacagucuucaaggaaggggaugaagcggaggacuuugucgaaguucaccuuccggauguucacaaacagaucucagggguugaccuuggucucccgaguugggggaaauaucuccugaugauugcagguggucuagcgacacuaguucugauaaucugcucgauggcaugcuguagaagaaccaagcgaacagagucaagaagacgaggcucuggagagucaggaaagaaggcaacggcaaccccccagacuaggaaagucguaucuucaugggaguuguacaagagugaaggugaugccaggcuguga

SEQ ID NO: 62533 - RNA, 1575 nt, Artificial Sequence
  derived and/or modified CDS sequence (wt) from glycoprotein__RABV__AB110668.1
augauucuucaggcccuucuguuugugccucuccuaaucucuucauugugucucgggaaauuccccaucuauacaauaccagauaagcuugguccuuggagccccaucgauauacaucaccucagcuguccaaauaauuuaguuguggaggacgaggggugcaccaaucuaucaggguucucuuacauggaacuaaaggugggauacaucucugccauaaaggugaacggguucacuuguaccgguguggugacagaggcugaaaccuauaccaacuuuguugguuaugucaccaccacauucaagaggaaacauuuucgcccuauaccggaugcaugcagggcugcauacaacuggaagauggcuggugacccuagauaugaggagucucuucaaaauccuuauccugauuaccacuggcuacggaccguaaagaccacuaaggagucucuuaucaucauaucuccgaguguggcugaucuagacccauacgacaaaucccuccauucuaggguguucccugguggaaaguguuugggaauaacgguuucuuccaccuacugcucaaccaaccaugauuacaccaucuggaugccugaggaaccaagacucgggacaucuugcgacauuuuuaccagcaguaaagggaagaaggcaucuaagggaggcaagacuugcggauuuguggaugaaaggggcuuguacaagucucuaaaaggagcauguaaacucaagcugugcggaguucucggacuuagacuuauggacggaaccuggguuucgauucaaacaucagacgauaccaaauggugcccuccggaucaauuggugaaucuacaugacuuucacuccgacgaaauagagcaucucgucguggaggaguuggucaagaagagggaagaguguuuggacgcauuggaguccaucaugaccaccaaaucuguaaguuuuagacgucucagcuauuugagaaaacuugucccuggguuuggaaaggcauacacuauauucaacaagaccuugauggaggcugacgcccacuacaagucaguucggacuuggaacgagaucauccccucaaaaggguguuugaaagucagagagaggugucauccuccuguggacggaguguucuucaauggcauaauucuggguccggacgggaauguccugauaccugagaugcaaucgucucuacuucaacaacauauggagcuguuggagucuucuguaauccccuuaaugcaucccuuggcggacccgucaacagucuucaaggaaggggaugaagcggaggacuuuguugaaguucaccucccagauguucauaaacagaucucugggguugaccuuggucucccgaguugggggaaauaucuccugaugauugcagguggucuggcggcacuaguucugauaaucugcucgauggcaugcuguagaagaaccaagcgaacagggucaagaagacgaggcucuggagagucagaaaagaagguaacggcaaccccccaaacuaggaaagucguaucuucaugggaguuguacaaaagugaaggcgaugccagguuguga

SEQ ID NO: 62534 - RNA, 1575 nt, Artificial Sequence
  derived and/or modified CDS sequence (wt) from glycoprotein__RABV__AB110669.1
augauucuucaggcccuucuguuugugccucuccuaaucucuucauugugucucgggaaauuccccaucuauacaauaccagauaagcuugguccuuggagccccaucgauauacaucaccucagcuguccaaauaauuuaguuguggaggacgaggggugcaccaaucuaucaggguucucuuacauggaacuaaaggugggauacaucucugccauaaaggugaacggguucacuuguaccgguguggugacagaggcugaaaccuauaccaacuuuguugguuaugucaccaccacauucaagaggaaacauuuucgcccuauaccggaugcaugcagggcugcauacaacuggaaaauggcuggugacccuagauaugaggagucucuucaaaauccuuauccugauuaccacuggcuacggaccguaaagaccacuaaggagucucuuaucaucauaucuccgaguguggcugaucuagacccauacgacaaaucccuccauucuaggguguucccuggugggaaguguuugggaauaacgguuucuuccaccuacugcucaaccaaccaugauuacaccaucuggaugcccgaggaaccaagacucgggacaucuugcgacauuuuuaccagcaguaaagggaagaaggcaucuaagggaggcaagacuugcggauuuguggaugaaaggggcuuguacaagucucuaaaaggagcauguaaacucaagcugugcggaguucucggacuuagacuuauggacggaaccuggguuuccauucaacauccagacgauaccaaauggugcccuccggaucaauuggugaaucuaccugacuuucccuccgacgaaauagagcaucucguccuggaggaguuggucaagaagagggaagaguguuuggacgcauuggaguccaucaugaccaccaaaucuguaaguuuuagacgucucagcuauuugagaaaacuugucccuggguuuggaaaggcauacacuauauucaacaagacuuugauggaggcugacgcccacuacaagucaguucggacuuggaacgagaucauccccucaaaaggguguuugaaagucagagagaggugucauccuccuguggacgaaguguucuucaauggcauaauucuggguccggacgggaauguccugauaccugagaugcaaucgucucuacuucaacaacauauggagcuguuggagucuucuguaauccccuuaaugcaucccuuggcggacccgucaacagucuucaaggagggggaugaagcggaggacuuuguugaaguucaccucccagauguucacaaacagaucucugggguugaccuuggucucccgaguugggggaaauaucuccugaugauugcagguggucuggcggcacuaguucugauaaucugcucgauggcaugcuguagaagaaccaagcgaacagagucaagaagacgaggcucuggagagucagaaaagaagguaacggcaaccccccaaaauaggaaagucguaucuucaugggaguuguacaagagugaaggcgaugccagguuguga

SEQ ID NO: 62535 - RNA, 1575 nt, Artificial Sequence
  derived and/or modified CDS sequence (wt) from glycoprotein__RABV__AB128149.1
augguuccgcaagcucuucugcuuguacccauucuggguuuuuccucguguuucgggaaauucccuauuuacacgauaccagacacacuuggucccuggagcccgaucgauauacaucaucucaguugcccaaacaauuugguuguagaggacgaaggaugcaccaaccugucaggguucuccuacauggaacuuaaaguuggacgcaucucagccauaaaggugaacggguucacuugcacaggcguuguaacagaggcagaaaccuacacuaacuuuguugguuaugucaccaccacuuucaaaagaaagcauuuccgcccaacaccagaugcuuguagagcugcguacaacuggaagauggccggugaccccagauaugaagagucucuacacaguccguacccugacuaccauuggcuucgaacuguaaaaaccacaaaggagucccucguuaucauaucuccaaguguggcagauuuggacccauaugacaacucccuucacucgagggucuucccuagcggaaagugcucaggaauaacaguaucuucugucuacugcucaacuaaccacgauuacaccguuuggaugccugaaauucugagacuagggacaucuugugacauuuuuaccaauaguagagggaagagagcauccaaggggagcaagaccuguggcuuuguagaugaaagaggccuauauaagucucuaaaaggcgcaugcaaacucaaguuguguggaguucuuggacuuagacuuauggacggaacaugggucgcgaugcagacaucaaaugagaccaaaugguguccucccgaucaguugguuaaucugcacgaccuucgcucagaugaaaucgagcaucuuguuauagaggaauuggucaagaaaagagaggagugucuggaugcauuagaguccaucauaaccaccaagucagugaguuucagacgucucaguuauuuaagaaaacuuguccccggguucggaaaagcauauaccauauucaacaagaccuugauggaggcugaagcucacuacaagucagucaggacuuggaaugagaucauccccucaaaaggauguuugagaguuggagggaggugucauccucauguaaacgggguguuuuucaaugguauaauauuagggccugacggucauguuuuaaucccagagaugcaaucaucccuccuccagcaacauauagaguuauuggaauccucaguuauuccccugaugcacccccuugcagacccguucacaguuuucaaggacggcgaugagacugaggauuuuauagaaguucaccuucccgaugugcacgaacaagucucagggguugaccugggucucccgaacuggggggaguauguauuacuaagugcagggaccuugauugccuugauguugauaauuuuccuaaugacauguuguagaaaagucgaucggccagaaucuacacaacgcagucucagagggacaggaaggaaugugucagucaccucccaaagcgggaaauucauaccuucaugggagucguauaaaagugggggugagacuggacuguga

SEQ ID NO: 62536 - RNA, 1575 nt, Artificial Sequence
  derived and/or modified CDS sequence (wt) from glycoprotein__RABV__AB285215.1
augguuccucaagcucuuuuguuugcaccccuuuugguuuuuucauuguguuucgggaaauucccuaucuacacgauaccagacaaacuuggacccuggagcccgauugacauacaucaucucagcugcccaaauaaucugguuguggaggacgaaggaugcaccaaccugucaggguucuccuacauggaacuuaaaguuggauacaucucagccauaaaggugaacggguucacuugcacaggcguugugacagaggcugaaaccuacacuaacuuuguagguuaugucaccaccacguucaagagaaagcauuuccgcccaauaccagaugcauguagagccgcauacaacuggaagauggccggugaccccagauaugaagagucucuacacaauccguacccugacuaccacuggcuccgaacuguaaaaaccaccaaggagucucucguuaucauauccccaaguguggcggauuuagacccauaugacaaaucccuucacucgagggucuuccccagcgggaagugcucaggaauaacggugucuucuaccuacugcucaacuaaccacgauuacaccaucuggaugccggagaauccgagauuagggacgucuugcgacauuuuuaccaacaguagagggaagagagcauccaaggggggcaagaccugcggauuuguagaugaaagaggcuuguauaagucuuuaaagggagcaugcaaacucaaguuauguggaguucuuggacuuagacucauggauggaacaugggucgcaaugcaaacaucagaugagaccaaaugguguccuccugaucaguuggugaauaugcacgacuuucgcucggaugaaauugaacaucuuguuguggaggaguuggucaagaaaagagaggagugucuggaugcacuagaguccaucaugaccaccaagucagugaguuucagacgucucagucauuuaagaaaacuugucccuggguucggaaaagcauacaccauauucaacaagaccuugauggaggcugaugcucacuacaagucaguccggacuuggaaugagaucauccccucaaaaggguguuuaagaguuggagggaggugucauccccauguaaacgggguguuuuucaaugguauaauauuggggccugacggccauguucuaauccccgagaugcaaucaucccuccuucagcaacauauggaguuauuggaauccucaguuauuccccugaugcacccccuggcagacccguccacaguuuucaaggauggugaugaggcugaggauuuuguagagguucaccuuccugaugugcacaaacaggucucggggguugaccugggucucccgaacugggggaaauauguauuacugagugcagggacccugauugccuugauguugauaauuuuucuaaugacguguuguagaagagucaaucgaccagaaucuacgcaacgcagucucggagggacagggaggaaagugucugucacuucccaaagcgggaaggucauaucuucaugggagucauauaaaagugggggugagacuagacuguaa

SEQ ID NO: 62537 - RNA, 1575 nt, Artificial Sequence
  derived and/or modified CDS sequence (wt) from glycoprotein__RABV__AB362483.1
augguuccccaagcucucuuguuuguaccccuucugguuuuuucauuguguuucgggaaguuccccauuuacacaauaccagacaaacuggguccuuggagcccgauugacauacaucaucucagcuguccaaacaauuugguuguggaggacgaaggaugcaccaaccugucaggguucuccuacauggaacuuaaagugggauacaucucagccauaaaagugaacggauucacaugcacaggcguugugaccgaggcagaaaccuacaccaacuuugucgguuaugucacaaccacguucaaaagaaagcacuuccgcccaacgccagaugcaugcagagccgcguauaacuggaagauggcaggcgaccccagauaugaggagucucuacacaauccguaucccgacuaccauuggcuucggacugugaaaaccaccaaagagucucuuguuaucauauccccaaguguugcagauuuggacccguacgacaaaucccuccacucaagggucuucccuagcgggaagugcucaggaauaacgguauccuccaccuacugcucaacuaaccaugauuacaccauuuggaugcccgagaauccgagacuaggaacaucuugugauaucuuuaccaauaguagagggaagagagcauccaaagggagcaagacuugcggcuuuguggaugagagaggcuuguauaagucuuuaaagggagcaugcaaacucaaguuaugcggaguucuuggacuuagacuuguggauggaacauggauagcgaugcaaacaucagaugagaucaaauggugcccuccugaucaguuaguaaaucugcacgacuuucgcucggaugagauugagcaccuuguuguagaggaguuggucaagaaaagagaagaguguuuggaugcauuagaguccaucgugaccaccaaaucagugaguuucagacgucucagucacuuaagaaaacuugucccuggguucggaaaagcauauacaauauucaauaaaacauugauggaggcugaugcucacuacaagucgauccggacuuggaaugagaucauccccucaaaagggugucuaagggugggagggaggugucauccucaugugaacgggguguuuuuuaaugguauaauacuagggcccgauggccauguucuaaucccagaaaugcagucaucccuccuccagcaacauauggaguuguuggaguccucagucgucccucuuaugcaccccuuggcagacccaucuacaguuuucaaggauggagaugaggcugaagauuuuauugaaguucaccuucccgauguacacaaacaggucucagggguugaccugggucucccagacugggggaaguacguguugaugagugcaggggucuugauugccuugaugcugauaauuucucuaaugacauguuguagaggaguccaucgaccaaacucuauacaacaccggcucggagggacagggaggaaggugucaguuacuucccaaagcgggaaggucauaucuucaugggaguccuauaaaagugggggggagacuagacuguga

SEQ ID NO: 62538 - RNA, 1575 nt, Artificial Sequence
  derived and/or modified CDS sequence (wt) from glycoprotein__RABV__AB458799.1
augguuccucaaguucuuuuguuuguuccccuucuaguuuucucgucauguuucgggaaauuccccauuuacacgauaccagacaaacuugguccauggagucccaucgauauacaucaucucagcuguccgaacaaucuuguuguggaagaugaagggugcaccaaucuguccggauuuuccuacauggaacucaaagugggauauauuucagccauaaaagugaacggauucaccuguacagguguggugacagaagcagaaaccuacacgaacuuuguugguuaugucaccaccacguuuaagagaaagcacuuucgcccuaugccggaugcgugcagagccgcauacaacuggaagauggcuggugaccccagguaugaagagucucugcacaauccguacccugacuaccacuggcuccgaacugucaagaccaccaaggagucccuugucaucauaucuccgagcguugcagauuuggacccguacgauaaaucccuucacucgagaguuuuuccuggcggaaaaugcucaggaauaaccguguccuccacuugcugcucuacuaaccacgacuacaccaucuggaugccugaaaauccuagacugggaacuucgugugacauuuucaccaauaguagagggaagagggcaucaaaagggggcaagacuuguggauuuguggaugaaagaggauuguacaagucucuaaagggagcaugcaagcugaagcuaugugggguucuaggacuuagacuuauggacggaacauggguugcaauucagacaucagaugagaucaaauggugcucuccugaucagcuaguaaaucuacacgacuuucacucggaugagauugaacaucuuguuguggaggaguuggucaaaaagagggaagagugucuggacgcacuggagacuauuaugaccacaaaguccgugaguuucagacgucuuagucauuugaggaagcuagucccuggguuuggaaaggcguauaccauauucaacaaaaccuugauggaggcugaugcucacuauaaaucaauccggacuuggaaugaaaucauccccucuaaaggguguuuaagaguuggggggagaugucauccucaugugaacgggguguucuucaacggcauuauacuggguccugacggacauguucuaaucccagagaugcaaucgucccuccuccaccagcauauggaauuguuggaguccucagucaucccguugaugcaucccuuagcagacccgucaacagucuuuaaagacggcgacgaggcagaggacuuuguugagguucaccuuccggaugugcacaagcagaucucggggguugaucuuggucucccaaacugggggaaguaugugcugauaagugcgggugcucugacugcauuaauguugaugauuuucuuaaugacguguugcagaaaggcuaauagagcagagucaauacaacacaauccuggagagacagggaggaaagugucgguaacuucucacaacggaagggucauaucuucaugggaaucauauaaaagcggaggugagaccaaacuguga

SEQ ID NO: 62539 - RNA, 1575 nt, Artificial Sequence
  derived and/or modified CDS sequence (wt) from glycoprotein__RABV__AB458800.1
augguuccucaagcccuucuguuuguaccccuucuggccauuccauuguguuuugggaaauucccuauuuacacgauaccagacaaacucggucccuggagucccauugauauacaucaccucagcuguccgaauaauuugguuguggaggaugaaggauguaccaaucugucaggauucucauacauggaacuuaaaguaggauacauuucagccauaaaggugaacggguucacuuguacggguguagugacggaagcagaaaccuacacuaacuuuguuggcuaugucaccaccacguuuaagagaaagcacuuucgaccaacaccggaugcaugcagauccgcauacaauuggaagauggcuggugaccccagauacgaagagucucugcacaaucccuauccugauuaucauuggcuucggacuguaaaaaccaccaaagaguccuuuguuaucauaucuccaaguguggcagaucuagauccguacgauaaaucccuccauucgagaguuuuuccuagaggaaaaugcucaggaauaacggugucuucuaccuacugcucuaccaaccaugacuacaccaucuggaugccugaaaaucccagacuggggaccucuugugauauuuucaccaauaguagagggaagagagcauccaaagggagcaagaccuguggauuuguagaugagagaggcuuguacaaaucucuaaaaggagcaugcaaacugaagcugugugggguucuuggacuuagacuuauggauggaacaugggucgcgauucagacaucagacgagaccaaguggugcccuccugaccagcuagugaaucuacaugacuuucauucggaugagauugaacaucuuguuguggaggaguuggucaagaaaagggaagagugccuagaugcacuggaguccaucaugaccaccaaguccgugaguuuccgacgucucagucacuugaggaaacuugugccuggguucggaaaagcauacaccauauucaauaagaccuugauggaggcugaugcucacuacaagucgguccggacuuggaacgagaucauccccucuaaaggguguuugagaguuggaggcagaugucauccccaugugaacgggguguuuuuuaaugguauuauccuaggcccugacggccaugucuuaaucccggaaaugcagucaucucuccuucagcagcauauggaguuguuggaauccucggucaucccccuaaugcauccuuuggcagauccaucaacgguuuuuaaagauggugacgaggcggaggauuuuguugagguucaccuuccagaugugcauaagcaggucucagggguugaucucggucucccaagcugggggaaguauguguugaugagcgcaggcauuuugacugcacugaugcugaugaucuucuuaaugacguguugccgaaggacuaauagagcagagucaauacaacacagucuuggagagacagggaggaaagugucgguaaccucccaaagcgggagggucauaucuucaugggagucauacaaaagcggaggugagaccaaguuguaa

SEQ ID NO: 62540 - RNA, 1575 nt, Artificial Sequence
  derived and/or modified CDS sequence (wt) from glycoprotein__RABV__AB458801.1
augguuccucaagcccuucuguuuguaccccuucuggccauuccauuguguuuugggaaauuccccauuuacacgauaccagacaaacucggucccuggagucccauugauauacaucaccucagcuguccgaauaauuugguuguggaggaugaaggauguaccaaucugucaggauucucauacauggaacuuaaaguaggauacauuucagccauaaaggugaacggguucacuuguacggguguggugacggaagcagaaaccuacacuaacuuuguuggcuaugucaccaccacguuuaagagaaagcacuuucgaccaacaccggaugcaugcagauccgcauacaauuggaagauggcuggugaccccagauacgaagagucucugcacaaucccuauccugauuaucauuggcuucggacuguaaaaaccaccaaagaguccuuuguuaucauaucuccaaguguggcagaucuagauccguacgauaaaucccuccauucgagaguuuuuccuagaggaaaaugcucaggaauaacggugucuucuaccuacugcucuaccaaccaugacuacaccaucuggaugccugaaaaucccagacuggggaccucuugugauauuuucaccaauaguagagggaagagagcauccaaagggagcaagaccuguggauuuguagaugagagaggcuuguacaaaucucuaaaaggagcaugcaaacugaagcugugugggguucuuggacuuagacuuauggauggaacaugggucgcgauucagacaucagacgagaccaaguggugcccuccugaccagcuagugaaucuacaugacuuucauucggaugagauugaacaucuuguuguggaggaguuggucaagaaaagggaagagugccuagaugcacuggaguccaucaugaccaccaaguccgugaguuuccgacgucucagucacuugaggaaacuugugccuggguucggaaaagcauacaccauauucaauaagaccuugauggaggcugaugcucacuacaagucgguccggacuuggaacgagaucauccccucuaaaggguguuugagaguuggaggcagaugucauccccaugugaacgggguguuuuuuaaugguauuauccuaggcccugacggccaugucuuaaucccggaaaugcagucaucucuccuucagcagcauauggaguuguuggaauccucggucaucccccuaaugcauccuuuggcagauccaucaacgguuuuuaaagauggugacgaggcggaggauuuuguugagguucaccuuccagaugugcauaagcaggucucaggggucgaucucggucucccaagcugggggaaguauguguugaugagcgcaggcauuuugacugcacugaugcugaugaucuucuuaaugacguguugccgaaggacuaauagagcagagucaauacaacacagucuuggagagacagggaggaaagugucgguaaccucccaaagcgggagggucauaucuucaugggagucauacaaaagcggaggugagaccaaguuguaa

SEQ ID NO: 62541 - RNA, 1575 nt, Artificial Sequence
  derived and/or modified CDS sequence (wt) from glycoprotein__RABV__AB458802.1
augguuccucaagcccuucuguuuguaccccuucuggccauuccauuguguuuugggaaauucccuauuuacacgauaccagacaaacucggucccuggagucccaucgauauacaucaccucagcuguccgaauaauuugguuguggaggaugaaggauguaccaaucugucaggauucucauacauggaacuuaaaguaggauacauuucagccauaaaggugaacggguucacuuguacggguguggugacggaagcagaaaccuacacuaacuuuguuggcuaugucaccaccacguuuaagagaaagcacuuucgaccaacaccggaugcaugcagauccgcauacaauuggaagauggcuggugaccccagauacgaagagucucugcacaaucccuauccugauuaucauuggcuucggacuguaaaaaccaccaaagaguccuuuguuaucauaucuccaaguguggcagaucuagauccguacgauaaaucccuccauucgagaguuuuuccuagaggaaaaugcucaggaauaacggugucuucuaccuacugcucuaccaaccaugacuacaccaucuggaugccugaaaaucccagacuggggaccucuugugauauuuucaccaauaguagagggaagagagcauccaaagggagcaagaccuguggauuuguagaugagagaggcuuguacaaaucucuaaaaggagcaugcaaacugaagcugugugggguucuuggacuuagacuuauggauggaacaugggucgcgauucagacaucagacgagaccaaguggugcccuccugaccagcuagugaaucuacaugacuuucauucggaugagauugaacaucuuguuguggaggaguuggucaagaaaagggaagagugccuagaugcacuggaguccaucaugaccaccaaguccgugaguuuccgacgucucagucacuugaggaaacuugugccuggguucggaaaagcauacaccauauucaauaagaccuugauggaggcugaugcucacuacaagucgguccggacuuggaacgagaucauccccucuaaaggguguuugagaguuggaggcagaugucauccccaugugaacgggguguuuuuuaaugguauuauccuaggcccugacggccaugucuuaaucccggaaaugcagucaucucuccuucagcagcauauggaguuguuggaauccucggucaucccccuaaugcauccuuuggcagauccaucaacgguuuuuaaagauggugacgaggcggaggauuuuguugagguucaccuuccagaugugcauaagcaggucucaggggucgaucucggucucccaagcugggggaaguauguguugaugagcgcaggcauuuugacugcacugaugcugaugaucuucuuaaugacguguugccgaaggacuaauagagcagagucaauacaacacagucuuggagagacagggaggaaagugucgguaaccucccaaagcgggagggucauaucuucaugggagucauacaaaagcggaggugagaccaaguuguaa

SEQ ID NO: 62542 - RNA, 1575 nt, Artificial Sequence
  derived and/or modified CDS sequence (wt) from glycoprotein__RABV__AB458803.1
augguuccucaaguucuuuuguuuguuccccuucuaguuuucucgucauguuucgggaaauuccccauuuacacgauaccagacaaacuugguccauggagucccaucgauauacaucaucucagcuguccgaacaaucuuguuguggaagaugaagggugcaccaaucuguccggauuuuccuacauggaacucaaagugggguauauuucagccauaaaagugaacggauucaccuguacagguguggugacagaagcagaaaccuacacgaacuuuguugguuaugucaccaccacguuuaagagaaagcacuuucgcccuaugccggaugcgugcagagccgcauacaacuggaagauggcuggugaccccagguaugaagagucucugcacaauccguacccugacuaccacuggcuccgaacugucaagaccaccaaggagucccuugucaucauaucuccgagcguugcagauuuggacccguacgauaaaucccuucacucgagaguuuuuccuggcggaaaaugcucaggaauaaccguguccuccacuugcugcucuacuaaccacgacuacaccaucuggaugccugaaaauccuagacugggaacuucgugugacauuuucaccaauaguagagggaagagggcaucaaaagggggcaagacuuguggauuuguggaugaaagaggauuguacaagucucuaaagggagcaugcaagcugaagcuaugugggguucuaggacuuagacuuauggacggaacauggguugcaauucagacaucagaugagaucaaauggugcucuccugaucagcuaguaaaucuacacgacuuucacucggaugagauugaacaucuuguuguggaggaguuggucaaaaagagggaagagugucuggacgcacuggagacuauuaugaccacaaaguccgugaguuucagacgucuuagucauuugaggaagcuagucccuggguuuggaaaggcguauaccauauucaacaaaaccuugauggaggcugaugcucacuauaaaucaauccggacuuggaaugaaaucauccccucuaaaggguguuuaagaguuggggggagaugucauccucaugugaacgggguguucuucaacggcauuauacuggguccugacggacauguucuaaucccagagaugcaaucgucccuccuccaccagcauauggaauuguuggaguccucagucaucccguugaugcaucccuuagcagacccgucaacagucuuuaaagacggcgacgaggcagaggacuuuguugagguucaccuuccggaugugcacaagcagaucucggggguugaucuuggucucccaaacugggggaaguaugugcugauaagugcgggugcucugacugcauuaauguugaugauuuucuuaaugacguguugcagaaaggcuaauagagcagagucaauacaacacaauccuggagagacagggaggaaagugucgguaacuucucacaacggaagggucauaucuucaugggaaucauauaaaagcggaggugagaccaaacuguga

SEQ ID NO: 62543 - RNA, 1575 nt, Artificial Sequence
  derived and/or modified CDS sequence (wt) from glycoprotein__RABV__AB458804.1
augauuccucaaguucuuuuguuuguuccccuucuaguuuucucgucauguuucgggaaauuccccauuuacacgauaccagacaaacuugguccauggagucccaucgauauacaucaucucagcuguccgaacaaucugguuguggaagaugaaggaugcaccaaucuguccggauuuuccuacauggaacucaaagugggauauauuucagccauaaaagugaacggauucaccuguacagguguggugacagaagcagaaaccuacacgaacuuuguugguuaugucaccaccacguuuaagagaaagcacuuucgcccuaugccggaugcguguagagcugcauacaacuggaaaauggcuggugaccccagguaugaagagucucugcacaauccguacccugacuaccacuggcuccgaacugucaagaccaccaaagagucccuugucaucauaucuccgagcguugcagauuuggacccguacgauaaaucccuucacucgagaguuuuuccuggcggaaaaugcucaggaauaaccguguccuccacuugcugcucuacuaaccacgacuacaccaucuggaugccugaaaauccuagacugggaacuucgugugacauuuucaccaauaguagagggaagagggcaucaaaagggggcaagacuuguggauuuguggaugaaagaggcuuguacaagucucuaaagggagcaugcaagcugaagcuaugugggguucugggacuuagacuuauggacggaacaugggucgcaauucagacaucagaugagaucaaauggugcucuccugaucagcuaguaaaucuacacgacuuucacucggaugagauugaacaucuuguuguggaggaguuggucaaaaagagggaagagugucuggacgcacuggagacuauuaugaccacaaaguccgugaguuucagacgucuuagucauuugaggaagcuagucccuggguuuggaaaggcuuacaccauauucaacaaaaccuugauggaggcugaugcucacuauaaaucaauccggacuuggaaugaaaucauccccucuaaaggguguuuaagaguuggggggagaugucauccucaugugaacgggguguucuucaacggcauuauacuggguccugacggacauguucuaaucccagagaugcaaucgucccuccuccaccagcauauggaauuguuggaguccucagucaucccguugaugcaucccuuagcagacccgucaacagucuuuaaggacggcgacgaggcagaggacuuuguugagguucaccuuccggaugugcacaagcagaucucgggggucgaucuuggucucccaaacugggggaaguauguguugacaagugcaggugcucugacugcauuaauguuaaugauuuucuuaaugacguguugcagaaagacuaauagagcagagucaauacaacgcaguccuggagagacagagaggaaagugucgguaacuucucacaacgggagggucauaucuucaugggaaucauauaaaagcggaggugagaccaagcuguga

SEQ ID NO: 62544 - RNA, 1575 nt, Artificial Sequence
  derived and/or modified CDS sequence (wt) from glycoprotein__RABV__AB458805.1
augguuccucaaguucuuuuguuuguuccccuucuaguuuucucgucauguuucgggaaauuccccauuuacacgauaccagacaaacuugguccauggagucccaucgauauacaucaucucagcuguccgaacaaucuuguuguggaagaugaagggugcaccaaucuguccggauuuuccuacauggaacucaaagugggauauauuucagccauaaaagugaacggauucaccuguacagguguggugacagaagcagaaaccuacacgaacuuuguugguuaugucaccaccacguuuaagagaaagcacuuucgcccuacgccggaugcgugcagagccgcauacaacuggaagauggcuggugaccccagguaugaagagucucugcacaauccguacccugacuaccacuggcuccgaacugucaagaccaccaaggagucccuugucaucauaucuccgagcguugcagauuuggacccguacgauaaaucccuucacucgagaguuuuuccuggcggaaaaugcucaggaauaaccguguccuccacuugcugcucuacuaaccacgacuacaccaucuggaugccugaaaauccuagacugggaacuucgugugacauuuucaccaauaguagagggaagagggcaucaaaagggggcaagacuuguggauuuguggaugaaagaggauuguacaagucucuaaagggagcaugcaagcugaagcuaugugggguucuaggacuuagacuuauggacggaacauggguugcaauucagacaucagaugagaucaaauggugcucuccugaucagcuaguaaaucuacacgacuuucacucggaugagauugaacaucuuguuguggaggaguuggucaaaaagagggaagagugucuggacgcacuggagacuauuaugaccacaaaguccgugaguuucagacgucuuagucauuugaggaagcuagucccuggguuuggaaaggcguauaccauauucaacaaaaccuugauggaggcugaugcucacuauaaaucaauccggacuuggaaugaaaucauccccucuaaaggguguuuaagaguuggggggagaugucauccucaugugaacgggguguucuucaacggcauuauacuggguccugacggacauguucuaaucccagagaugcaaucgucccuccuccaccagcauauggaauuguuggaguccucagucaucccguugaugcaucccuuagcagacccgucaacagucuuuaaagacggcgacgaggcagaggacuuuguugagguucaccuuccggaugugcacaagcagaucucggggguugaucuuggucucccaaacugggggaaguaugugcugauaagugcgggugcucugacugcauuaauguugaugauuuucuuaaugacguuuugcagaaaggcuaauagagcagagucaauacaacacaauccuggagagacagggaggaaagugucgguaacuucucacaacggaagggucauaucuucaugggaaucauauaaaagcggaggugagaccaaacuguga

SEQ ID NO: 62545 - RNA, 1575 nt, Artificial Sequence
  derived and/or modified CDS sequence (wt) from glycoprotein__RABV__AB458806.1
augguuccucaagcccuucuguuuguaccccuucuggccauuccauuguguuuugggaaauuccccauuuacacgauaccagacaaacucggucccuggagucccauugauauacaucaccucagcuguccgaauaauuugguuguggaggaugaaggauguaccaaucugucaggauucucauacauggaacuuaaaguaggauacauuucagccauaaaggugaacggguucacuuguacggguguggugacggaagcagaaaccuacacuaacuuuguuggcuaugucaccaccacguuuaagagaaagcacuuucgaccaacaccggaugcaugcagauccgcauacaauuggaagauggcuggugaccccagauacgaagagucucugcacaaucccuauccugauuaucauuggcuucggacuguaaaaaccaccaaagaguccuuuguuaucauaucuccaaguguggcagaucuagauccguacgauaaaucccuccauucgagaguuuuuccuagaggaaaaugcucaggaauaacggugucuucuaccuacugcucuaccaaccaugacuacaccaucuggaugccugaaaaucccagacuggggacuucuugugauauuuucaccaauaguagagggaagagagcauccaaagggagcaagaccuguggauuuguagaugagagaggcuuguacaaaucucuaaaaggagcaugcaaacugaagcugugugggguucuuggacuuagacuuauggauggaacaugggucgcgauucagacaucagacgagaccaaguggugcccuccugaccagcuagugaaucuacaugacuuucauucggaugagauugaacaucuuguuguggaggaguuggucaagaaaagggaagagugccuagaugcacuggaguccaucaugaccaccaaguccgugaguuuccgacgucucagucacuugaggaaacuugugccuggguucggaaaagcauacaccauauucaauaagaccuugauggaggcugaugcucacuacaagucgguccggacuuggaacgagaucauccccucuaaaggguguuugagaguuggaggcagaugucauccccaugugaacgggguguuuuuuaaugguauuauccuaggcccugacggccaugucuuaaucccggaaaugcagucaucucuccuucagcagcauauggaguuguuggaauccucggucaucccccuaaugcauccuuuggcagauccaucaacgguuuuuaaagauggugacgaggcggaggauuuuguugagguucaccuuccagaugugcauaagcaggucucaggggucgaucucggucucccaagcugggggaaguauguguugaugagcgcaggcauuuugacugcacugaugcugaugaucuucuuaaugacguguugccgaaggacuaauagagcagagucaauacaacacagucuuggagagacagggaggaaagugucgguaaccucccaaagcgggagggucauaucuucaugggagucauacaaaagcggaggugagaccaaguuguaa

SEQ ID NO: 62546 - RNA, 1575 nt, Artificial Sequence
  derived and/or modified CDS sequence (wt) from glycoprotein__RABV__AB496676.1
augauucuucaggcccuucuguuugugccucuccuaaucucuucauugugucucgggaaauuccccaucuauacaauaccggauaagcuugguccuuggagccccaucgauauacaucaccucagcuguccaaauaauuuaguuguggaggacgaggggugcaccaaucuaucaggguucucuuacauggaacuaaaggugggauacaucucugccauaaaggugaacggguucacuuguaccgguguggugacagaggcugaaaccuauaccaacuuuguugguuaugucaccaccacauucaagaggaaacauuuucgcccuguaccggaugcaugcagggcugcauacaacuggaaaauggcuggugacccuagauaugaggagucucuucaaaauccuuauccugauuaccacuggcuacggaccguaaagaccacuaaggagucucuuaucaucauaucuccgaguguggcugaucuagacccauacgacaaaucccuccauucuaggguguucccuggugggaaguguuugggaauaacgguuucuuccaccuacugcucaaccaaccaugauuacaccaucuggaugcccgaggaaccaagacucgggacaucuugcgacauuuuuaccagcaguaaagggaagaaggcuucuaagggaggcaagacuugcggauuuguggaugaaaggggcuuguacaagucucuaaaaggggcauguaaacucaagcugugcggaguucucggacuuagacuuauggacggaaccuggguuucgauucaaacaucagacgauaccaaauggugcccuccggaucaauuggugaaucuacaugacuuucacucagacgaaauagagcaucucgucguggaggaguuggucaagaagagggaagaguguuuggacgcauuggaguccaucaugaccaccaaaucuguaaguuuuagacgucucagcuauuugagaaaacuugucccuggguuuggaaaggcauacacuauauucaacaagacuuugauggaggcugacgcccacuacaagucaguucggacuuggaacgagaucauccccucaaaaggguguuugaaagucagagagaggugucauccuccuguggacggaguguucuucaacggcauaauucuggguccggacgggaauguccugauaccugagaugcaaucgucucuacuucaacaacauauggagcuguuggagucuucuguaauccccuuaaugcaucccuuggcggacccgucaacagucuucaaggaaggggaugaagcggaggacuuuguugaaguucaccucccagauguucacaaacagaucucugggguugaccuuggucucccgaguugggggaaauaucuccugaugauugcagguggucuggcggcacuaguucugauaaucugcucgauggcaugcuguagaagaaccaagcgaacagagucaagaagacgaggcucuggagagucagaaaagaagguagcggcaaccccccaaacuaggaaagucauaucuucaugggaguuguacaagagugaaggcgaugccagguuguga

SEQ ID NO: 62547 - RNA, 1575 nt, Artificial Sequence
  derived and/or modified CDS sequence (wt) from glycoprotein__RABV__AB496677.1
augauucuucaggcccuucuguuugugccucuccuaaucucuucauugugucucgggaaauuccccaucuauacaauaccagauaagcuugguccuuggagccccaucgauauacaucaccucagcuguccaaauaauuuaguuguggaggacgaggggugcaccaaucuaucaggguucucuuauauggaacuaaaggugggauacaucucugccauaaaggugaacggguucacuuguaccgguguggugacagaggcugaaaccuauaccaacuuuguugguuaugucaccaccacauucaagaggaaacauuuucgcccuguaccggaugcaugcagggcugcauacaacuggaagauuacuggugacccuagauaugaggagucucuucaaaauccuuauccugauuaccacuggcuacggaccgucaagaccacuaaggagucucuuaucaucauaucuccgaguguggcugaucuagacccauacgacaaaucccuccauucuaggguguucccuggugggaaguguuugggaauaacgguuucuuccaccuacugcucaaccaaccaugauuacaccaucuggaugcccgaggaaccaagacucgggacaucuugcgacauuuuuaccagcaguaaagggaagaaggcuucuaagggaggcaagacuugcggauuuguggaugaaaggggcuuguacaagucucuaaaaggagcauguaaacucaagcugugcggaguucucggacuuagacuuauggacggaaccuggguuucgauucaaacaucagacgauaccaaaugguguccuccggaucaauuggugaaucuacaugacuuucacucagacgaaauagagcaucucgucguggaggaguuggucaagaagagggaagaguguuuggacgcauuggaguccauaaugaccaccaaaucugugaguuuuagacgucucagcuauuugagaaaacuugucccuggguuuggaaaggcauacacuauauucaacaagacuuugauggaggcugacgcccacuacaagucaguucggacuuggaacgagaucauccccucaaaaggguguuugaaagucagagagaggugucauccuccuguggacggaguguucuucaacggcauaauucuggguccggacgggaauguccugauaccugagaugcaaucgucucuacuucaacaacauauggagcuguuggaaucuucuguaauccccuuaaugcaucccuuggcggacccgucaacagucuucaaggaaggggaugaagcggaggacuuuguugaaguucaccucccagauguucacaaacagaucucugggguugaccuuggucucccgaguugggggaaauaucuccugaugauugcagguggucuggcggcacuaguucugauaaucugcucgauggcaugcuguagaagaaccaagcgaacagagucaagaagacgaggcucuggagagucagaaaagaagguaacggcaaccccccaaacuaggaaagucguaucuucaugggaguuguacaagagugaaggcgaugccagguuguga

SEQ ID NO: 62548 - RNA, 1575 nt, Artificial Sequence
  derived and/or modified CDS sequence (wt) from glycoprotein__RABV__AB496678.1
augauucuucaggcccuucuguuugugccucuccuaaucucuucauugugucucgggaaauuccccaucuauacaauaccagauaagcuugguccuuggagccccaucgauauacaucaccucagcuguccaaauaauuuaguuguggaggacgaggggugcaccaaucuaucaggguucucuuacauggaacuaaaggugggauacaucucugccauaaaggugaacggguucacuuguaccgguguggugacagaggcugaaaccuauaccaacuuuguugguuaugucaccaccacauucaagaggaaacauuuucgcccuaugccggaugcaugcagggcugcauacaacuggaagaugacuggugacccuagauaugaggagucucuucaaaauccuuauccugauuaccacuggcuacggaccguaaagaccacuaaggagucucuuaucaucauaucuccgaguguggcugaucuagacccauacgacaaaucccuccauucuaggguguucccuggugggaagugucugggaauaacgguuucuuccaccuacugcucaaccaaccaugauuacaccaucuggaugcccgaggaaccgagacucgggacaucuugcgacauuuuuaccagcaguaaagggaagaaggcaucuaagggaggcaagacuugcggauuuguggaugaaaggggcuuguacaagucucuaaaaggagcauguaaacucaagcugugcggaguucucggacuuagacuuauggacggaaccuggguuucgauucaaacaucagacgauaccaaaugguguccuccggaucaauuggugaaucuacaugacuuucacucagacgaaauagagcaucucgucguggaggaguuggucaagaagagggaagaguguuuggacgcauuggaguccaucaugaccaccaaaucuguaaguuuuagacgucucagcuacuugagaaaacuugucccuggguuuggaaaggcauacacuauauucaacaagacuuugauggaggcugacgcccacuacaagucaguucggacuuggaacgagaucauccccucaaaaggguguuugaaagucagagagaggugucauccuccuguggacggaguguucuucaauggcauaauucuggguccggacgggaauguccugauaccugagaugcaaucgucucuacuucaacaacauauggagcuguuggagucuucuguaauccccuuaaugcaucccuuggcggacccgucaacagucuucaaggaaggggaugaagcggaggacuuuguugaaguucaccuuccagauguucacaaacagaucucugggguugaccuuggucucccgaguugggggaaauaucuccugaugauugcagguggucuggcggcacuaguucugauaaucugcucgauggcaugcuguagaagaaccaagcgaacagagucaagaagacgaggcucuggagagucagaaaagaagguaacggcaaccccccaaacuaggaaagucguaucuucaugggaguuguacaagagugaaggcgaugccagguuguga

SEQ ID NO: 62549 - RNA, 1575 nt, Artificial Sequence
  derived and/or modified CDS sequence (wt) from glycoprotein__RABV__AB496679.1
augauucuucaggcccuucuguuugugccucuccuaaucucuucauugugucucgggaaauuccccaucuauacaauaccagauaagcuugguccuuggagccccaucgauauacaucaccucagcuguccaaauaauuuaguuguggaggacgaggggugcaccaaucuaucaggguucucuuacauggaacuaaaggugggauacaucucugccauaaaggugaacggguucacuuguaccgguguggugacagaggcugaaaccuauaccaacuuuguugguuaugucaccaccacauucaagaggaaacauuuucgcccuauaccggaugcaugcagggcugcauacaacuggaagauggcuggugacccuagauaugaggagucucuucaaaauccuuauccugauuaccacuggcuacggaccguaaagaccacuaaggagucucuuaucaucauaucuccgaguguggcugaucuagacccauacgacaaaucccuccauucuaggguguucccuggugggaaguguuugggaauaacgguuucuuccaccuacugcucaaccaaccaugauuacaccaucuggaugcccgaggaaccaagacucgggacaucuugcgacauuuuuaccagcaguaaagggaagaaggcaucuaagggaggcaagacuugcggauuuguggaugaaaggggcuuguacaagucucuaaaaggagcauguaaacucaagcugugcggaguucucggacuuagacuuauggacggaaccuggguuucgauucaaacaucagacgauaccaaauggugcccuccggaucaauuggugaaucuacaugacuuucacucagacgaaauagagcaucucgucguggaggaguuggucaagaagagggaagaguguuuggacgcauuggaguccaucaugaccaccaaaucuguaaguuuuagacgucucagcuauuugagaaaacuugucccuggguuuggaaaggcauacacuauauucaacaagaccuugauggaggcugacgcccacuacaagucaguucggacuuggaacgagaucauccccucaaaaggguguuugaaagucagagagaggugucauccuccuguggacggaguguucuucaauggcauaauucuggguccggacgggaauguccugauaccugagaugcaaucgucucuacuucaacaacauauggagcuguuggagucuucuguaauccccuuaaugcaucccuuggcggacccgucaacagucuucaaggaaggggaugaagcggaggacuuuguugaaguucaccucccagauguucacaaacagaucucugggguugaccuuggucucccgaguugggggaaauaucuccugaugauugcagguggucuggcggcacuaguucugauaaucugcucgauggcaugcuguagaagaaccaagcaaacagagucaagaagacgaggcucuggagagucagaaaagaagguaacggcaaccccccaaacuaagaaagucguaucuucaugggaguuguacaaaagugaaggcgaugccagguuguga

SEQ ID NO: 62550 - RNA, 1575 nt, Artificial Sequence
  derived and/or modified CDS sequence (wt) from glycoprotein__RABV__AB496680.1
augauccuuccggcccuucuguuugugccucuccugaucucuucguugugucucgggaaauuccccaucuacacaauaccagacaagcuugguccuuggagccccaucgauauacaucaccucagcuguccaaauaauuuaguuguggaggacgaagggugcaccaaucuaucaggauucucuuacauggaacuaaaggugggauacaucucugccauaaaggugaacggguucacuuguaccgguguugugacagaggcugaaaccuauaccaacuuuguugguuaugucaccaccacauucaagaggaaacauuuccgcccuauaccggaugcaugcagggcugcauacaacuggaagauggcuggugaucccagauaugaggagucucuccaaaauccuuauccugauuaccacuggcuacggaccguaaagaccacuaaggagucucuuaucaucauaucuccgaguguggcugaucuagacccauaugacaaaucccuucauucuaggguguucccuggugggaaauguuugggaauaacgguuuccuccaccuacugcucaaccaaccaugacuacaccaucuggaugcccgaggaaccaagacucgggacaucuugcgacauuuuuacuagcagcaaagggaaaaaggcaucuaagggaggcaagacuugcggauuuguggaugaaaggggcuuguacaagucucuaaaaggagcauguaaacucaagcugugcggaguucuaggacuuagacuuauggauggaaccugggucucaauucaaacaucagacgauaccaaauggugcccuccggaucaauuggugaaucuacaugacuuucacucagacgagauagagcaucucgucguggaagaguuggucaagaagagggaagaguguuuggaugcauuggaguccaucaugaccaccaaaucuguaaguuuuagacgucucagcuacuugagaaaacuugucccuggguuuggaaaggcauacaccauauucaacaagacuuugauggaggcugacgcccacuacaagucaguucggacuuggaacgagaucauccccucaaaagggugcuugaaagucagagagaggugucauccuccuguggacggaguguucuucaacggcauaauucuggguccugacgggaauguccugaucccagagaugcaaucgucucuacuucaacaacauauggagcuguuggagucuucugugaucccccuaaugcaucccuuggcggacccgucaacagucuucaaggaaggggaugaagcggaggauuuuguugaaguucaccucccagauguucacaaacagaucucagggguugaccuuggucucccgaguugggggaaauaucucuugaugauugcagguggucuggcgacacuaguucugauaaucugcucgauggcaugcuguagaagaaccaagcgaacagagucaagaagacgaggcucuggagagucagagaaaaagguaacggcaaccccccagacuaggaaagucguaucuucaugggaguuauacaagagugaaggcgaugccaggcuguga

SEQ ID NO: 62551 - RNA, 1575 nt, Artificial Sequence
  derived and/or modified CDS sequence (wt) from glycoprotein__RABV__AB496681.1
augauccuucaggcccuccuguuugugccucuccuaaucucuucguugugucucgggaaauuccccaucuacacaauaccggacaagcuugguccuuggagccccaucgauauacaucaccucagcuguccaaauaauuuaguuguggaggaugagggguguaccaaucuaucaggguucuccuacauggaacuaaaggugggauacaucucugccauaaaggugaacggguucacuuguaccgguguugugacagaggcugaaaccuauaccaacuuuguugguuaugucaccaccacauucaagaggaaacauuuccgcccuauaccggaugcaugcagggcugcauacaacuggaagauggcuggugauccuagauaugaggagucucuucaaaauccuuauccugaguaccacuggcuacggaccguaaagaccacuaaggagucucuuaucaucauaucuccaaguguggcugauuuagacccauacgauaaaucccuucauucuaggguguucccuggcgggaaguguuugggaauaacgguuucuuccaccuauugcucaaccaaccaugauuacaccaucuggaugcccgaggaaccaagacucgggacaucuugcgacauuuuuaccagcagcaaagggaaaaaggcaucuaagggaggcaagacuugcggauuuguggaugaaaggggcuuguacaagucucuaaaaggagcauguaaacucaaguugugcggaguucucggacuuagacuuauggauggaaccuggguuucaauucaaaccucagacgacaccaaauggugcccuccggaucaauuggugaaucuacaugacuuucacucagacgaaauagagcaucucgucguggaggaguuggucaagaagagggaagaguguuuggacgcauuggaguccaucaugaccaccaaaucuguaaguuuuagacgucucagcuaucugagaaaacuugucccuggguuuggaaaggcauacacuauauucaacaagacuuugauggaggcugacgcccauuacaagucaguucggacuuggaacgagaucauccccucaaaaggguguuugaaagucagagagaggugucauccuccuguggacggaguguucuucaauggcauaauucuggguccggacgggaauguccugauaccagagaugcaaucgucucuacuucaacaacauauggagcuguuggagucuucuguaauccccuuaaugcaucccuuagcggacccgucaacagucuucaaggaaggggaugaagcggaggauuuuguugaaguucaccucccagauguucacaaacagaucuccgggguugaccuuggucucccgaguugggggaaauaucuccugaugauugcagguggucuggcgacacuaguucugauaaucugcucuauggcaugcuguagaagaaccaagcgaacagagucaagaagacgaggcucuggagagucagagaaaaaugugacggcaaccccccagacuaggaaagucguaucuucaugggaguuguacaagagugaaggcgaugccaggcuguga

SEQ ID NO: 62552 - RNA, 1575 nt, Artificial Sequence
  derived and/or modified CDS sequence (wt) from glycoprotein__RABV__AB496682.1
augauccuucaggcccuucuguuugugccucuccugaucucuucgucgugucucgggaaauuccccaucuauacaauaccagacaagcuugguccuuggagccccaucgauauacaucaccucagcuguccaaauaauuuaguuguggaggacgagggguguaccaaucuaucaggguucucuuacauggaacuaaaggugggauacaucucugccauaaaggugaacggguucacuuguacugggguugugacagaggcugaaaccuauaccaacuuuguugguuaugucaccaccacauucaagaggaaacauuuucgcccuauaccggaugcaugcagggcugcauacaacuggaagauggcuggugauccuagauaugaggagucucuucaaaauccuuauccugauuaccacuggcuacggaccguaaagaccacuaaggagucucuuaucaucauaucuccgaguguggcugauuuagacccauaugacaaaucccuucauucuaggguauucccuggugggaaguguuugggaauaacgguuucuuccaccuacugcucaaccaaccaugauuacaccaucuggaugcccgaggaaccaagacucgggacaucuugcgacauuuuuaccagcagcaaagggaaaaaggcauccaagggaggcaagacuugcggauuuguggaugaaaggggcuuguacaagucucuaaaaggagcguguaaacucaagcugugcggaguucucggacuuagacucauggauggaaccuggguuucaauucaaacaucagacgauaccaaauggugcccuccggaucaauuggugaaucuacaugacuuucacucagacgaaauagagcaucucgucguggaggaguuggucaagaagagggaagaguguuuggacgcauuggaguccaucaugaccaccaaaucuguaaguuuuagacgucucagcuauuugagaaaacuugucccuggguuuggaaaggcauacacuauauucaacaagacuuugauggaggcugacgcccacuacaagucaguucggacuuggaaugagaucauccccuccaaaggguguuugaaagucagagagaggugucauccuccuguggacggaguguuuuuuaauggcauaauucuggguccggacgggaauguccugauaccagagaugcaaucgucucuacuucaacaacauauggagcuguuggagucuucuguaauccccuuaaugcaucccuuggcggauccgucgacagucuucaaggaaggggaugaagcggaggacuuuguugaaguucaccuuccggauguucacaaacagaucucaggaguugaccuuggucucccgaguugggggaaauaucuccugaugauugcagguggucuggcgacacuaguucugauaaucugcucgguggcaugcuguagaagaaccaagcgaacagagucaagaagacgaggcucuggagagucaggaaagaagguaacgacaaccccccagacuaggaaagucguaucuucaugggaguuguacaagagugaaggcgaugccaggcuguga

SEQ ID NO: 62553 - RNA, 1575 nt, Artificial Sequence
  derived and/or modified CDS sequence (wt) from glycoprotein__RABV__AB496683.1
augauucuucaggcccuucuguuugugccucuccuaaucucuucauugugucucgggaaauuccccaucuauacaauaccagauaagcuugguccuuggagccccaucgauauacaucaccucagcuguccaaauaauuuaguuguggaggacgaggggugcaccaaucuaucaggguucucuuacauggaacuaaaggugggauacaucucugccauaaaggugaacggguucacuuguaccgguguggugacagaggcugaaaccuauaccaacuuuguugguuaugucaccaccacauucaagaggaaacauuuucgcccuguaccggaugcaugcagggcugcauacaacuggaagauggcuggugacccuagauaugaggagucucuucaaaauccuuauccugauuaccacuggcuacggaccguaaagaccacuaaggagucucuuaucaucauaucuccgaguguggcugaucuagacccauacgacaaaucccuccauucuaggguguucccuggugggaaguguuugggaauaacgguuucuuccaccuacugcucaaccaaccaugauuacaccaucuggaugcccgaggaaccaagacucgggacaucuugcgacauuuuuaccagcaguaaagggaagaaggcuucuaagggaggcaagacuugcggauuuguggaugaaaggggcuuguacaagucucuaaaaggagcauguaaacucaagcugugcggaguucucggacuuagacuuauggacggaaccuggguuucgauucaaacaucagacgauaccaaauggugcccuccggaucaauuggugaaucuacaugacuuucacucagacgaaauagagcaucucgucguggaggaguuggucaagaagagggaagaguguuuggacgcauuggaguccaucaugaccaccaaaucuguaaguuuuagacgucucagcuauuugagaaaacuugucccuggguuuggaaaggcauacacuauauucaacaagacuuugauggaggcugacgcccacuacaagucaguucggacuuggaacgagaucauccccucaaaaggguguuugaaagucagagagaggugucauccuccuguggacggaguguucuucaacggcauaauucuggguccggacgggaauguccugauaccugagaugcaaucgucucuacuucaacaacauauggagcuguuggagucuucuguaauccccuuaaugcaucccuuggcggacccgucaacagucuucaaggaaggggaugaagcggaggacuuuguugaaguucaccucccagauguucacaaacagaucucugggguugaccuuggucucccgaguugggggaaauaucuccugaugauugcagguggucuggcggcacuaguucugauaaucugcucgauggcaugcuguagaagaaccaagcgaacagagucaagaagacgaggcucuggagagucagaaaagaagguaacggcaaccccccaaacuaggaaagucguaucuucaugggaguuguacaagagugaaggcgaugccagguuguga

SEQ ID NO: 62554 - RNA, 1575 nt, Artificial Sequence
  derived and/or modified CDS sequence (wt) from glycoprotein__RABV__AB496684.1
augauucuucaggcccuucuguuugugccucuccuaaucucuucauugugucucgggaaauuccccaucuauacaauaccagauaagcuugguccuuggagccccaucgauauacaucaccucagcuguccaaauaauuuaguuguggaggacgaggggugcaccaaucuaucaggguucucuuacauggaacuaaaggugggauacaucucugccauaaaggugaacggguucacuuguaccggaguggugacagaggcugaaaccuauaccaacuuuguugguuaugucaccaccacauucaagaggaaacauuuucgcccuauaccggaugcaugcagggcugcauacaacuggaagauggcuggugacccuagauaugaggagucucuucaaaauccuuauccugauuaccacuggcuacggaccguaaagaccacuaaggagucucuuaucaucauaucuccgaguguggcugaucuagacccauacgacaaaucccuccauucuaggguguucccuggugggaaguguuugggaauaacgguuucuuccaccuacugcucaaccaaccaugauuacaccaucuggaugcccgaggaaccaagacuagggacaucuugcgacauuuuuaccagcaguaaagggaagaaggcaucuaagggaggcaagacuugcggauuuguggaugaaaggggcuuguacaagucucuaaaaggagcauguaaacucaagcugugcggaguucucggacuuagacuuauggacggaaccuggguuucgauucaaacaucagacgauaccaaauggugcccuccggaucaauuggugaaucuacaugacuuucacucagacgaaauagagcaucucgucguagaggaguuggucaagaagagggaagaguguuuggacgcauuggaguccaucaugaccaccaaaucuguaaguuuuagacgucucagcuauuugagaaaacuugucccuggguuuggaaaggcauacacuauauucaacaagaccuugauggaggcugacgcccacuacaagucaguucggacuuggaacgagaucauccccucaaaaggguguuuaaaagucagagagaggugucauccuccuguggacggaguguucuucaauggcauaauucuggguccggacgggaauguccugauaccugagaugcaaucgucucuacuucaacaacauauggagcuguuggagucuucuguaauccccuuaaugcaucccuuggcggacccgucaacagucuucaaggaaggggaugaagcggaggacuuuguugaaguucaccucccagauguucacaaacagaucucugggguugaccuuggucucccgaguugggggaaauaucuccugaugauugcagguggucuggcggcacuaguucugauaaucugcucgauggcaugcuguagaagaaccaagcgaacagagucaagaagacgaggcucuggagagucagaaaagaagguaacggcagccccccaaacuaggaaagucguaucuucaugggaguuguacaaaagugaaggcgaugccagguuguga

SEQ ID NO: 62555 - RNA, 1575 nt, Artificial Sequence
  derived and/or modified CDS sequence (wt) from glycoprotein__RABV__AB496685.1
augauccuucaggcccuucuguuugugccucuccuaaucucuucguugugucucgggaaauuccccaucuacacaauaccagacaagcuugguccuuggagccccaucgauauacaucaccucagcuguccaaauaauuuaguuguggaggacgaagggugcaccaaucuaucaggauucucuuacauggaacuaaaggugggauacaucucugccauaaaggugaacggguucacuuguaccgguguugugacagaggcugaaaccuauaccaacuuuguugguuaugucaccaccacauucaagaggaaacauuuccgcccuauaccggaugcaugcagggcugcauacaacuggaagauggcuggugauccuagauaugaggagucucuucaaaauccuuauccugauuaccauuggcuacggaccguaaagaccacuaaggagucucuuaucaucauaucuccgaguguggcugauuuagacccauacgacaaaucccuucauucuaggguguucccuggugggaaauguuugggaauaacgguuucuuccaccuacugcucaaccaaccaugauuacaccaucuggaugcccgaggaaccaagacucgagacaucuugcgacauuuuuaccagcagcaaagggaaaaaggcaucuaaaggaggcaagacuugcggauuuguggaugaaaggggcuuguauaagucucuaaaaggagcauguaaacucaagcugugcggaguucucggacuuagacuuauggauggaaccuggguuucaauucaaacaucagacgauaccaaauggugcccuccggaucaauuggugaaucuacaugacuuucacucggacgaaauagagcaucucgucguggaggagcuggucaagaagagggaagaguguuuggacgcauuggaguccaucaugaccaccaaaucuguaaguuuuagacgucucagcuauuugagaaaacuugucccuggguuuggaaaggcauacacuauauucaacaagacuuugauggaggcugacgcccacuacaagucaguucggacuuggaacgagaucauccccucaaaaggguguuugaaagucagagagaggugucauccuccuguggacggaguguucuucaauggcauaauucuggguccggacgggaauguccugauaccagaaaugcaaucgucucuacuucaacaacauauggagcuguuggagucuucuguaauccccuuaaugcaucccuuggcggacccgucaacagucuucaaggagggggaugaagcggaggauuuuguugaaguccaccucccagauguucacaaacagaucucagggguugaccuuggucucccgaguugggggaaauaucuucugaugauugcagguggucuggcgacacugguucugauaaucugcucgauggcaugcuguagaagagccaagcgaacagagucaagaagacgaggcucucgagagucagagaaaaagguaacggcagccccccagacuaggaaagucguaucuucaugggaguuguacaagagugaaggcgaugccaggcuguga

SEQ ID NO: 62556 - RNA, 1575 nt, Artificial Sequence
  derived and/or modified CDS sequence (wt) from glycoprotein__RABV__AB496686.1
augauucuucaggcccuucuguuugugccucuccuaaucucuucauugugucucgggaaauuccccaucuauacaauaccagauaagcuugguccuuggagccccaucgauauacaucaccucagcuguccaaauaauuuaguuguggaggacgaggggugcaccaaucuaucaggguucucuuacauggaacuaaaggugggauacaucucugccauaaaggugaacggguucacuuguaccgguguggugacagaggcugaaaccuauaccaacuuuguugguuaugucaccaccacauucaagaggaaacauuuucgcccuauaccggaugcaugcagggcugcauacaacuggaagauggcuggugacccuagauaugaggagucucuucaaaauccuuauccugauuaccacuggcuacggaccguaaagaccacuaaggagucucuuaucaucauaucuccgaguguggcugaucuagacccauacgacaaaucccuccauucuaggguguucccuggugggaagugucugggaauaacgguuucuuccaccuacugcucaaccaaccaugauuacaccaucuggaugcccgaggaaccaagacucgggacaucuugcgacauuuuuaccagcaguaaagggaagaaggcaucuaagggaggcaagacuugcggauuuguggaugaaaggggcuuguacaagucucuaaaaggagcauguaaacucaagcugugcggaguucucggacuuagacuuauggacggaaccuggguuucgauucaaacaucagacgauaccaaauggugcccuccggaucaauuggugaaucuacaugauuuucacucagacgaaauagagcaucucgucguggaggaguuggucaagaagagggaagaguguuuggacgcauuggaguccaucaugaccaccaaaucuguaaguuuuagacgucucagcuauuugagaaaacuugucccuggguuuggaaaagcauacacuauauucaacaagacuuugauggaggcugacgcccacuacaagucaguucggacuuggaacgagaucauccccucaaaaggguguuugaaagucagagagaggugucauccuccuguggacggaguguucuucaauggcauaauucuggguccggacgggaauguccugauaccugagaugcaaucgucuuuacuucaacaacauauggagcuguuggagucuucuguaauccccuuaaugcaucccuuggcggacccgucaacagucuucaaggaaggggaugaagcggaggacuuuguugaaguucaccucccagauguucacaaacagaucucugggguugaccuuggucucccgaguugggggaaauaucuccugaugauugcagguggucuggcggcacuaguucugauaaucugcucgauggcaugcuguagaagaaccaagcgaacagagucaagaagacgaggcucuggagagucagaaaagaaggugacggcaaccccccaaacuaggaaagucguaucuucaugggaguuguacaagagugaaggcgaugccagguuguga

SEQ ID NO: 62557 - RNA, 1575 nt, Artificial Sequence
  derived and/or modified CDS sequence (wt) from glycoprotein__RABV__AB496687.1
augauucuucaggcccuucuguuugugccucuccuaaucucuucauugugucucgggaaauuccccaucuauacaauaccagauaagcuugguccuuggagccccaucgauauacaucaccucagcuguccaaauaauuuaguuguggaggacgaggggugcaccaaucuaucaggguucucuuacauggaacuaaaggugggauacaucucugccauaaaggugaacggguucacuuguaccgguguggugacagaggcugaaaccuauaccaacuuuguugguuaugucaccaccacauucaagaggaaacauuuucgcccuguaccggaugcaugcagggcugcauacaacuggaagauggcuggugacccuagauaugaggagucucuucaaaauccuuauccugauuaccacuggcuacggaccguaaagaccacuaaggagucucuuaucaucauaucuccgaguguggcugaucuagacccauacgauaaaucccuccauucuaggguguucccuggugggaaguguuugggaauaacgguuucuuccaccuacugcucaaccaaccaugauuacaccaucuggaugcccgaggaaccaagacucgggacaucuugcgacauuuuuaccagcaguaaagggaagaaggcuucuaagggaggcaagacuugcggauuuguggaugaaaggggcuuguacaagucucuaaaaggagcauguaaacucaagcugugcggaguucucggacuuagacuuauggacggaaccuggguuucgauucaaacaucagacgauaccaaauggugcccuccggaucaauuggugaaucuacaugauuuucacucagacgaaauagagcaucucgucguggaggaguuggucaagaagagggaagaguguuuggacgcauuggaguccaucaugaccaccaaaucuguaaguuuuagacgucucagcuauuugagaaaacuugucccuggguuuggaaaggcauacacuauauucaacaagacuuugauggaggcugacgcccacuacaagucaguucggacuuggaacgagaucauccccucaaaaggguguuugaaagucagagagaggugucauccuccuguggacggaguguucuucaacggcauaauucuggguccggacgggaauguccugauaccugagaugcaaucgucucuacuucaacaacauauggagcugcuggagucuucuguaauccccuuaaugcaucccuuggcggacccgucaacggucuucaaggaaggggaugaagcggaggacuuuguugaaguucaccucccagauguucacaaacagaucucugggguugaccuuggucucccgaguugggggaaauaucuccugaugauugcagguggucuggcggcacuaguucugauaaucugcucgauggcaugcuguagaagaaccaagcgaacagagucaagaagacgaggcucuggagagucagaaaagaagguaacggcaaccccccaaacuaggaaagucauaucuucaugggaguuguacaagagugaaggcgaugccagguuguga

SEQ ID NO: 62558 - RNA, 1575 nt, Artificial Sequence
  derived and/or modified CDS sequence (wt) from glycoprotein__RABV__AB496689.1
augauucuucaggcccuucgguuugugccucuccuaaucucuucauugugucucgggaaauuccccaucuauacaauaccagauaagcuugguccuuggagccccaucgauauacaucaccucagcuguccaaauaauuuaguuguggaggacgaggggugcaccaaucuaucaggguucucuuacauggaacuaaaggugggauacaucucugccauaaaggugaacggguucacuuguaccgguguggugacagaggcugaaaccuauaccaacuuuguugguuaugucaccaccacauucaagaggaaacauuuucgcccuauaccggaugcaugcagggcugcauacaacuggaagauggcuggugacccuagauaugaggagucucuucaaaauccuuauccugauuaccacuggcuacggaccguaaagaccacuaaggagucucuuaucaucauaucuccgaguguggcugaucuagacccauacgacaaaucccuccauucuaggguguucccuggugggaaauguuugggaauaacgguuucuucuaccuacugcucaaccaaccaugauuacaccauuuggaugcccgaggaaccaagacucgggacauccugcgacauuuuuaccagcaguaaagggaagaaggcaucuaagggaggcaagacuugcggauuuguggaugaaaggggcuuguacaagucucuaaaaggagcauguaaacucaagcugugcggaguucucggacuuagacuuauggacggaaccuggguuucgauucaaacaucagacgauaccaaauggugcccuccggaucaauuggugaaucuacaugacuuucacucagacgaaauagagcaucucgucguggaggagcugguuaagaagagggaagaguguuuggacgcauuggaguccaucaugaccaccaaaucuguaaguuuuagacgucucagcuauuugagaaaacuugucccuggguuuggaaaggcauacacuauauucaacaagacuuugauggaggcugacgcccacuacaagucaguucggacuuggaacgagaucauccccucaaaaggguguuugaaagucagagagaggugucauccuccuguggacggaguguucuucaauggcauaauucuggguccggacgggaacguccuaauaccugagaugcaaucgucucuacuucaacaacauauggagcuguuggagucuucuguaauccccuuaaugcaucccuuggcggacccgucaacagucuucaaggaaggggaugaagcggaggacuuuguugaaguucaccucccagauguucacaaacagauuucugggguugaccuuggucucccgaguugggggaaauaucuccugaugauugcagguggucuggcggcacuaguucugauaaucugcucgauggcaugcuguagaagaaccaagcgaacagagucaagaagacgaggcucuggagagucagaaaagaagguaacggcaaccccccaaacuaggaaaguuguaucuucaugggaguuguacaagagugaaggcgaugccagguuguga

SEQ ID NO: 62559 - RNA, 1575 nt, Artificial Sequence
  derived and/or modified CDS sequence (wt) from glycoprotein__RABV__AB496690.1
augauucuucaggcccuucuguuugugccucuccuaaucucuucauugugucucgggaaauuccccaucuauacaauaccagauaagcuugguccuuggagccccaucgauauacaucaccucagcuguccaaauaauuuaguuguggaggacgaggggugcaccaaucuaucaggguucucuuacauggaacuaaaggugggauacaucucugccauaaaggugaacggauucacuuguaccgguguggugacagaggcugaaaccuauaccaacuuuguugguuaugucaccaccacauucaagaggaaacauuuucgcccuauaccggaugcaugcagggcugcauacaacuggaagauggcuggugacccuagauaugaggagucucuucaaaauccuuauccugauuaccacuggcuacggaccguaaagaccacuaaggagucucuuaucaucauaucuccaaguguggcugaucuagacccauacgacaaaucccuccauucuaggguguucccuggugggaaguguuugggaauaacaguuucuuccaccuacugcucaaccaaccaugauuacaccaucuggaugcccgaggaaccaagacucgggacaucuugcgacauuuuuaccagcaguaaagggaagaaggcaucuaagggaggcaagacuugcggauuuguggaugaaaggggcuuguacaagucucuaaaaggagcauguaaacucaagcugugcggaguucucggacuuagacuuauggacggaaccuggguuucgauucaaacaucagacgauaccaaauggugcccuccggaucaauuggugaaucuacaugacuuucacucagacgaaauagagcaucucgucguggaggaguuggucaagaagagggaagaguguuuggacgcauuggaguccaucaugaccaccaaaucuguaaguuuuagacgucucagcuauuugagaaaacuugucccuggguuuggaaaggcauacacuauauucaacaagaccuugauggaggcugacgcccacuacaagucaguucggacuuggaacgagaucauccccucaaaaggguguuugaaagucagagagaggugucauccuccuguggacggaguguucuucaauggcauaauucuggguccggacgggaauguccugauaccugagaugcaaucgucuuuacuucaacaacauauggagcuguuggagucuucuguaauccccuuaaugcaucccuuggcggacccaucaacagucuucaaggaaggggaugaagcggaggacuuuguugaaguucaccucccagauguucacaaacagaucucugggguugaccuuggucucccgaguugggggaaauaucuccugaugauugcagguggucuggcggcacuaguucugauaaucugcucgauggcaugcuguagaagaaccaagcgaacagagucaagaagacgaggcucuggagagucagaaaagaagguaacggcaaccccccaaacuaggaaagucauaucuucaugggaguuguacaaaagugaaggcgaugccagguuguga

SEQ ID NO: 62560 - RNA, 1575 nt, Artificial Sequence
  derived and/or modified CDS sequence (wt) from glycoprotein__RABV__AB496691.1
augauccuucaggcccuucuguuugugccucuccuaaucucuucguugugucucgggaaauuccccaucuacacaauaccagacaagcuugguccuuggagccccaucgauauacaucaccucagcuguccaaauaauuuaguuguggaggacgaagggugcaccaaucuaucaggauucucuuacauggaacuaaaggugggauacaucucugccauaaaggugaacggguucacuuguaccgguguugugacagaggcugaaaccuauaccaacuuuguugguuaugucaccaccacauucaagaggaaacauuuccgcccuauaccggaugcaugcagggcugcauacaacuggaagauggcuggugauccuagauaugaggagucucuucaaaauccuuauccugauuaccauuggcuacggaccgugaagaccacuaaggagucucuuaucaucauaucuccgaguguggcugauuuagacccauacgacaaaucccuucauucuaggguguucccuggugggaaauguuugggaauaacgguuucuuccaccuacugcucaaccaaccaugauuacaccaucuggaugcccgaggaaccaagacucgggacaucuugcgacauuuuuaucagcagcaaagggaaaaaggcaucuaaaggaggcaagacuugcggauuuguggaugaaaggggcuuguauaagucucuaaaaggagcauguaaacucaagcugugcggaguucucggacuuagacuuauggauggaaccuggguuucaauucaaacaucagacgauaccaaauggugcccuccggaucaauuggugaaucuacaugacuuucacucggacgaaauagagcaucucgucguggaggagcuggucaagaagagggaagaguguuuggacgcauuggaguccaucaugaccaccaaaucuguaaguuuuagacgucucagcuauuugagaaaacuugucccuggguuuggaaaggcauacacuauauucaacaagacuuugauggaggcugacgcccacuacaagucaguucggacuuggaacgagaucauccccucaaaaggguguuugaaagucagagagaggugucauccuccuguggacggaguguucuucaauggcauaauucuggguccggacgggaauguccugauaccagaaaugcaaucgucucuacuucaacaacauauggagcuguuggagucuucuguaauccccuuaaugcaucccuuggcggacccgucaacagucuucaaggagggggaugaagcggaggauuucguugaaguccaccucccagauguucacaaacagaucucagggguugaccucggucucccgaguugggggaaauaucuucugaugauugcagguggucuggcgacacugguucugauaaucugcucgauggcaugcuguagaagaaccaagcgaacagagucaagaagacgaggcucucgagagucagagaaaaagguaacggcagccccccagacuaggaaagucguaucuucaugggaguuguacaagagugaaggcgaugccaggcuguga

SEQ ID NO: 62561 - RNA, 1575 nt, Artificial Sequence
  derived and/or modified CDS sequence (wt) from glycoprotein__RABV__AB496692.1
augauucuucaggcccuucuguuugugccucuccuaaucucuucauugugucucgggaaauuccccaucuauacaauaccagauaagcuugguccuuggagccccaucgauauacaucaccucagcuguccaaauaauuuaguuguggaggacgaggggugcaccaaucuaucaggguucucuuacauggaacuaaaggugggauacaucucugccauaaaggugaacggguucacuuguaccgguguggugacagaggcugaaaccuauaccaacuuuguugguuaugucaccaccacauucaagaggaaacauuuucgcccuauaccagaugcaugcagggcugcauacaacuggaagauggcuggugacccuagauaugaggagucccuucaaaauccuuauccugauuaccacuggcuacggaccguaaagaccacuaaggagucucuuaucaucauaucuccgaguguggcugaucuagacccauacgacaaaucccuccauucuaggguguucccuggugggaaguguuugggaauaacgguuucuuccaccuacugcucaaccaaccaugauuacaccaucuggaugcccgaggaaccaagacucgggacaucuugcgacauuuuuaccagcaguaaagggaagaaggcaucuaagggaggcaagacuugcggauuuguggaugaaaggggcuuguacaaaucucuaaaaggagcauguaaacucaagcugugcggaguucucggacuuagacuuauggacggaaccuggguuucgauucaaacaucagacgauaccaaauggugcccuccggaucaauuggugaaucuacaugacuuucacucagacgaaauagagcaucucgucguggaggaguuggucaagaagagggaagaguguuuggacgcauuggaguccaucaugaccaccaaaucuguaaguuuuagacgucucagcuauuugagaaaacuugucccuggguuuggaaaggcauacacuauauucaacaagacuuugauggaggcugacgcccacuacaagucaguucggacuuggaacgagaucauccccucaaaaggguguuugaaagucagagagaggugucauccuccuguggacggaguguucuucaauggcauaauucuggguccggacgggaauguccugauaccugagaugcaaucgucucuacuucaacaacauauggagcuguuggagucuucuguaauccccuuaaugcaucccuuggcggacccgucaacagucuucaaggaaggggaugaagcggaggacuuuguugaaguucaccucccagauguucacaaacagaucucugggguugaccuuggucucccgaguugggggaaauaucuccugaugauugcagguggucuggcggcacuaguucugauaaucugcucgauggcaugcuguagaagaaccaagcgaacagagucaagaagacgaggcucuggagagucagaaaagaaggugacggcagccccccaaacuaggaaagucguaucuucaugggaguuguacaagagugaaggagaugccagguuguga

SEQ ID NO: 62562 - RNA, 1575 nt, Artificial Sequence
  derived and/or modified CDS sequence (wt) from glycoprotein__RABV__AB496694.1
augauucuucaggcccuucuguuugugccucuccuaaucucuucauugugucucgggaaauuccccaucuauacaauaccagauaagcuugguccuuggagccccaucgauauacaucaccucagcuguccaaauaauuuaguuguggaggacgaggggugcaccaaucuaucaggguucucuuacauggaacuaaaggugggauacaucucugccauaaaggugaacggguucacuuguaccgguguggugacagaggcugaaaccuauaccaacuuuguugguuaugucaccaccacauucaagaggaaacauuuucgcccuauaccggaugcaugcagggcugcauacaacuggaagauggcuggugacccuagauaugaggagucucuucaaaauccuuauccugauuaccacuggcuacggaccguaaagaccacuaaggagucucuuaucaucauaucuccgaguguggcugaucuagacccauacgacaaaucccuccauucuaggguguucccuggugggaaguguuugggaauaacgguuucuuccaccuacugcucaaccaaccaugauuacaccaucuggaugcccgaggaaccaagacucgggacaucuugcgacauuuuuaccagcaguaaagggaagaaggcaucuaagggaggcaagacuugcggauuuguggaugaaaggggcuuguacaagucucuaaaaggagcauguaaacucaagcugugcggaguucucggacuuagacuuauggacggaaccuggguuucgauucaaacaucagacgauaccaaauggugcccuccggaucaauuggugaaucuacaugacuuucacucagacgaaauagagcaucucgucguggaggaguuggucaagaagagggaagaguguuuggacgcauuggaguccaucaugaccaccaaaucuguaaguuuuagacgucucagcuauuugagaaaacuugucccuggguuuggaaaagcauacacuauauucaacaagacuuugauggaggcugacgcccacuacaagucaguucggacuuggaacgagaucauccccucaaaaggguguuugaaagucagagagaggugucauccuccuguggacggaguguucuucaauggcauaauucuggguccggacgggaauguccugauaccugagaugcaaucgucucuacuucaacaacauauggagcuguuggagucuucuguaauccccuuaaugcaucccuuggcggacccgucaacagucuucaaggaaggggaugaagcggaggacuuuguugaaguucaccucccagauguucacaaacagaucucugggguugaccuuggucucccgaguugggggaaauaucuccugaugauugcagguggucuggcggcacuaguucugauaaucugcucgauggcaugcuguagaagaaccaagcgaacagagucaagaagacgaggcucuggagagucagaaaagaagguaacggcaaccccccaaacuaggaaagucguaucuucaugggaguuguacaagagugaaggcgaugccagguuguga

SEQ ID NO: 62563 - RNA, 1575 nt, Artificial Sequence
  derived and/or modified CDS sequence (wt) from glycoprotein__RABV__AB496695.1
augauucuucaggcccuucuguuugugccucuccuaaucucuucauugugucucgggaaauuccccaucuauacaauaccagauaagcuugguccuuggagccccaucgauauacaucaccucagcuguccaaauaauuuaguuguggaggacgaggggugcaccaaucuaucaggguucucuuacauggaacuaaaggugggauacaucucugccauaaaggugaacggguucacuuguaccgguguggugacagaggcugaaaccuauaccaacuuuguugguuaugucaccaccacauucaagaggaaacauuuucgcccuauaccugaugcaugcagggcugcauacaacuggaagauggcuggugacccuagauaugaggagucucuucaaaauccuuauccugauuaccacuggcuacggaccguaaagaccacuaaggagucucuuaucaucauaucuccgaguguggcugaucuagacccauacgacaaaucccuccauucuaggguguucccuggugggaaguguuugggaauaacgguuucuuccaccuacugcucaaccaaccaugauuacaccaucuggaugcccgaggaaccaagacucgggacaucuugcgacauuuuuaccagcaguaaagggaagaaggcaucuaagggaggcaagacuugcggauuuguggaugaaaggggcuuguacaagucucuaaaaggagcauguaaacucaagcugugcggaguucucggacuuagacuuauggacggaaccuggguuucgauucaaacaucagacgauaccaaauggugcccuccggaucaauuggugaaucuacaugacuuucacucagacgaaauagagcaucucgucguggaggaguuggucaagaagagggaggaguguuuggacgcauuggaguccaucaugaccaccaaaucuguaaguuuuagacgucucagcuauuugagaaaacuugucccuggguuuggaaaggcauacacuauauucaacaagacuuugauggaggcugacgcccacuacaagucaguucggacuuggaacgagaucauccccucaaaaggguguuugaaagucagagagaggugucauccuccuguggacggaguguucuucaauggcauaauucuggguccggacgggaauguccuaauaccugagaugcaaucgucucuacuucaacaacauauggagcuguuggagucuucuguaauccccuuaaugcaucccuuggcggacccgucuacagucuucaaggaaggggaugaagcggaggacuuuguugaaguucaccucccagauguucacaaacagauuucugggguugaccuuggucucccgaguugggggaaauaucuccugaugauugcagguggucuggcggcacuaguucugauaaucugcucgauggcaugcuguagaagaaccaagcgaacagagucaagaagacgaggcucuggagagucagaaaagaagguaacggcaaccccccaaacuaggaaaguuguaucuucaugggaguuguacaagagugaaggcgaugccagguuguga

SEQ ID NO: 62564 - RNA, 1575 nt, Artificial Sequence
  derived and/or modified CDS sequence (wt) from glycoprotein__RABV__AB496696.1
augauucuucaggcccuucgguuugugccucuccuaaucucuucauugugucucgggaaauuccccaucuauacaauaccagauaagcuugguccuuggagccccaucgauauacaucaccucagcuguccaaauaauuuaguuguggaggacgaggggugcaccaaucuaucaggguucucuuacauggaacuaaaggugggauacaucucugccauaaaggugaacggguucacuuguaccgguguggugacagaggcugaaaccuauaccaacuuuguugguuaugucaccaccacauucaagaggaaacauuuucgcccuauaccggaugcaugcagggcugcauacaacuggaagauggcuggugacccuagauaugaggagucucuucaaaauccuuauccugauuaccacuggcuacggaccguaaagaccacuaaggagucucuuaucaucauaucuccgaguguggcugaucuagacccauacgacaaaucccuccacucuagaguguucccuggugggaaguguuugggaauaacgguuucuucuaccuacugcucaaccaaccaugauuacaccaucuggaugcccgaggaaccaagacucgggacauccugcgacauuuuuaccagcaguaaagggaagaaggcaucuaagggaggcaagacuugcggauuuguggaugaaaggggcuuguacaagucucuaaaaggagcauguaaacucaaacugugcggaguucucggacuuagacuuauggacggaaccuggguuucgauucaaacaucagacgauaccaaauggugcccuccggaucaauuggugaaucuacaugacuuucacucagacgaaauagagcaucucgucguggaggaguugguuaagaagagggaagaguguuuggacgcauuggaguccaucaugaccaccaaaucuguaaguuuuagacgucucagcuauuugagaaaacuugucccuggguuuggaaaggcauacacuauauucaacaagacuuugauggaggcugacgcccacuacaagucaguucggacuuggaacgagaucauccccucaaaaggguguuugaaagucagagagaggugucauccuccuguggacggaguguucuucaauggcauaauucuggguccggacgggaauguccuaauaccugagaugcaaucgucucuacuucaacaacauauggagcuguuggagucuucuguaauccccuuaaugcaucccuuggcggacccgucaacagucuucaaggaaggggaugaagcggaggacuuuguugaaguucaccucccagauguucacaaacagauuucugggguugaccuuggucucccgaguugggggaaauaucuccugaugauugcugguggucuggcggcacuaguucugauaaucugcucgauggcaugcuguagaagaaccaagcgaacagagucaagaagacgaggcucuggagagucagaaaagaagguaacggcaaccccccaaacuaggaaaguuguaucuucaugggaguuguacaagagugaaggcgaugccagguuguga

SEQ ID NO: 62565 - RNA, 1575 nt, Artificial Sequence
  derived and/or modified CDS sequence (wt) from glycoprotein__RABV__AB496697.1
augauucuucaggcccuucgguuugugccucuccuaaucucuucauugugucucgggaaauuccccaucuauacaauaccagauaagcuugguccuuggagccccaucgauauacaucaccucagcuguccaaauaauuuaguuguggaggacgaggggugcaccaaucuaucaggguucucuuacauggaacuaaaggugggauacaucucugccauaaaggugaacggguucacuuguaccgguguggugacagaggcugaaaccuauaccaacuuuguugguuaugucaccaccacauucaagaggaaacauuuucgcccuauaccggaugcaugcagggcugcauacaacuggaagauggcuggugacccuagauaugaggagucucuucaaaauccuuauccugauuaccacuggcuacggaccguaaagaccacuaaggagucucuuaucaucauaucuccgaguguggcugaucuagacccauacgacaaaucccuccauucuaggguguucccuggugggaaguguuugggaauaacgguuucuucuaccuacugcucaaccaaccaugauuacaccaucuggaugcccgaggaaccaagacucgggacauccugcgacauuuuuaccagcaguaaagggaagaaggcaucuaagggaggcaagacuugcggauuuguggaugaaaggggcuuguacaagucucuaaaaggagcauguaaacucaagcugugcggaguucucggacuuagacuuauggacggaaccuggguuucgauucaaacaucagacgauaccaaauggugcccuccggaucaauuggugaaucuacaugacuuucacucagacgaaauagagcaucucgucguggaggaguugguuaagaagagggaagaguguuuggacgcauuggaguccaucaugaccaccaaaucuguaaguuuuagacgucucagcuauuugagaaaacuugucccuggguuuggaaaggcauacacuauauucaacaagacuuugauggaggcugacgcccacuacaagucaguucggacuuggaacgagaucauccccucaaaaggguguuugaaagucagagagaggugucauccuccuguggacggaguguucuucaauggcauaauucuggguccggacgggaauguccuaauaccugagaugcaaucgucucuacuucaacaacauauggagcuguuggagucuucuguaauccccuuaaugcaucccuuggcggacccgucaacagucuucaaggaaggggaugaagcggaggacuuuguugaaguucaccucccagauguucacaaacagauuucugggguugaccuuggucucccgaguugggggaaauaucuccugaugauugcagguggucuggcggcacuaguucugauaaucugcucgauggcaugcuguagaagaaccaagcgaacagagucaagaagacgaggcucuggagagucagaaaagaagguaacgguaaccccccaaacuaggaaaguuguaucuucaugggaguuguacaagagugaaggcgaugccagguuguga

SEQ ID NO: 62566 - RNA, 1575 nt, Artificial Sequence
  derived and/or modified CDS sequence (wt) from glycoprotein__RABV__AB496698.1
augauccuucaggccauucuguuugugccucuccuaaucucuucguugugucucgggaaauuccccaucuacacaauaccggacaagcuugguccuuggagccccauagauauacaucaccucagcuguccaaauaauuuaguuguggaagacgaggggugcaccaaucuaucaggguucucuuacauggaacuaaaggugggauacaucucugccauaaaggugaacggguucacuuguaccgguguugugacagaggcuguaacuuauaccaacuuuguugguuaugucaccaccacauucaagaggaaacauuuccgcccuguaccggaugcaugcaggacugcauacaacuggaagauggcuggugauccuagauaugaggagucucuucaaaauccuuauccugauuaccacuggcuacggacagugaagaccaccaaggagucucuuaucaucauaucuccgaguguggcugauuuagacccguacgacaaaucccuucauucuagaguguuccccggugggaaguguuugggaauaacgguuucuuccaccuacugcucaaccaaccaugauuacaccaucuggaugcccgaggaaccaagacucgggacgucuugcgacaucuuuaccagcagcaaagggaaaaaggcaucuaagggaggcaagacuugcggauuuguggaugaaaggggcuuguacaagucucuaaaaggagcauguaaacucaagcugugcggaguucucggacuuagacuuauggacggaaccuggguuucaauucaaaccucagaugauaccaaauggugcccuccggaucaauuggugaaucuacaugacuuucacucagacgaaauagagcaucucgucguugaggaguuggucaagaagagggaagaguguuuggacgcacuggaguccaucaugaccaccaaaucuguaaguuuuagacgucucagcuauuugagaaaacuugucccuggguuuggaaaggcauacacuauauucaacaagacuuugauggaggcugaugcccacuacaagucaguucgaacuuggaacgagaucauccccucaaaaggguguuugaaagucagagagaggugucauccuccuguggacggaguguucuucaauggcauaauucuggguccggacgggaauguccugauaccagagaugcaaucaucucuacuucaacaacauauggagcuguuggagucuucuguaauccccuuaaugcaucccuuggcggaccccucaacagucuucaaggaaggggaugaagcggaggacuuuguugagguucaccucccagauguucacaaacagauuucagggguugaccuuggucucccgaguugggggaaguaucuccugaugauugcagguggucuggcgacacuaguucuaauaaucugcucgauggcaugcuguagaagaaccaagcgaacagagucaagaagacgaggcucuggagagucagggaaaaagguaacggcaaccccccagacgaggaaagucgugucuucaugggaguuguacaagagugaaggcgaugccaggcuauga

SEQ ID NO: 62567 - RNA, 1575 nt, Artificial Sequence
  derived and/or modified CDS sequence (wt) from glycoprotein__RABV__AB496699.1
augauccuucaggccauucuguuugugccucuccuaaucucuucguugugucucgggaaauuccccaucuacacaauaccggacaagcuugguccuuggagccccauagauauacaucaccucagcuguccaaauaauuuaguuguggaggacgaggggugcaccaaucuaucaggguucucuuacauggaacuaaaggugggauacaucucugccauaaaggugaacggguucacuuguaccgguguugugacagaggcugaaaccuauaccaacuuuguugguuaugucaccaccacauucaagaggaaacauuuccgcccuguaccggaugcaugcaggacugcauacaacuggaagauggcuggugauccuagauaugaggagucucuucaaaauccuuauccugauuaccacuggcuacggacagugaagaccaccaaggagucucuuaucaucauaucuccgaguguggcugauuuagacccguacgacaaaucccuucauucuagaguguuccccggugggaaguguuugggaauaacgguuucuuccaccuacugcucaaccaaccaugauuacaccaucuggaugcccgaggaaccaagacucggaacgucuugcgacaucuuuaccagcagcaaagggaaaaaggcgucuaagggaggcaagacuugcggauuuguggaugaaaggggcuuguacaagucucuaaaaggagcauguaaacucaagcugugcggaguucucggacuuagacuuauggacggaaccuggguuucaauucaaaccucagaugauaccaaauggugcccuccggaucaauuggugaaucuacaugacuuucacucagacgaaauagagcaucuugucguugaggaguuggucaagaagagggaagaguguuuggacgcacuggaguccaucaugaccaccaaaucuguaaguuuuagacgucucagcuauuugagaaaacuugucccuggguuuggaaaggcauacacuauauucaacaagacuuugauggaggcugaugcccacuacaagucaguucgaacuuggaacgagaucauccccucaaaaggguguuugaaagucagagagaggugucauccuccuguggacggaguguucuucaauggcauaauucuggguccggacgggaauguccugauaccagagaugcaaucaucucuacuucaacaacauauggagcuguuggagucuucuguaauccccuuaaugcaucccuuggcggaccccucaacagucuucaaggaaggggaugaagcggaggauuuuguugaaguucaccucccagauguucacaaacagauuucagggguugaccuuggucucccgaguugggggagguaucuccugaugauugcagguggucuggcgacacuaguucuaauaaucugcucgauggcaugcuguagaagaaccaagcgaacagagucaagaagacgaggcucuggagagucaggaaaaaagguaacggcaaccccccagacuaggaaagucgugucuucaugggaguuguacaagagugaaggcgaugccaggcuauga

SEQ ID NO: 62568 - RNA, 1575 nt, Artificial Sequence
  derived and/or modified CDS sequence (wt) from glycoprotein__RABV__AB496701.1
augauccuucaggccauucuguuugugccucuccuaaucucuucguugugucucgggaaauuccccaucuacacaauaccggacaagcuugguccuuggagccccauagauauacaucaccucagcuguccaaauaauuuaguuguggaggacgaggggugcaccaaucuaucaggguucucuuacauggaacuaaaggugggauacaucucugccauaaaggugaacggguucacuuguaccgguguugugacagaggcugaaaccuauaccaacuuuguugguuaugucaccaccacauucaagaggaaacauuuccgcccuguaccggaugcaugcaggacugcauacaacuggaagauggcuggugauccgagauaugaggagucucuucaaaauccuuauccugauuaccacuggcuacggacagugaggaccaccaaggagucucuuaucaucauaucuccgaguguggcugauuuagacccguacgacaaaucccuucauucuagaguguuccccggugggaaguguuugggaauaacgguuucuuccaccuacugcucaaccaaccaugauuacaccaucuggaugcccgaggaaccaagacucgggacgucuugcgacauuuuuaccagcagcaaagggaaaaaggcaucuaagggaggcaagacuugcggauuuguggaugaaaggggcuuguacaagucucuaaaaggagcauguaaacucaagcugugcggaguucucggacuuagacuuauggacggaaccuggguuucaauucaaaccucagacgauaccaaauggugcccuccggaucaauuggugaaucuacaugacuuucacucagacgaaauagagcaucucgucguugaggaguuggucaagaagagggaagaguguuuggacgcacuggaguccaucaugaccaccaaaucuguaaguuuuagacgucucagcuauuugagaaaacuugucccuggguuuggaaaggcauacacuauauucaacaagaccuugauggaggcugaugcccacuacaagucaguucgaacuuggaacgagaucauccccucaaaaggguguuugaaagucagagagaggugucauccuccuguggacggaguguucuucaauggcauaauucuggguccggacgggaauguccugauaccagagaugcaaucaucucuacuucaacaacauauggagcuguuggagucuucuguaauccccuuaaugcaucccuuggcggaccccucuacagucuucaaggaaggggaugaagcggaggauuuuguugaaguucaccucccagauguucacaaacagauuucagggguugaccuuggucucccgaguugggggaaguaucuccugaugauugcagguggucuggcgacacuaguucuaauaaucugcucgauggcaugcuguagaaggaccaagcgaacagagucaagaagacgaggcucuggagagucagggaaaaagguaacggcaaccccccagacuaggaaagucgugucuucaugggaguuguacaagagugaaggcgaugccaggcuauga

SEQ ID NO: 62569 - RNA, 1575 nt, Artificial Sequence
  derived and/or modified CDS sequence (wt) from glycoprotein__RABV__AB496703.1
augauccuucaggccauucuguuugugccucuccuaaucucuucguugugucucgggaaauuccccaucuacacaauaccggacaagcuugguccuuggagccccauagauauacaucaccucaguuguccaaauaauuuaguuguggaggacgaggggugcaccaaucuaucaggguucucuuacauggaacuaaaggugggauacaucucugccauaaaggugaacggguucacuuguaccgguguugugacagaggcugaaaccuauaccaacuuuguugguuaugucaccaccacauucaagaggaaacauuuccgcccuguaccggaugcaugcaggacugcauacaacuggaagauggcuggugauccuagauaugaggagucucuucaaaauccuuauccugauuaccacuggcuacggacagugaagaccaccaaggagucucuuaucaucauaucuccgaguguggcugauuuagacccguacgacaaaucccuucauucuagaguguuccccggugggaaguguuugggaauaacgguuucuuccaccuacugcucaaccaaccaugauuacaccaucuggaugcccgaggaaccaagacucggaacgucuugcgacaucuuuaccagcagcaaagggaaaaaggcgucuaagggaggcaggacuugcggauuuguggaugaaaggggcuuguacaagucuuuaaaaggagcauguaaacucaagcugugcggaguucucggacuuagacuuauggacggaaccuggguuucaauucaaaccucagaugauaccaaauggugcccuccggaucaauuggugaaucuacaugacuuucacucagacgaaauagagcaucucgucguugaggaguuggucaagaagagggaagaguguuuggacgcacuggaguccaucaugaccaccaaaucuguaaguuuuagacgucucagcuauuugagaaaacuugucccuggguuuggaaaggcauacacuauauucaacaagacuuugauggaggcugaugcccacuacaagucaguucgaacuuggaacgagaucauccccucaaaaggguguuugaaagucagagagaggugucauccuccuguggacggaguguucuucaauggcauaauucuggguccggacgggaauguccugauaccagagaugcaaucaucucuacuucaacaacauauggagcuguuggagucuucuguaauccccuuaaugcaucccuuggcggaccccucaacagucuucaaggaaggggaugaagcggaggauuuuguugaaguucaccucccagauguucacaaacagauuucagggguugaccuuggucucccgaguugggggagguaucuccugaugauugcagguggucuggcgacacuaguucuaauaaucugcucgauggcaugcuguagaagaaccaagcgaacagagucaagaagacgaggcucuggagagucagggaaaaagguaacggcaaccccccagacuaggaaagucgugucuucaugggaguuguacaagagugaaggcgaugccaggcuauga

SEQ ID NO: 62570 - RNA, 1575 nt, Artificial Sequence
  derived and/or modified CDS sequence (wt) from glycoprotein__RABV__AB496705.1
augauccuucaggccauucuguuugugccucuccuaaucucuucguugugucucgggaaauuccccaucuacacaauaccggacaagcuugguccuuggagccccauagauauacaucaccucagcuguccaaauaauuuaguuguggaagacgaggggugcaccaaucuaucaggguucucuuacauggaacuaaaggugggauacaucucugccauaaaggugaacggguucacuuguaccgguguugugacagaggcuguaacuuauaccaacuuuguugguuaugucaccaccacauucaagaggaaacauuuccgcccuguaccggaugcaugcaggacugcauacaacuggaagauggcuggugauccuagauaugaggagucucuucaaaauccuuauccugauuaccacuggcuacggacagugaagaccaccaaggagucucuuaucaucauaucuccgaguguggcugauuuagacccguacgacaaaucccuucauucuagaguguuccccggugggaaguguuugggaauaacgguuucuuccaccuacugcucaaccaaccaugauuacaccaucuggaugcccgaggaaccaagacucgggacgucuugcgacaucuuuaccagcagcaaagggaaaaaggcaucuaagggaggcaagacuugcggauuuguggaugaaaggggcuuguacaagucucuaaaaggagcauguaaacucaagcugugcggaguucucggacuuagacuuauggacggaaccuggguuucaauucaaaccucagaugauaccaaauggugcccuccggaucaauuggugaaucuacaugacuuucacucagacgaaauagagcaucucgucguugaggaguuggucaagaagagggaagaguguuuggacgcacuggaguccaucaugaccaccaaaucuguaaguuuuagacgucucagcuauuugagaaaacuugucccuggguuuggaaaggcauacacuauauucaacaagacuuugauggaggcugaugcccacuacaagucaguucgaacuuggaacgagaucauccccucaaaaggguguuugaaagucagagagaggugucauccuccuguggacggaguguucuucaauggcauaauucuggguccggacgggaauguccugauaccagagaugcaaucaucucuacuucaacaacauauggagcuguuggagucuucuguaauccccuuaaugcaucccuuggcggaccccucaacagucuucaaggaaggggaugaagcggaggacuuuguugagguucaccucccagauguucacaaacagauuucagggguugaccuuggucucccgaguugggggaaguaucuccugaugauugcagguggucuggcgacacuaguucuaauaaucugcucgauggcaugcuguagaagaaccaagcgaacagagucaagaagacgaggcucuggagagucagggaaaaagguaacggcaaccccccagacgaggaaagucgugucuucaugggaguuguacaagagugaaggagaugccaggcuauga

SEQ ID NO: 62571 - RNA, 1575 nt, Artificial Sequence
  derived and/or modified CDS sequence (wt) from glycoprotein__RABV__AB517659.1
augguuccucaggcucuuuugcucguaccccuucuggcggucucauuuuguuucgggaaauuccccauuuacacaauaccagacaagcuuggucccuggagcccgauugacauacaucaucuuagcuguccaaacaauuugguuguggaggaugaaggaugcacuaaccugucaggguucuccuacauggaacuuaaaguuggauacaucuccgccauaaaaguaaacggguucacuugcacaggcguugugacagaggcagaaaccuacaccaacuuugucgguuaugucacaaccacguucaagagaaagcauuuucgcccaacacccgaugcauguagaucugcguacaacuggaagauggcaggcgaccccagauaugaggagucuuuacacaauccguaccccgacuaccauuggcuuaggacuguaaagaccaccaaagaaucucucguuaucauaucccccaguguggcagauuuggacccauacgacaaaucccuucacuccagggucuuccccagcgggaagugcucgggaauaacggugucuucuaccuacugcucgaccaaucaugauuacaccauuuggcugcccgagaauccgagacuagggacaucuugugacauauucaccaauaguagagggaagagagcauccaaaggaagcaagacuugcggcuuuguugaugaaagaggccuguauaagucccuaaagggagcaugcaaacucaaauuauguggaguucuuggacuuagacucauggacggaacauggguagcgaugcaaacaucggaugagaccaaauggugcccuccugaucaauugguaaaccugcacgacuuccgcucggacgagauugagcaucuuguuguggaggaguuggucaagaaaagagaggagugucuggaugcauuagaguccaucaugaccaccaagucagugaguuucagacgucucagucauuuaagaaaacuuguccccggguucggaaaggcauauacuauauucaacaaaacuuugauggaggcugaugcucacuacaagucaguccggacuuggaacgagaucauccccucaaaagggugucuaagagugggagggaggugucauccucaugugaacgggguguucuucaaugguauaauacuggggccugauggccauguucuaaucccagagaugcaaucaucacuccuccagcaacacauggaguuguuagaauccucagucaucccccugaugcacccuuuggcagacccaucuacaguuuucaaggacggugaugaggccgaagacuuuguugaaguucaccuucccgaugugcacaaacaggucucugggguugaccugggucucccaaacugggggaaauauguauuaaugagugcagggguccugauugccuugauguugauaauuuuccuaaugacauguuguagaagagucaaucgaccagacucuacacaacgcaguuuuggaaggacagggaggaaggugucaguuaccucccaaagcgggaaggucauaucuucaugggagucauauaaaaguggaggcgagacuaggcuguga

SEQ ID NO: 62572 - RNA, 1575 nt, Artificial Sequence
  derived and/or modified CDS sequence (wt) from glycoprotein__RABV__AB517660.1
augguuccucagacucuuuuguucguaccucuucugguuuuuucguuguguuucgggaaauuccccauuuacacaauaccagacaaacuuggucccuggagcccgauugacauacaucaucucagcuguccaaacaauuugguuguggaggacgaaggauguaccaaucugucaggguucuccuacauggaacucaaagugggauacauuucagcuauaaaagugaauggguucacuuguacaggcguugugacagaggcagaaacuuacaccaacuuugucgguuaugucacaaccacuuucaaaagaaagcauuuccgcccaacgccagaugcauguagagccgcguacaacuggaagauggccggcgaccccagauaugaggagucucuacacaauccguacccugacuaccauuggcuucggacugugaaaaccaccaaagagucucuuguuaucauauccccaagcguggcagauuuggacccguacgacaagucccuccacucaagggucuucccuagcgggaagugcuugggaauaacgguaucuuccaccuacugcucaacuaaucaugauuacaccgucuggaggcccgagaauccgagacuagggacauccugugacaucuuuaccaacaguagagggaaaagagcauccaaggggagcaagacuugcggcuuuguggaugagagaggcugguauaagucuuggaagggagcauguaaacuuaaguuauguggaguucuuggacuuagacuuauagauggaacauggauagcaaugcaaacaucagaggaaaccaaguggugccccccggaucaguuagugaaucugcaugacuuucgcucugaugagauugagcaccuuguuguagaggaguuggucaagaaaagagaagaguguuuggaugcauuagaguccauaaugaccaccaagucagugaguuucagacgucucagucacuuaagaaaacuugucccuggguucggaaaagcauauaccauauucaacaaaacguugauggaggcugaugcccacuacaagucgauccggacuuggaacgaaaucauccccucaaaagggugucuaagagugggagggaagugucauccucauguaaacggaguguuuuuuaaugguauaauacuggggcccgacggccauguucuaaucccagagaugcaaucaucucuccuccagcaacauauggaguuguuggaguccucggucaucccucuuaugcaccccuuggcagacccauauacaguuuucaaggacggcgaugaggcugaggauuuuguugaaguucaccuucccgaugugcacaaacugguuucaggggucgaccugggucucccaaacugggggaaguacuuguuaaugaguguaggggucuugauugccuugauguugauaauuuuucuaaugacauguuguagaggaguccaucgaccagacucugcacaacaaaagcucggagggacagggaggagggugucgauuacuucccaaggcgggagggucauaucuucaugggaguccuauaaaaguggaggcgauacuagacuguga

SEQ ID NO: 62573 - RNA, 1575 nt, Artificial Sequence
  derived and/or modified CDS sequence (wt) from glycoprotein__RABV__AB518487.1
augguuccucaggcucuuuuguucguaccccuucuggcuuucucauucuguuucgggaaauuccccauuuacacaauaccagacaaacuuggucccuggagcccgauugacauacaucaucuuagcuguccaaacaauuugguuguggaggaugaaggaugcacuaaccugucaggauuuuccuacauggaacuuaaagugggauacaucucugccauaaaagugaacggguucacuugcacaggcguugugacggaggcagaaaccuacaccaacuuugucgguuaugucacaaccacguuuaagagaaagcacuuccgcccaacaccagaugcauguagaucugcuuacaacuggaaaauggcuggagacccaagauaugaggagucucuacacaauccguaccccgacuaccauuggcuucggacuguaaagaccaccaaagaaucucucguuaucauauccccaaguguggcagauuuggacccauacgacaaaucccuucacucaagggucuuccccaacgggaagugcucgggaauaacggugucuucuaccuacugcucaaccaaccacgauuacaccauuuggcugcccgagaauccgagacuaggaacaucuugugauaucuucaccaauaguagagggaagagagcauccaaagggggcaagacuugcggcuuuguggaugaaagaggccuguauaaguccuuaaagggagcaugcaaacucaaguuauguggaguucuuggacuuagacuuauggaugggacauggguagcgaugcaaacaucagaugagaccaaauggugcccuccugaucaauuggugaaucugcacgacuuucgcucggacgagauugagcaucucguuguggaggaguuggucaagaaaagagaggagugucuggaugcauuagaguccaucaugaccaccaagucagugaguuucagacgucucagucauuuaagaaaacuuguccccggguucggaaaggcauauacuauauucaacaagacccugauggaggcugaugcucacuacaagucgauccggacuuggaacgaaaucauccccucaaaagggugucuaagagugggagggaggugucauccucaugugaacgggguauucuucaacgguauaauacuggggccugauggccauguucuaaucccagagaugcagucaucccuccuccagcaacauauggaguuguuggaguccucagucaucccccuaaugcacccuuuagcagacccaucuacaguuuucaaggacggugaugaggcugaggauuuuguugaaguucaccuucccgaugugcacaaacaggucucugggguugaccugggucucccaaacugggggaaguauguauuaaugagugcagggguccugauugccuugauguugacaauuuuccuaaugacauguuguagaagagucaaucgaccagacucuacacaacgcagucuuggaaugacagggaggaaggugucggucacuucccaaagcgggaaggucauaucuucaugggaaucauauaaaaguggaggugagaccaggcuguga

SEQ ID NO: 62574 - RNA, 1575 nt, Artificial Sequence
  derived and/or modified CDS sequence (wt) from glycoprotein__RABV__AB518488.1
augguuccucaggcucuuuuguucguaccccuucuggcuuucucauucuguuucgggaaauuccccauuuacacaauaccagacaaacuuggucccuggagcccgauugacauacaucaucuuagcuguccaaacaauuugguuguggaggaugaaggaugcacuaaccugucaggauuuuccuacauggaacuuaaagugggauacaucucugccauaaaagugaacggguucacuugcacaggcguugugacggaggcagaaaccuacaccaacuuugucgguuaugucacaaccacguuuaagagaaagcacuuccgcccaacaccagaugcauguagaucugcguacaacuggaaaauggcuggagacccaagauaugaggagucucuacacaauccguaccccgacuaccauuggcuucggacuguaaagaccaccaaagaaucucucguuaucauauccccaaguguggcagauuuggacccauacgacaaaucccuucacucaagggucuuccccaacgggaagugcucgggaauaacggugucuucuaccuacugcucaaccaaccacgauuacaccauuuggcugcccgagaauccgagacuaggaacaucuugugauaucuucaccaauaguagagggaagagagcauccaaagggggcaagacuugcggcuuuguggaugaaagaggccuguauaaguccuuaaagggagcaugcaaacucaaguuauguggaguucuuggacuuagacuuauggaugggacauggguagcgaugcaaacaucagaugagaccaaauggugcccuccugaucaauuggugaaucugcacgacuuucgcucggacgagauugagcaucucguuguggaggaguuggucaagaaaagagaggagugucuggaugcauuagaguccaucaugaccaccaagucagugaguuucagacgucucagucauuuaagaaaacuuguccccggguucggaaaggcauauacuauauucaacaagacccugauggaggcugaugcucacuacaagucgauccggacuuggaacgaaaucauccccucaaaagggugucuaagagugggagggaggugucauccucaugugaacgggguauucuucaacgguauaauacuggggccugauggccauguucuaaucccagagaugcagucaucccuccuccagcaacauauggaguuguuggaguccucagucaucccccuaaugcacccuuuagcagacccaucuacaguuuucaaggacggugaugaggcugaggauuuuguugaaguucaccuucccgaugugcacaaacaggucucugggguugaccugggucucccaaacugggggaaguauguauuaaugagugcagggguccugauugccuugauguugacaauuuuccuaaugacauguuguagaagagucaaucgaccagacucuacacaacgcagucuuggaaugacagggaggaaggugucggucacuucccaaagcgggaaggucauaucuucaugggaaucauauaaaaguggaggugagaccaggcuguga

SEQ ID NO: 62575 - RNA, 1575 nt, Artificial Sequence
  derived and/or modified CDS sequence (wt) from glycoprotein__RABV__AB518489.1
augguuccucaggcucuuuuguucguaccccuucuggcuuucucauucuguuucgggaaauuccccauuuacacaauaccagacaaacuuggucccuggagcccgauugacauacaucaucuuagcuguccaaacaauuugguuguggaggaugaaggaugcacuaaccugucaggguuuuccuacauggaacuuaaagugggauacaucucugccauaaaagugaacggguucacuugcacagguguugugacggaagcagaaaccuacaccaacuuugucgguuaugucacaaccacguuuaagagaaagcacuuccgcccaacaccagaugcauguagaucugcguacaacuggaaaauggccggcgacccaagauaugaggagucccuacacaauccguaccccgacuaccauuggcuucggacuguaaagaccaccaaagagucucucguuaucauauccccaaguguggcagauuuggacccauacgacaaaucccuucacucaagggucuuccccaacgggaagugcucgggaauaacggugucuuccaccuacugcucaaccaaccacgauuacaccauuuggcugcccgagaauccgagacugggaacaucuugugauaucuucaccaauaguagagggaagagagcauccaaagggagcaagacuugcggcuuuguggaugagagaggccuguauaaguccuuaaagggagcaugcaaacucaaguuauguggaguucuuggacuuagacuuauggauggaacauggguagcgaugcaaacaucagaugagaccaaauggugcccuccugaucaguuggugaaucugcacgacuuucgcucggacgagauugagcaucucguuguggaggaguuggucaagaaaagagaggagugucuggaugcauuagaguccaucaugaccaccaagucagugaguuucagacgucucagucauuuaagaaaacuuguccccggguucggaaaggcauauacuauauucaacaaaacccugauggaggcugaugcucacuacaagucgauccggacuuggaacgagaucauccccucaaaagggugucuaagagugggagggaggugucauccucaugugaacgggguguucuucaacgguauaauacuggggccugauggccauguucuaaucccagagaugcagucaucccuccuccagcaacauauggaguuguuggaguccucagucaucccccuaaugcacccuuuagcagacccaucuacaguuuucaaggacggugaugaggcugaggauuuuguugaaguucaccuucccgacgugcacaaacaggucucugggguugaccugggucucccaaacugggggaaguauguauuaaugagugcagggguccugauugccuugauguugacaauuuuccuaaugacauguuguagaagagucaaucgaccagacucuacacaacgcagucuuggaaugacagggaggaaggugucggucacuucccaaagcgggaaggucauaucuucaugggaaucauauaaaaguggaggugagacuaggcuguga

SEQ ID NO: 62576 - RNA, 1575 nt, Artificial Sequence
  derived and/or modified CDS sequence (wt) from glycoprotein__RABV__AB518490.1
augguuccucaggcucuuuuguucguaccccuucuggcuuucucauucuguuucgggaaauuccccauuuacacaauaccagacaaacuuggucccuggagcccgauugacauacaucaucuuagcuguccaaacaauuugguuguggaggaugaaggaugcacuaaccugucaggguuuuccuacauggaacuuaaagugggauacaucucugccauaaaagugaacggguucacuugcacaggcguugugacggaggcagaaaccuacaccaacuuugucgguuaugucacaaccacguuuaagagaaagcacuuccgcccaacaccagaugcauguagaucugcguacaacuggaaaauggcuggagacccaagauaugaagagucucuacacaauccguaccccgacuaccauuggcuucggacuguaaagaccaccaaagaaucucucguuaucauauccccaaguguggcagauuuggacccauacgacaaaucccuucacucaagggucuuccccaacgggaagugcucgggaauaacggugucuucuaccuacugcucaaccaaccacgauuacaccauuuggcugcccgagaauccgagacuaggaacaucuugugauaucuucaccaauaguagagggaagagagcauccaaagggggcaagacuugcggcuuuguggaugaaagaggccuguauaaguccuuaaagggagcaugcaaacucaaguuauguggaguucuuggacuuagacuuauggauggaacauggguagcgaugcaaacaucagaugaggccaaauggugcccuccugaucaauuggugaaucugcacgacuuucgcucggacgagauugagcaucucguuguggaggaguuggucaagaaaagagaggagugucuggaugcauuagaauccaucaugaccaccaagucagugaguuucagacgucucagucauuuaagaaaacuuguccccggguucggaaaggcauacacuauauucaacaagacccugauggaggcugaugcucacuacaagucgauccggacuuggaacgaaaucauccccucaaaagggugucuaagagugggagggaggugucauccucaugugaacgggguauucuucaacgguauaauacuggggccugacggccauguucuaaucccagagaugcagucaucccuccuccaacaacauauggaguuguuggaguccucagucaucccccuaaugcacccuuuagcagacccaucuacaguuuucaaggacggugaugaggcugaggauuuuguugaaguucaccuucccgaugugcacaaacaggucucugggguugaccugggucucccaaacugggggaaguauguauuaaugagugcagggguccugauugccuugauguugacaauuuuccuaaugacauguuguagaagagucaaucgaccagacucuacacaacgcagucuuggaaugacagggaggaaggugucggucacuucccaaagcgggaaggucauaucuucaugggaaucauauaaaaguggaggugagaccaggcuguga

SEQ ID NO: 62577 - RNA, 1575 nt, Artificial Sequence
  derived and/or modified CDS sequence (wt) from glycoprotein__RABV__AB518492.1
augguuccucaggcucuuuuguucguaccccuucuggcugucucauucuguuucgggaaauuccccauuuauacaauaccagacaagcuuggucccuggagcccgauugacauacaucaucuuagcuguccaaacaauuugguuguggaggacgaaggaugcacuaaccugucaggguucuccuacauggaacuuaaagugggauacaucuccgccauaaaaguaaacggguucacuugcacaggcguugugacagaggcagaaaccuacaccaacuuugucgguuaugucacaaccacguucaagagaaagcauuuucgcccgacaccagaugcauguagaucugcguacaacuggaagauggccggcgaccccagauaugaggagucucuacacaauccguaccccgacuaccauuggcuucggacuguaaagaccaccaaagaaucucucguuaucauauccccuaguguggcagauuuggacccauacgacaaaucccuucacucaagggucuuccccagcgggaagugcucgggaauaacggugucuucuaccuacugcucaaccaaccaugauuacaccauuuggcugcccgagaauccgagacuagggacaucuugugacauauucaccaauaguagagggaagagagcauccaaaggaagcaagacuugcggcuuuguggaugaaagaggccuguauaagucccuaaagggagcaugcaaacucaaauuauguggaguucuuggacuuagacuuauggauggaacauggguagcgaugcaaacaucagaugagaccaaauggugcccuccugaucaauugguaaaucugcacgacuuucgcucggacgagauugagcaucuuguuguggaggaguuggucaagaaaagagaggagugucuggaugcauuagaguccaucaugaccaccaagucagugagcuucagacgucucagucauuuaagaaaacuuguccccggguucggaaaggcauauacuauauucaacaaaacuuugauggaggcugaugcucacuacaagucaguccggacuuggaacgagaucauccccucaaaagggugucuaagagugggagggaggugucauccucaugugaacgggguguuuuucaaugguauaauacuggggccugauggccauguucuaaucccagagaugcaaucaucccuccuccagcaacacauggaguuguuggaauccucagucaucccccugaugcacccuuuggcagacccaucuacaguuuucaaggacggugaugaggcugaggacuuuguugaaguucaccuucccgaugugcacaaacaggucucugggguugaccugggucucccaaacugggggaaguauguauuaaugagugcagggguacugacugccuugauguugauaauuuuccuaaugacaugcuguagaagagucaaucgaccagacucuacacaacgcagucuuggaaggacagggaggaaggugucgguuaccucccaaagcgggaaggucauaucuucaugggagucauauaaaaguggaggcgagacuaggcuguga

SEQ ID NO: 62578 - RNA, 1575 nt, Artificial Sequence
  derived and/or modified CDS sequence (wt) from glycoprotein__RABV__AB518493.1
augguuccucaggcucuuuuguucguaccccuucugguauuuucauuguguuccgggaaauucccccuuuacacaauaccagacaaacuuggucccuggagcccgauugacauacaucaucucagcuguccaaacaacuugguuguggaggacgaaggaugcaccaaccugucaggguucuccuacauggaacuuaaagugggauacaucucagccauaaaagugaacggauucacuugcacaggcguugugacagaggcagaaaccuacaccaacuuugucgguuaugucacaaccacguucaaaagaaagcauuuccgcccaacgccagaugcauguagagcugcguacaacuggaagauggccggcgaccccagauaugaggagucucuacacaauccguaccccgacuaccauuggcuucggacuguaaaaaccaccaaagagucucuuguugucauaucuccaaguguggcggauuuggacccguacgacaaaucccuccacucaagggucuucccuagcgggaagugcucgggaauaacgguaucuuccaccuacugcucaacuaaccaugauuacaccauuuggaugcccgagaauccgagacuagggacaucuugugacauauuuaccaauaguagagggaagagagcauccaaggggagcaagacuugcggcuuuguggaugaaagaggguuguauaagucucuaaagggagcaugcaaacucaaguuaugcggaguucuuggacugagacuuauggauggaacauggguagcgaugcaaauaucagaugagaccaaguggugcccuccugaucaguuggugaaucuucacgacuuucgcucggaugagauugagcaccuuguuguagaggagcuggucaagaaaagagaagaguguuuagaugcauuagaguccaucaugaccaccaagucagugaguuucagacgucucagucacuuaagaaaacuuguuccuggguucggaaaagcauauaccauauucaacaaaaccuugauggaggccgaugcucacuacaagucgauccgaacuuggaacgagaucauccccucgaaaggguguuuaagagugggagggaggugucauccucaugugagcgggguguuuuuuaaugguauaauacugggccccgacggccauguucuaaucccagagaugcaaucaucccuccuccagcaacauauggaguuguuggaguccucggucaucccucuuaugcaccccuuggcagacccaucuacagucuucaaggacggcgaugaggcugaggauuuuguugaaguucaccuucccgaugugcacaaacaagucucagggguugaccugggucucccaaacugggggaaguacguguugaugagugcaggggcccuaauugccuugauguugauaauuuuccuaaugacauguuguagaagagucaaucgacuggacucuacacaacacaggcuuggagggacagggaggaaggugucgguuacuccccaaggcgggaaggucauaucuucaugggaguccuauaaaaguggaggcgagacuagacuguga

SEQ ID NO: 62579 - RNA, 1575 nt, Artificial Sequence
  derived and/or modified CDS sequence (wt) from glycoprotein__RABV__AB518494.1
augguuccucaggcucuuuuguucguaccccuuuugguauuuucauuguguuucgggaaauucccccuuuacacaauaccagacaaacuuggucccuggagcccgauugacauacaucaucucagcuguccaaacaacuugguuguggaggacgaaggaugcaccaaccugucaggguucuccuacauggaacuuaaagugggauacaucucagccauaaaagugaacggauucacuugcacaggcguugugacagaggcagaaaccuacaccaacuuugucgguuaugucacaaccacguucaaaagaaagcauuuccgcccaacgccagaugcaugcagagcugcguacaacuggaagauggccggcgaccccagauaugaggagucucuacacaauccguaccccgacuaccauuggcuucggacuguaaagaccaccaaagagucucuuguugucauaucuccaaguguggcggauuuggacccguacgacaaaucccuccacucaagggucuucccuagcgggaagugcucgggaauaacgguaucuuccaccuacugcucaacuaaccaugauuacaccauuuggaugcccgaaaauccgagacuggggacaucuugugacauauuuaccaacaguagagggaagagagcauccaaggggagcaagacuugcggcuuuguggaugaaagagguuuauauaagucucuaaagggagcaugcaaacucaaguuaugcggaguucuuggacugagacuuauggauggaacauggguagcgaugcaaauaucagaugagaccaaguggugcccuccugaucaguuggugaaucuucacgacuuucgcucggaugagauugagcaccuuguuguagaggagcuggucaagaaaagagaagaguguuuagaugcauuagaguccaucaugaccaccaagucagugaguuucagacgucucagucacuuaagaaaacuuguuccuggguucggaaaagcauauaccauauucaacaaaaccuugauggaggcugaugcucacuacaagucgauccgaacuuggaacgagaucauccccucgaaaggguguuuaagagugggaggaaggugucauccucaugugagcgggguguuuuuuaaugguauaauacuggggcccgacggccauguucuaaucccagagaugcaaucaucccuccuccagcaacauauggaguuguuggaguccucggucaucccucuuaugcaccccuuggcagacccaucuacaguuuucaaggacggcgaugaggcugaggauuuuguugaaguucaccuucccgaugugcacaaacaagucucagggguugaccugggucucccaaacugggggaaguacguguugaugagugcaggggcccuaauugccuugauggugauaauuuuccuaaugacauguuguagaagagucaaucgacuggacucuacacaacacaggcuuggagggacagggaggaaggugucgguuacuccccaaggcgggaaggucauaucuucaugggaguccuauaaaaguggaggcgagacuagacuguga

SEQ ID NO: 62580 - RNA, 1575 nt, Artificial Sequence
  derived and/or modified CDS sequence (wt) from glycoprotein__RABV__AB518495.1
augguuccucaggcucuuuuguucguaccccuucugguauuuucauuguguuccgggaaauucccccuuuacacaauaccagacaaacuuggucccuggagcccgauugacauacaucaucucagcuguccaaacaacuugguuguggaggacgaaggaugcaccaaccugucaggguucuccuacauggaacuuaaagugggauacaucucagccauaaaagugaacggauucacuugcacaggcguugugacagaggcagaaaccuacaccaacuuugucgguuaugucacaaccacguucaaaagaaagcauuuccgcccaacgccagaugcauguagagcugcguacaacuggaagauggccggcgaccccagauaugaggagucucuacacaauccguaccccgacuaccauuggcuucggacuguaaaaaccaccaaagagucucuuguugucauaucuccaaguguggcggauuuggacccauacgacaaaucccuccacucaagggucuucccuagcgggaagugcucgggaauaacgguaucuuccaccuacugcucaacuaaccaugauuacaccauuuggaugcccgagaauccgagacuagggacaucuugugacauauuuaccaauaguagagggaagagagcauccaaggggagcaagacuugcggcuuuguggaugaaagaggguuguauaagucucuaaagggagcaugcaaacucaaguuaugcggaguucuuggacugagacuuauggauggaacauggguagcgaugcaaauaucagaugagaccaaguggugcccuccugaucaguuggugaaucuucacgacuuucgcucggaugagauugagcaccuuguuguagaggagcuggucaagaaaagagaagaguguuuagaugcauuagaguccaucaugaccaccaagucagugaguuucagacgucucagucacuuaagaaaacuuguuccuggguucggaaaagcauauaccauauucaacaaaaccuugauggaggccgaugcucacuacaagucgauccgaacuuggaacgagaucauccccucgaaaggguguuuaagagugggagggaggugucauccucaugugagcgggguguuuuuuaaugguauaauacuggggcccgacggccauguucuaaucccagagaugcaaucaucccuccuccagcaacauauggaguuguuggaguccucggucaucccucuuaugcaccccuuggcagacccaucuacagucuucaaggacggcgaugaggcugaggauuuuguugaaguucaccuucccgaugugcacaaacaagucucagggguugaccugggucucccaaacugggggaaguacguguugaugagugcaggggcccuaauugccuugauguugauaauuuuccuaaugacauguuguagaagagucaaucgacuggacucuacacaacacaggcuuggagggacagggaggaaggugucgguuacuccccaaggcgggaaggucauaucuucaugggaguccuauaaaaguggaggcgagacuagacuguga

SEQ ID NO: 62581 - RNA, 1575 nt, Artificial Sequence
  derived and/or modified CDS sequence (wt) from glycoprotein__RABV__AB519641.1
augauucuucaggcccuucuguuugugccucuccuaaucucuucauugugucucgggaaauuccccaucuauacaauaccagauaagcuugguccuuggagccccaucgauauacaucaccucagcuguccaaauaauuuaguuguggaggacgaggggugcaccaaucuaucaggguucucuuacauggaacuaaaggugggauacaucucugccauaaaggugaacggguucacuuguaccgguguggugacagaggcugaaaccuauaccaacuuuguugguuaugucaccaccacauucaagaggaaacauuuucgcccuguaccggaugcaugcagggcugcauacaacuggaagauggcuggugacccuagauaugaggagucucuucaaaauccuuauccugauuaccacuggcuacggaccguaaagaccacuaaggagucucuuaucaucauaucuccgaguguggcugaucuagacccauacgauaaaucccuccauucuaggguguucccuggugggaaguguuugggaauaacgguuucuuccaccuacugcucaaccaaccaugauuacaccaucuggaugcccgaggaaccaagacucgggacaucuugcgacauuuuuaccagcaguaaagggaagaaggcuucuaagggaggcaagacuugcggauuuguggaugaaaggggcuuguacaagucucuaaaaggagcauguaaacucaagcugugcggaguucucggacuuagacucauggacggaaccuggguuucgauucaaacaucagacgauaccaaauggugcccuccggaucaauuggugaaucuacaugacuuucacucagacgaaauagagcaucucgucguggaggaguuggucaagaagagggaagaguguuuggacgcauuggaguccaucaugaccaccaaaucuauaaguuuuagacgucucagcuauuugagaaaacuugucccuggguuuggaaaggcauacacuauauucaacaagacuuugauggaggcugacgcccacuacaagucaguucggacuuggaacgagaucauccccucaaaaggguguuugaaagucagagagaggugucauccuccuguggacggaguguucuucaacggcauaauucuggguccggacgggaauguccugauaccugagaugcaaucgucucuacuccaacaacauauggagcugcuggagucuucuguaauccccuuaaugcaucccuuggcggacccgucaacggucuucaaggaaggggaugaagcggaggacuuuguugaaguucaccucccagauguucacaaacagaucucugggguugaccuuggucucccgaguugggggaaauaucuccugaugauugcagguggucuggcggcacuaguucugauaaucugcucgauggcaugcuguagaagaaccaagcgaacagagucaagaagacgaggcucuggagagucagaaaagaagguaacggcaaccccccaaacuaggaaagucauaucuucaugggaguuguacaagagugaaggcgaugccagguuguga

SEQ ID NO: 62582 - RNA, 1575 nt, Artificial Sequence
  derived and/or modified CDS sequence (wt) from glycoprotein__RABV__AB519642.1
augauccuucaggcccuucuguuugugccucuccuaaucucuucguugugccucgggaaauuccccaucuacacaauaccagacaagcuugguccuuggagccccaucgauauacaucaccucagcuguccaaauaauuuaguuguggaggacgaaggaugcaccaaucuaucaggauucucuuacauggaacuaaaggugggauacaucucugccauaaaggugaacggguucacuuguaccgguguugugacagaggcugaaaccuauaccaacuuuguugguuaugucaccaccacauucaagaggaaacauuuccgcccuauaccggaugcaugcagggcugcauacaacuggaagauggcuggugauccuagauaugaggagucucuucaaaauccuuauccugauuaccacuggcuacggaccguaaagaccacuaaggagucucuuaucaucauaucuccgaguguggcugauuuagacccauacgacaaaucccuucauucuaggguguucccuggugggaaauguuugggaauaacgguuucuuccaccuacugcucaaccaaccaugauuacaccaucuggaugccugaggaaccaagacucgggacaucuugcgacauuuuuaccagcaguaaagggaaaaaggcaucuaaaggaggcaagacuugcggauuuguggaugaaaggggcuuguacaagucucuaaaaggagcauguaaacucaagcugugcggaguucucggacuuagacuuauggauggaaccuggguuucaauucaaacaucagacgauaccaaauggugcccuccggaucaauuggugaaucuacaugacuuucacucagacgaaauagagcaucucgucguggaggaguuggucaagaagagggaagaguguuuggacgcauuggaguccaucaugacaaccaaaucuguaaguuuuagacgucucagcuauuugagaaaacuugucccuggguuuggaaaggcauacacuauauucaacaagacuuugauggaggcugacgcccacuacaagucaguucggacuuggaacgagaucauccccucaaaaggguguuugaaagucagagagaggugucauccuccuguggacggaguguucuucaauggaauaauucuggguccggacgggaauguccugauaccagagaugcaaucgucucuacuucaacaacauauggagcuauuggagucuucuguaauccccuuaaugcaucccuuggcggacccgucaacagucuucaaggagggggaugaagcggaggauuuuguugaaguucaccucccagauguucacaaacagaucucagggguugaucuuggucucccgaguugggggaaauaucuccugaugauugcagguggucuggcgacacuaguucugauaaucugcucgauggcaugcuguagaagaaccaagcgaacagagucaagaagacgagacucucaagagucagagaaaaagguaacgguaaccccccagacuaggaaagucguaucuucaugggaguuauacaagagugaaggcgaugccagucuguga

SEQ ID NO: 62583 - RNA, 1575 nt, Artificial Sequence
  derived and/or modified CDS sequence (wt) from glycoprotein__RABV__AB563791.1
augauuccucaggcucuuuuguuuguaccccuucuggucuuuucauuguguuucggaaaauuucccaucuacacgauaccggacaaacuuggucccuggagccccauugauauacaucaucucagcuguccgaacaauuugguuguggaggaugaaggauguaccaaccugucagguuucucguacauggaacucaagguaggauacauuucagccaucaaagugaacggguucacuuguacggguguagugacagaagcagagaccuacaccaacuuuguuggcuaugucacuaccacguuuaagagaaagcacuuccgcccaacgccggaugcaugcagagccgcauauaacuggaagauggcuggugaccccagauaugaagaaucucugcauaacccuuacccugauuaucauuggcuccgaacugugaagaccaccaaagaaucucuugucaucauaucuccaaguguggcagauuuggacccauacgauaaaucccuucacucgagaguuuuuccuagcggaaaaugcucaggcauaacggugucuucuaccuacugcucuacuaaccacgacuauaccaucuggaugccugagaauccuagacuagggaccucuugugacauuuucaccaauagcagagggaagagagcauccaaagggagcaagaccuguggauuuguagaugagagaggccuguacaagucucugaaaggagcaugcaaacugaaacugugugggguucugggacucagacuuauggauggaacaugggccgcgauccagacaucagaugagaccaaauggugcccuccugaucaguuagugaaccuacaugacuuucgcucggaugaaauugaacaucuugucguggaggagcuggucaagaaaagggaagagugucuagaugcacuggaguccaucaugaccaccaagucugugaguuucagacgucucagucacuugaggaaacuugugccuggguuuggaaaagcauauaccauauuuaauaagaccuugauggaggcugaugcucacuacaaaucaguccggacuuggaaugagaucauccccucuaaaggguguuuaagaguaggggggagaugucacccucaugugaacgggguguucuucaacgguaucaucuuaggcccugacggccaugugcuaaucccggagaugcagucgucucuccuccagcagcauauggaguuguuggaauccucagucauccccuuaaugcaccccuuggcagauccaucaacaguuuuuaaagaugaugacgaggcggaagauuuuguugagguucaccuuccagaugugcacaagcaggucucaggggucgaucucggucucccaagcugggggaaguauguguugaugagcgcaggcgucuugaccgcgcuaauguugaugauuuucuuaaugacguguuguagaagggccaauagaguagaaucagcacaacacagucuuggagagagggggaggaaagugucgguaaccucccaaagcgggcggguuauauccucaugggagucguacaaaaguggaggugagaccaagcuguaa

SEQ ID NO: 62584 - RNA, 1575 nt, Artificial Sequence
  derived and/or modified CDS sequence (wt) from glycoprotein__RABV__AB563794.1
augauuccucaggcucuccuguucguaccccuucuggucuuuucauuguguuucggaaaauuucccaucuacacgauaccagacaaacuuggucccuggagccccauugauauacaucaucucagcuguccgaacaauuugguuguggaggaugaaggauguaccaaccugucagguuucucguacauggaacucaagguaggauacauuucagccaucaaagugaacggguucacuuguacggguguagugacagaagcagagaccuacaccaacuuuguuggcuaugucacuaccacauuuaagagaaagcacuuccgcccaacgccggaugcaugcagagccgcauauaacuggaagauggcuggugaccccagauaugaagaaucucugcacaauccuuacccugauuaucauuggcuccgaacugugaagaccaccaaagaaucucuuguuaucauaucuccaaguguggcagauuuggacccauacgauaaaucccuucacucgagaguuuuuccuagcggaaaaugcucaggcauaacggugucuucuaccuacugcucuacuaaccacgacuauaccaucuggaugccugagaauccuagacuagggaccucuugugacauuuucaccaauagcagagggaagagagcauccaaagggagcaagaccuguggauuuguagaugagagaggccuguacaagucucugaaaggagcaugcaaacugaaacuaugugggguucugggacucagacuuauggauggaacaugggccgcgauccagacaucagaugagaccaaauggugcccuccugaucaguuagugaaccuacaugacuuucgcucggaugaaauugaacaucuuguuguggaggagcuggucaagaaaagggaagagugucuagaugcacuggaguccaucaugaccaccaagucugugaguuucagacgucucagucacuugaggaaacuugugccuggauuuggaaaagcauauaccauauucaauaagaccuugauggaggcugaugcucacuacaaaucagucaggacuuggaaugagaucauccccucuaaaggguguuuaagagucggggggagaugucacccucaugugaacgggguguucuucaaugguaucauccuaggcccugacggccaugugcuaaucccggagaugcagucgucucuccuccagcagcacauggagcuguuggaauccucagucauccccuuaaugcaucccuuggcagauccaucaacaguuuuuaaagaugaugacgaggcggaagauuuuguugagguucaccuuccagaugugcacaagcaggucucaggggucgaucucggucucccaaguugggggaaguauguguugaugagcgcaggcgucuugaccgcacuaauguugaugauuuucuuaaugaccuguuguagaagggccaauagggcagaaucagcacaacacagucuuggagagagggggaggaaagugucaguaaccucccaaagcgggcggguuauauccucaugggagucauacaaaaguggaggugagaccaagcuguaa

SEQ ID NO: 62585 - RNA, 1575 nt, Artificial Sequence
  derived and/or modified CDS sequence (wt) from glycoprotein__RABV__AB563797.1
augauuccucaggcucuuuuguuuguaccccuucuggucuuuucauuguguuucggaaaauuucccaucuacacgauaccggacaaacuuggucccuggagccccauugauauacaucaucucagcuguccgaacaauuugguuguggaggaugaaggauguaccaaccugucagguuucucguacauggaacucaagguaggauacauuucagccaucaaagugaacggguucacuuguacggguguagugacagaagcagagaccuacaccaacuuuguuggcuaugucacuaccacguuuaagagaaagcacuuccgcccaacgccggaugcaugcagagccgcauauaacuggaagauggcuggugaccccagauaugaagaaucucugcauaacccuuacccugauuaucauuggcuccgaacugugaagaccaccaaagaaucucuugucaucauaucuccaaguguggcagauuuggacccauacgauaaaucccuucacucgagaguuuuuccuagcggaaaaugcucaggcauaacggugucuucuaccuacugcucuacuaaccacgacuauaccaucuggaugccugagaauccuagacuagggaccucuugugacauuuucaccaauagcagagggaagagagcauccaaagggagcaagaccuguggauuuguagaugagagaggccuguacaagucucugaaaggagcaugcaaacugaaacugugugggguucugggacucagacuuauggauggaacaugggccgcgauccagacaucagaugagaccaaauggugcccuccugaucaguuagugaaccuacaugacuuucgcucggaugaaauugaacaucuugucguggaggagcuggucaagaaaagggaagagugucuagaugcacuggaguccaucaugaccaccaagucugugaguuucagacgucucagucacuugaggaaacuugugccuggguuuggaaaagcauauaccauauuuaauaagaccuugauggaggcugaugcucacuacaaaucaauccggacuuggaaugagaucauccccucuaaaggguguuuaagaguaggggggagaugucacccucaugugaacgggguguucuucaacgguaucaucuuaggcccugacggccaugugcuaaucccggagaugcagucgucucuccuccagcagcauauggaguuguuggaauccucagucauccccuuaaugcaccccuuggcagauccaucaacaguuuuuaaagaugaugacgagacggaagauuuuguugagguucaccuuccagaugugcacaagcaggucucaggggucgaucucggucucccaagcugggggaaguauguguugaugagcgcaggcgucuugaccgcgcugauguugaugauuuucuuaaugacguguuguagaagggccaauagaguagaaucagcacaacacagucuuggagagagggggaggaaagugucgguaaccucccaaagcgggcggguuauauccucaugggagucguacaaaaguggaggugagaccaagcuguaa

SEQ ID NO: 62586 - RNA, 1575 nt, Artificial Sequence
  derived and/or modified CDS sequence (wt) from glycoprotein__RABV__AB563798.1
augauuccucaggcucuuuuguuuguaccccuucuggucuuuucauuguguuucggaaaauuuccuaucuacacaauaccggacaaacuuggucccuggagccccauugacauacaucaucucagcuguccgaacaauuugguuguggaggaugaaggauguaccaaccugucagguuucucguacauggaacucaagguaggauacauuucugccaucaaagugaacggguucacuuguacggguguggugacggaagcagagaccuacaccaacuuuguuggcuaugucacuaccacguuuaagagaaagcacuuccgcccaacgccggaugcaugcagagccgcauauaacuggaagauggcuggugaccccagauaugaagaaucucugcauaauccuuacccugauuaucauuggcuccgaacugugaagaccaccaaagagucucuuguuaucauaucuccaaguguggcagauuuggacccauacgauaaaucccuucacucgagaguuuuuccuagcggaaaaugcucaggcauaacggugucuucuaccuacugcuccacuaaccacgacuauaccaucuggaugccugagaauccuagacuagggaccucuugugacauuuucaccaauagcagagggaagagagcauccaaagggagcaaaaccuguggauuuguagaugagagaggccuguacaagucucugaaaggagcaugcaaacugaaacuaugugggguucugggacucagacuuauggauggaacaugggccgcgauccagacaucagaugagaccaaauggugcccuccugaucaguuagugaaccuacaugacuuucgcucggaugaaauugaacaucuuguuguggaggagcuggucaagaaaagggaagagugucuagaugcacuggaguccaucaugaccaccaagucugugaguuucagacgucucagucacuugaggaaacuugugcccggguuuggaaaagcauauaccauauucaauaagaccuugauggaggcugaugcucacuacaaaucaguccggacuuggaaugagauuauccccucuaaaggguguuuaagagucggggggagaugucacccucaugugaacgggguguucuucaaugguaucaucuuaggcccugacggccaugugcuaaucccggagaugcagucgucucuccuccagcagcauauggaguuauuggaauccucagucauccccuuaaugcaucccuuggcagauccaucaacaguuuuuaaagaugaugacgaggcggaagauuuuguugagguucaccuuccagaugugcacaagcaggucucaggggucgaucucggucucccaagcugggggaaguauguguugaugagcgcaggcgucuugaccgcauuaauguugaugauuuucuuaaugacguguuguagaagggccaauagagcagaaucagcacaacacagucuuggagagggggggaggaaagugucgguaaccucccaaagugggcggguuauauccucaugggagucauacaaaaguggaggugagaccaagcuguaa

SEQ ID NO: 62587 - RNA, 1575 nt, Artificial Sequence
  derived and/or modified CDS sequence (wt) from glycoprotein__RABV__AB563800.1
augauuccucaggcucuuuuguuuguaccccuucuggucuuuucauuguguuucggaaaauuucccaucuacacgauaccggacaaacuuggucccuggagccccauugauauacaucaucucagcuguccgaacaauuugguuguggaggaugaaggauguaccaaccugucagguuucucguacauggaacucaagguaggauacauuucagccaucaaagugaacggguucacuuguacggguguagugacagaagcagagaccuacaccaacuuuguuggcuaugucacuaccacguuuaagagaaagcacuuccgcccaacgccggaugcaugcagagccgcauauaacuggaagauggcuggugaccccagauaugaagaaucucugcauaauccuuacccugauuaucauuggcuccgaacugugaagaccaccaaagaaucucuuguuaucauaucuccaaguguggcagauuuggacccauacgauaaaucccuucacucgcgaguuuuuccuagcggaaaaugcucaggcauaacggugucuucuaccuacugcuccacuaaccaugacuauaccaucuggaugccugagaauccuagacuagggaccucuugugacauuuucaccaacagcagagggaagagagcaucaaaagggagcaagaccuguggauuuguagaugagagaggccuguacaagucucugaaaggagcaugcaaacugaaacuaugugggguucugggacucagacuuauggauggaacaugggccgcgauccagacaucagaugagaccaaauggugcccuccugaucaguuagugaaccuacaugacuuucgcucggaugaaauugaacaucuuguuguggaggagcuggucaagaaaagggaagagugucuagaugcacuggaguccaucaugaccacaaagucugugaguuucagacgucucagucacuugaggaaacuugugcccggguuuggaaaagcauauaccauauucaauaagaccuugauggaggcugaugcucacuacaaaucaguccggacuuggaaugagaucauccccucuaaaggguguuuaagagucggggggagaugucacccucauguaaacgggguguucuucaaugguaucaucuuaggcccugacggccaugugcuaaucccggagaugcagucgucucuccuccagcagcauauggaguuauuggaaucuucagucauccccuuaaugcaucccuuggcagauccaucaacaguuuuuaaagaugaugacgaggcggaagauuuuguugagguucaccuuccagaugugcacaagcaggucucaggggucgaucucggucucccaagcugggggaaguauguguugaugagcgcaggcgucuugaccgcauuaauguugaugauuuucuuaaugacguguuguagaagggccaauagagcagaaucagcacaacacagucuuggagagagggggaggaaagugucgguaaccucccaaagcgggcggguuauauccucaugggagucauacaaaaauggaggugagaccaagcuguaa

SEQ ID NO: 62588 - RNA, 1575 nt, Artificial Sequence
  derived and/or modified CDS sequence (wt) from glycoprotein__RABV__AB563803.1
augauuccucaggcucuuuuguuuguaccccuucuggucuuuucauuguguuucggaaaauuucccaucuacacgauaccggacaaacuuggucccuggagccccauugauauacaucaucucagcuguccgaacaauuugguuguggaggaugaaggauguaccaaccugucagguuucucguacauggaacucaagguaggauacauuucagccaucaaagugaacggguucacuuguacggguguagugacagaagcagagaccuacaccaacuuuguuggcuaugucacuaccacguuuaagagaaagcacuuccgcccaacgccggaugcaugcagagccgcauauaacuggaagauggcuggugaccccagauaugaagaaucucugcauaacccuuacccugauuaucauuggcuccgaacugugaagaccaccaaagaaucucuugucaucauaucuccaaguguggcagauuuggacccauacgauaaaucccuucacucgagaguuuuuccuagcggaaaaugcucaggcauaacggugucuucuaccuacugcucuacuaaccacgacuauaccaucuggaugccugagaauccuagacuagggaccucuugugacauuuucaccaauagcagagggaagagagcauccaaagggagcaagaccuguggauuuguagaugagagaggccuguacaagucucugaaaggagcaugcaaacugaaacugugugggguucugggacucagacuuauggauggaacaugggccgcgauccagacaucagaugagaccaaauggugcccuccugaucaguuagugaaccuacaugacuuucgcucggaugaaauugaacaucuugucguggaggagcuggucaagaaaagggaagagugucuagaugcacuggaguccaucaugaccaccaagucugugaguuucagacgucucagucacuugaggaaacuugugccuggguuuggaaaagcauauaccauauuuaauaagaccuugauggaggcugaugcucacuacaaaucaguccggacuuggaaugagaucauccccucuaaaggguguuuaagaguaggggggagaugucacccucaugugaacgggguguucuucaacgguaucaucuuaggcccugacggccaugugcuaaucccggagaugcagucgucucuccuccagcagcauauggaguuguuggaauccucagucauccccuuaaugcaccccuuggcagauccaucaacaguuuuuaaagaugaugacgaggcggaagauuuuguugagguucaccuuccagaugugcacaagcaggucucaggggucgaucucggucucccaagcugggggaaguauguguugaugagcgcaggcgucuugaccgcgcuaauguugaugauuuucuuaaugacguguuguagaagggccaauagagcagaaucaggacaacacagucuuggagagagggggaggaaagugucgguaaccucccaaagcgggcggguuauauccucaugggagucguacaaaaguggaggugagaccaagcuguaa

SEQ ID NO: 62589 - RNA, 1575 nt, Artificial Sequence
  derived and/or modified CDS sequence (wt) from glycoprotein__RABV__AB563806.1
augauuccucaggcucuuuuguuuguaccccuucuggucuuuucauuguguuucggaaaauuucccaucuacacgauaccggacaaacuuggucccuggagccccauugauauacaucaucucagcuguccgaacaauuugguuguggaggaugaaggauguaccaaccugucagguuucucguacauggaacucaagguaggauacauuucagccaucaaagugaacggguucacuuguacggguguagugacagaagcagagaccuacaccaacuuuguuggcuaugucacuaccacguuuaagagaaagcacuuccgcccaacgccggaugcaugcagagccgcauauaacuggaagauggcuggugaccccagauaugaagaaucucugcauaacccuuacccugauuaucauuggcuccgaacugugaagaccaccaaagaaucucuugucaucauaucuccaaguguggcagauuuggacccauacgauaaaucccuucacucgagaguuuuuccuagcggaaaaugcucaggcauaacggugucuucuaccuacugcucuacuaaccacgacuauaccaucuggaugccugagaauccuagacuagggaccucuugugacauuuucaccaauagcagagggaagagagcauccaaagggagcaagaccuguggauuuguagaugagagaggccuguacaagucucugaaaggagcaugcaaacugaaacugugugggguucugggacucagacuuauggauggaacaugggccgcgauccagacaucagaugagaccaaauggugcccuccugaucaguuagugaaccuacaugacuuucgcucggaugaaauugaacaucuugucguggaggagcuggucaagaaaagggaagagugucuagaugcacuggaguccaucaugaccaccaagucugugaguuucagacgucucagucacuugaggaaacuugugccuggguuuggaaaagcauauaccauauuuaauaagaccuugauggaggcugaugcucacuacaaaucaguccggacuuggaaugagaucauccccucuaaaggguguuuaagaguaggggggagaugucacccucaugugaacgggguguucuucaacgguaucaucuuaggcccugacggccaugugcuaaucccggagaugcagucgucucuccuccagcagcauauggaguuguuggaauccucagucauccccuuaaugcaccccuuggcagauccaucaacaguuuuuaaagaugaugacgaggcggaagauuuuguugagguucaccuuccagaugugcacaagcaggucucaggggucgaucucggucucccaagcugggggaaguauguguugaugagcgcaggcgucuugaccgcgcuaauguugaugauuuucuuaaugacguguuguagaagggccaauagagcagaaucagcacaacacagucuuggagagagggggaggaaagugucgguaaccucccaaagcgggcggguuauauccucaugggagucguacaaaaguggaggugagaccaagcuguaa

SEQ ID NO: 62590 - RNA, 1575 nt, Artificial Sequence
  derived and/or modified CDS sequence (wt) from glycoprotein__RABV__AB563807.1
augauuccucaggcucuuauguuugcaccucuucuggucuuuucauuguguuucgggaaauuccccaucuacacgauaccggacaaacuuggucccuggagccccauugauauacaucaucucaguuguccgaacaauuugguuguggaggacgaaggauguaccaaccugucagguuucucauacauggaacuuaaaguaggauacauuucagccaucaaagugaacggguucacuuguacggguguagugacagaagcagaaacuuacaccaacuuuguuggcuaugucacuaccacguuuaaaagaaagcacuuccgcccgacgccggaugcaugcagagccgcauauaacuggaagauggcuggugacccuagauaugaagaaucucugcauaauccuuaccccgauuaucauuggcuccggacugugaaaaccaccaaagagucucuuguuaucauaucuccaaguguggcagaucuggacccauacgacaaaucccuucacucgagaguuuuuccuagcggaaaaugcucgggcauaacggugucuucuaccuacugcucuacuaaccacgacuauaccaucuggaugccugagaauccuagacuagggaccucuugugacauuuucaccaauagcagagggaagagagcauccaaagggagcaagaccuguggauuuguagaugagagaggcuuauacaaaucucugaaaggagcaugcaaauugaaacuaugugggguucugggacucagacuuauggauggaacaugggccgcgauccagacaucagaugagaccaaauggugcccuccugaucaguuagugaaccuacaugacuuucgcucggaugaaauugaacaucuuguuguggaagagcuggucaagaaaagggaagagugucuagaugcacuggaguccaucaugacuaccaaguccgugaguuucagacgucucagucacuugaggaaacuugugccuggguucggaaaagcauauaccauauucaauaagaccuugauggaggcugaugcucacuauaaaucaguccggacuuggaaugagaucauccccucuaaaggaugucugagagucggggggagaugucacccccaugugaacgggguguucuucaaugguaucaucuuaggcccugacggccaugugcuaaucccggagaugcagucgucucuccuccagcagcauauggaguuguuggaauccucagucauccccuuaaugcaucccuuggcagauccaucaaccguuuuuaaagaugauggcgaagcggaagauuuuguugagguucaccuuccagaugugcacaagcaggucucagggguugaucucggucucccaagcuggggaaaguauguguuaaugagcgcaggcguccugaccgcacuaauguugaugauuuucuuaaugacguguugcagaagggccaacagagcagaaucagcacaacacagucuuggagagaggggaaggaaagugucgguaaccucccaaagcgggcggguuauauccucaugggagucauacaaaaguggaggugagaccaggcuguag

SEQ ID NO: 62591 - RNA, 1575 nt, Artificial Sequence
  derived and/or modified CDS sequence (wt) from glycoprotein__RABV__AB563809.1
augauuccucaggcucuuuuguuuguaccccuucuggucuuuucauuguguuucggaaaauuuccuaucuacacaauaccggacaaacuuggucccuggagccccauugacauacaucaucucagcuguccgaacaauuugguuguggaggaugaaggauguaccaaccugucagguuucucguaccuggaacucaagguaggauacauuucugccaucaaagugaacggguucacuuguacggguguagugacggaagcagagaccuacaccaacuuuguuggcuaugucacuaccacguuuaagagaaagcacuuccgcccaacgccggaugcaugcagagccgcauauaacuggaagauggcuggugacccaagauaugaagaaucucugcauaauccuuacccugauuaucauuggcuccgaacugugaagaccaccaaagagucucuuguuaucauauccccaaguguggcagauuuggacccauacgauaaaucccuucacucgagaguuuuuccuagcggaaaaugcucaggcauaacggugucuucuaccuacugcuccacuaaccacgacuauaccaucuggaugccugagaauccuagacuagggaccucuugugacauuuucaccaauagcagagggaagagagcauccaaagggagcaaaaccuguggauuuguagaugagagaggccuguacaagucucugaaaggagcaugcaaacugaaacuaugugggguucugggacucagacuuauggauggaacaugggccgcgauccagacaucagaugagaccaaauggugcccuccugaucaguuagugaaccuacaugacuuucgcucggaugaaauugaacaucuuguuguggaggagcuggucaagaaaagggaagagugucuagaugcacuggaguccaucaugaccaccaagucugugaguuucagacgucucagucacuugaggaaacuugugcccggguuuggaaaagcauauaccauauucaauaagaccuugauggaggcugaugcucacuacaaaucaguccggacuuggaaugagaucauccccucuaaaggguguuuaagagucggggggagaugucacccucaugugaacgggguguucuucaaugguaucaucuuaggcccugacggccaugugcuaaucccggagaugcagucgucucuccuccagcagcauauggaguuauuggaauccucagucauccccuuaaugcaucccuuggcagauccaucaacaguuuuuaaagaugaugacgaggcggaagauuuuguugagguucaccuuccagaugugcacaagcaggucucaggggucgaucucggucucccaagcugggggaaguauguguugaugagcgcaggcgucuugaccgcauuaauguugaugauuuucuuaaugacguguuguagaagggccaauagagcagaaucagcacaacacagucuuggagagggggggaggaaagugucgguaaccucccaaagugggcggguuauauccucaugggagucauacaaaaguggaggugagaccaagcuguaa

SEQ ID NO: 62592 - RNA, 1575 nt, Artificial Sequence
  derived and/or modified CDS sequence (wt) from glycoprotein__RABV__AB563812.1
augauuccucaggcucuuuuguuuguaccccuucuggucuuuucauuguguuucggaaaauuucccaucuacacgauaccggacaaacuuggucccuggagccccauugauauacaucaucucagcuguccgaacaauuugguuguggaggaugaaggauguaccaaccugucagguuucucguacauggaacucaagguaggauacauuucagccaucaaagugaacggguucacuuguacggguguagugacagaagcagagaccuacaccaacuuuguuggcuaugucacuaccacguuuaagagaaagcacguccgcccaacgccggaugcaugcagagccgcauauaacuggaagauggcuggugaccccagauaugaagaaucucugcauaauccuuacccugauuaucauuggguccgaacugugaagaccaccaaagaaucucuuguuaucauaucuccaaguguggcagauuuggacccauaugauaaaucccuucacucgagaguuuuuccuagcggaaaaugcucaggcauaacggugucuucuaccuacugcuccacuaaccacgacuauaccaucuggaugccugagaauccuagacuagggaccucuugugacauuuucaccaauagcagagggaagagagcauccaaagggagcaagaccuguggauuuguggaugagagaggccuguacaagucucugaaaggagcaugcaaacugaaacuaugugggguucugggacucagacuuauggauggaacaugggccgcgauccagacaucagaugagaccaaauggugcccuccugaucaguuagugaaccuacaugacuuucgcucggaugaaauugagcaucuuguuguggaggagcuggucaagaaaagggaagagugucuagaugcacuggaguccaucaugaccaccaagucugugaguuucagacgucucagucacuugaggaaacuugugcccggguuuggaaaagcauauaccauauucaauaagaccuugauggaggcugaugcucacuacaaaucaguccggacuuggaaugagaucauccccucuaaaggguguuuaagagucggggggagaugucacccucaugugaacgggguguucuucaaugguaucaucuuaggcccugacggccaugugcuaaucccggagaugcagucgucucuccuccagcagcauauggaguuauuggaauccucagucauucccuuaaugcaucccuuggcagauccaucaacaguuuuuaaagaugaugacgaggcggaagauuuuguugagguucaccuuccagaugugcacaagcaggucucaggggucgaucucggucucccaagcugggggaaguauguguugaugagcgcaggcgucuugaccgcauuaauguugaugauuuucuuaaugacguguuguagaaggaccaauagagcagaaucagcacaacacagucuuagagagagggggaggaaagugucgguaaccucccaaagcgggcggguuauauccucaugggagucauacaaaaguggaggugagaccaagcuguaa

SEQ ID NO: 62593 - RNA, 1575 nt, Artificial Sequence
  derived and/or modified CDS sequence (wt) from glycoprotein__RABV__AB563813.1
augauuccucaggcucuuuuguuuguaccccuucuggucuuuucauuguguuucggaaaauuucccaucuacacgauaccggacaaacuuggucccuggagccccauugauauacaucaucucagcuguccgaacaauuugguuguggaggaugaaggauguaccaaccugucagguuucucguacauggaacucaagguaggauacauuucagccaucaaagugaacggguucacuuguacggguguagugacagaagcagagaccuacaccaacuuuguuggcuaugucacuaccacguuuaagagaaagcacuuccgcccaacgccggaugcaugcagagccgcauauaacuggaagauggcuggugaccccagauaugaagaaucucugcauaacccuuacccugauuaucauuggcuccgaacugugaagaccaccaaagaaucucuugucaucauaucuccaaguguggcagauuuggacccauacgauaaaucccuucacucgagaguuuuuccuagcggaaaaugcucaggcauaacggugucuucuaccuacugcucuacuaaccacgacuauaccaucuggaugccugagaauccuagacuaggggccucuugugacauuuucaccaauagcagagggaagagagcauccaaagggagcaagaccuguggauuuguagaugagagaggccuguacaagucucugaaaggagcaugcaaacugaaacugugugggguucuuggacucagacuuauggauggaacaugggccgcgauccagacaucagaugagacaaaauggugcccuccugaucaguuagugaaccuacaugacuuucgcucggaugaaauugaacaucuugucguggaggagcuggucaagaaaagggaagagugucuagaugcacuggaguccaucaugaccaccaagucugugaguuuuagacgucucagucacuugaggaaacuugugccuggguuuggaaaagcauauaccauauuuaauaagaccuugauggaggcugaugcucacuacaaaucaguccggacuuggaaugagaucauccccucuaaaggguguuuaagaguaggggggagaugucacccucaugugaacgggguguucuucaacgguaucaucuuaggcccugacggccaugugcuaaucccggagaugcagucgucucuccuccagcagcauauggaguuguuggaauccucagucauccccuuaaugcaccccuuggcagauccaucaacaguuuuuaaagaugaugacgaggcggaagauuuuguugagguucaccuuccagaugugcacaagcaggucucaggggucgaucucggucucccaagcugggggaaguauguguugaugagcgcaggcgucuugaccgcgcuaauguugaugauuuucuuaaugacguguuguagaagggcuaauagaguagaaucagaacaacacagucuuggacagagggggaggaaagugucaguaaccucccaaagcgggcggguuauauccucaugggagucguacaaaaguggaggugagaccaagcuguag

SEQ ID NO: 62594 - RNA, 1575 nt, Artificial Sequence
  derived and/or modified CDS sequence (wt) from glycoprotein__RABV__AB563816.1
augauuccucaggcucuuuuguuuguaccccuucuggucuuuucauuguguuucggaaaauuucccaucuacacgauaccggacaaacuuggucccuggagccccauugauauacaucaucucagcuguccgaacaauuugguuguggaggaugaaggauguaccaaccugucagguuucucguacauggaacucaagguaggauacauuucagccaucaaagugaacggguucacuuguacggguguagugacagaagcagagaccuacaccaacuuugucggcuaugucacuaccacguuuaagagaaagcacuuccgcccaacgccggaugcaugcagagccgcauauaacuggaagauggcuggugaccccagauaugaagaaucucugcauaacccuuacccugauuaucauuggcuccgaacugugaagaccaccaaagaaucucuugucaucauaucuccaaguguggcagauuuggacccauacgauaaaucccuucacucgagaguuuuuccuagcggaaaaugcucaggcauaacggugucuucuaccuacugcucuacuaaccacgacuauaccaucuggaugccugagaauccuagacuagggaccucuugugacauuuucaccaauagcagagggaagagagcauccaaagggagcaagaccuguggauuuguagaugagagaggccuguacaagucucugaaaggagcaugcaaacugaaacugugugggguucugggacucagacuuauggauggaacaugggccgcgauccagacaucagaugaaaccaaauggugcccuccugaucaguuagugaaccuacaugacuuucgcucggaugaaauugaacaucuugucguggaggagcuggucaagaaaagggaagagugucuagaugcacuggaguccaucaugaccaccaagucugugaguuucagacgucucagucacuugaggaaacuugugccuggguuuggaaaagcauauaccauauuuaauaagaccuugauggaggcugaugcucacuacaaaucaguccggacuuggaaugagaucauccccucuaaaggguguuuaagaguaggggggagaugucacccucaugugaacgggguguucuucaacgguaucaucuuaggcccugacggccaugugcuaaucccggagaugcagucgucucuccuccagcagcauauggaguuguuggaauccucagucauccccuuaaugcaccccuuggcagauccaucaacaguuuuuaaagaugaugacgaggcggaagauuuuguugagguucaccuuccagaugugcacaagcaggucucaggggucgaucucggucucccaagcugggggaaguauguguugaugagcgcaggcgucuugaccgcgcuaauguugaugauuuucuuaaugacguguuguagaagggccaauagaguagaaucagcacaacacagucuuggagagagggggaggaaagugucgguaaccucccaaagcgggcggguuauauccucaugggagucguacaaaaguggaggugagaccaagcuguaa

SEQ ID NO: 62595 - RNA, 1575 nt, Artificial Sequence
  derived and/or modified CDS sequence (wt) from glycoprotein__RABV__AB563817.1
augauuccucaggcucuuuuguuuguaccccuucuggucuuuucauuguguuucggaaaauuucccaucuacacgauaccggacaaacuuggucccuggagccccauugauauacaucaucucagcuguccgaacaauuugguuguggaggaugaaggauguaccaaccugucagguuucucguacauggaacucaagguaggauacauuucagccaucaaagugaacggguucacuuguacggguguagugacagaagcagagaccuacaccaacuuuguuggcuaugucacuaccacguuuaagagaaagcacuuccgcccaacgccggaugcaugcagagccgcauauaacuggaagauggcuggugaccccagauaugaagaaucucugcauaauccuuacccugauuaucauuggcuccgaacugugaagaccaccaaagaaucucuuguuauuauaucuccaaguguggcagauuuggacccauacgacaaaucccuucacucgagaguuuuuccuagcggaaaaugcucaggcauaacggugucuucuaccuacugcuccacuaaccacgacuauaccaucuggaugccugagaauccuagacuagggaccucuugugacauuuucaccaauagcagagggaagagagcauccaaagggagcaagaccuguggauuuguagaugagagaggccuguacaagucucugaaaggagcaugcaaacugaaacuaugugggguucuaggacucagacuuauggauggaacaugggccgcgauccagacaucagaugagaccaaauggugcccuccugaucaguuagugaaccuacaugacuuucgcucggaugaaauugaacaucuuguuguggaggagcuggucaagaagagggaagagugucuagaugcacuggaguccaucaugaccaccaagucugugaguuucagacgucucagucacuugaggaaacuugugcccggguuuggaaaagcauauaccauauucaauaagaccuugauggaggcugaugcucacuacaaaucaguccggacuuggaaugagaucauccccucuaaaggauguuuaagagucggggggagaugucacccucaugugaacgggguguucuucaaugguaucaucuuaggcccugacggccaugugcuaaucccggagaugcagucgucucuccuccagcagcauauggaguuauuggaauccucagucauccccuuaaugcaucccuuggcagauccaucaacaguuuuuaaagaugaugacgaggcggaagauuuuguugagguucaccuuccagaugugcacaaacaggucucaggggucgaucucggucucccaagcugggggaaguauguguugaugagcgcaggcgccuugacagcauuaauguugaugauuuucuuaaugacguguuguagaagggccaauagagcagaaucagcacaacacagucuuggagagagggggaggaaagugucgguaaccucccaaagcgggcggguuauauccucaugggagucauacaaaaguggaggugagaccaagcuguaa

SEQ ID NO: 62596 - RNA, 1575 nt, Artificial Sequence
  derived and/or modified CDS sequence (wt) from glycoprotein__RABV__AB563819.1
augauuccucaggcucuuuuguuuguaccccuucuggucuuuucauuguguuucggaaaauuucccaucuacacgauaccggacaaacuuggucccuggagccccauugauauacaucaucucagcuguccgaacaauuugguuguggaggaugaaggauguaccaaccugucagguuucucguacauggaacucaagguaggauacauuucagccaucaaagugaacggguucacuuguacggguguagugacagaagcagagaccuacaccaacuuugucggcuaugucacuaccacguuuaagagaaagcacuuccgcccaacgccggaugcaugcagagccgcauauaacuggaagauggcuggugaccccagauaugaagaaucucugcauaacccuuacccugauuaucauuggcuccgaacugugaagaccaccaaagaaucucuugucauaauaucuccaaguguggcagauuuggacccauacgauaaaucccuucacucgagaguuuuuccuagcggaaaaugcucaggcauaacggugucuucuaccuacugcucuacuaaccacgacuauaccaucuggaugccugagaauccuagacuagggaccucuugugacauuuucaccaauagcagagggaagagagcauccaaagggagcaagaccuguggauuuguagaugagagaggccuguacaagucucugaaaggagcaugcaaacugaaacugugugggguucugggacucagacuuauggauggaacaugggccgcgauccagacaucagaugagaccaaauggugcccuccugaucaguuagugaaccuacaugacuuucgcucggaugaaauugaacaucuugucguggaggagcuggucaagaaaagggaagagugucuagaugcacuggaguccaucaugaccaccaagucugugaguuucagacgucucagucacuugaggaaacuugugccuggguuuggaaaagcauauaccauauuuaauaagaccuugauggaggcugaugcucacuacaaaucaguccggacuuggaaugagaucauccccucuaaaggguguuuaagaguaggggggagaugucacccucaugugaacgggguguucuucaacgguaucaucuuaggcccugacggccaugugcuaaucccggagaugcagucgucucuccuccagcagcauauggaguuguuggaauccucagucauccccuuaaugcaccccuuggcagauccaucaacaguuuuuaaagaugaugacgaggcggaagauuuuguugagguucaccuuccagaugugcacaagcaggucucaggggucgaucucggucucccaagcugggggaaguauguguugaugagcgcaggcgucuugaccgcgcuaauguugaugauuuucuuaaugacguguuguagaagggccaauagaguagaaucagcacaacacagucuuggagagagggggaggaaagugucgguaaccucccaaagcgggcggguuauauccucaugggagucguacaaaaguggaggugagaccaagcuguaa

SEQ ID NO: 62597 - RNA, 1575 nt, Artificial Sequence
  derived and/or modified CDS sequence (wt) from glycoprotein__RABV__AB563820.1
augauuccucaggcucucuuguuuguaccccuucuggucuuuucauuguguuucgggaaauuccccaucuacacuauaccggacaaacuuggucccuggagccccauugauauacaucaucucagcugcccgaacaauuugguuguggaggaugaaggauguaccaaccugucagguuucucauacauggaacucaaaguaggauacauuucagccaucaaaguaaacggguucacuuguacagguguggugacagaagcagagaccuacaccaacuuuguuggcuaugucacuaccacguucaagagaaagcacuuccgcccgaugccggaugcaugcagagccgcauauaacuggaagauggcuggugaccccagauaugaagaaucucugcauaauccuuacccugauuaucauuggcuccggacugugaagaccaccaaagaaucucuuguuaucauaucuccaaguguggcagauuuggacccauacgauaaaucccuucacucgagaguuuuuccuagcgggaaaugcucaggcauaacagugucuucuaccuacugcucuacuaaccacgacuauaccaucuggaugccugagaauccuagacuagggaccucuugugacauuuuuaucaauagcagagggaagagagcauccaaagggagcaagaccuguggauuuguagaugagagaggccuguacaaaucucugaaaggagcaugcaaacugaaacuaugugggguucugggacucagacuuauggauggaacaugggccgcgauccagacaucagaugagaccaaauggugcccuccugaucaguuagugaaccuacaugacuuucguucagaugaaauugaacaucuuguuguagaggaguuggucaagaaaagggaagagugucuagaugcacuggaguccaucaugaccaccaagucugugagcuucagacgucucagucacuugaggaaacuugugccuggguuuggaaaagcauauaccaucuucaauaagaccuugauggaggcugaugcucacuacaaaucaguccggacuuggaaugagaucauccccucuaaaggguguuugagagucggggggaggugucacccucaugugaacgggguguucuucaacgguauuaucuuaggcccugacggccaugugcugaucccggagaugcagucgucucuccuccagcagcauauggaguuguuggaauccucagucauccccuuaaugcaucccuuggcagauccaucaacaguuuuuaaagaugaugacgaggcggaagauuuuguugagguucaccuuccagaugugcauaagcaagucucaggggucgaucucggucucccaaguugggggaaguauguguugaugagcgcaggcgucuugaccgcacuaauguugaugauuuucuuaaugacguguuguagaagauccaauagagcaaaaucagaacaacacagucuuggagagagggggaggaaagugucgguaaccucccaaagcgggcgugucauauccucaugggagucauacaaaaggggaggugagaccaagcuguaa

SEQ ID NO: 62598 - RNA, 1575 nt, Artificial Sequence
  derived and/or modified CDS sequence (wt) from glycoprotein__RABV__AB563821.1
augauuccucaggcucuuuuguuuguaccccuucuggucuuuucauuguguuucgggaaauuucccaucuacacgauaccggacaaacuugguccauggagccccauugauauacaucaucucagcugcccgaacaauuugguuguggaggacgaaggauguaccaaccugucaggucucucauacauggaacucaaagugggauacauuucagccaucaaggugaacggguucacuuguacgggcguggugacagaagcagagaccuacaccaacuucguuggcuaugucacuaccacguuuaagagaaagcacuuccgcccgacaccggaugcaugcagagccgcauauaacuggaagauggcuggugaccccagauaugaagaaucucugcauaauccguacccugauuaucauuggcuccggacugugaagaccaccaaagaaucucuuguuaucauaucuccaaguguggcagauuuggacccauacgauaaaucccuucacucgagaguuuuuccuagcggaaaaugcucagguauaacggugucuucuaccuacugcuuuacuaaccacgacuauaccaucuggaugccugagaauccuagacuagggaccucuugugacauuuucaccaauagcagagggaagagagcauccaaagggagcaagacauguggauuuguagaugagagaggccuauacaaaucucugaaaggagcaugcaaacugaaacuaugugggguucugggacucagacuuauggauggaacaugggccgcgauccagacaucagaugagaccaaauggugcccuccugaucaguuagugaaccuacaugacuuucguucggaugaaauugaacaucuuguuguagaggagcuggucaagaaaagggaagaaugucuagaugcacuggaguccaucaugaccaccaagucugugaguuuuagacgucucagucacuugaggaaacuugugccuggguuuggaaaagcauauaccauauucaauaagaccuugauggaggcugaugcucacuacaaaucaguccggacuugggaugagaucauccccucuaaaggguguuuaagagucggugggagaugccacccccaugugaaugggguguucuucaaugguaucauuuuaggcccugacggccaugugcuaaucccggagaugcagucgucucuccuccagcagcauauggaguuguuggaaucaucagucauccccuuaaugcaucccuuggcagauccaucaacaguuuuuaaagaugaugacgaggcggaagacuuuguugagguucaccuuccagaugugcacaagcaggucucaggggucgaucucggucucccaagcugggggaaauauguguugaugagcgcaggcgucuugaccgcacuaauguugaugauuuucuuaaugacguguuguagaagggccaauagagcagaaucagcacaacacagucuuggagagagggggaggaaagugucgguaaccucccaaagcgggcggguuauauccucaugggagucauacaaaaguggaggugagaccaagcuguaa

SEQ ID NO: 62599 - RNA, 1575 nt, Artificial Sequence
  derived and/or modified CDS sequence (wt) from glycoprotein__RABV__AB563822.1
augauuccucaggcucuuuuguuuguaccccuucuggucuuuucauuguguuucggaaaauuucccaucuacacgauaccggacaaacuuggucccuggagccccauugauauacaucaucucagcuguccgaacaauuugguuguggaggaugaaggauguaccaaccugucagguuucucguacauggaacucaagguaggauacauuucagccaucaaagugaacggguucacuuguacggguguagugacagaagcagagaccuacaccaacuuuguuggcuaugucacuaccacguuuaagagaaagcacuuccgcccaacgccggaugcaugcagagccgcauauaacuggaagauggcuggcgaccccagauaugaagaaucucugcauaacccuuacccugauuaucauuggcuccgaacugugaagaccaccaaagaaucucuugucaucauaucuccaaguguggcagauuuggacccauacgauaaaucccuucacucgagaguuuuuccuagcggaaaaugcucaggcauaacggugucuucuaccuacugcucuacuaaccacgacuauaccaucuggaugccugagaauccuagacuagggaccucuugugacauuuucaccaauagcagagggaagagagcauccaaagggagcaagaccuguggauuuguagaugagagaggccuguacaagucucugaaaggagcaugcaaacugaaacugugugggguucugggacucagacuuauggauggaacaugggccgcgauccagacaucagaugagaccaaauggugcccuccugaucaguuagugaaccuacaugacuuucgcucggaugaaauugaacaucuugucguggaggagcuggucaagaaaagggaagagugucuagaugcacuggaguccaucaugaccaccaagucugugaguuuuagacgucucagucacuugaggaaacuugugccuggguuuggaaaagcauauaccauauuuaauaagaccuugauggaggcugaugcucacuacaaaucaguccggacuuggaaugagaucauccccucuaaaggguguuuaagaguaggggggagaugucacccucaugugaacgggguguucuucaacgguaucaucuuaggcccugacggccaugugcuaaucccggagaugcagucgucucuccuccagcagcauauggaguuguuggaauccucagucauccccuuaaugcaccccuuggcagauccaucaacaguuuuuaaagaugaugacgaggcggaagauuuuguugagguucaccuuccagaugugcacaagcaggucucaggggucgaucucggucucccaagcugggggaaguauguguugaugagcgcaggcgucuugaccgcgcuaauguugaugauuuucuuaaugacguguuguagaagggccaauagaguagaaucagcacaacacagucuuggagagagggggaggaaagugucgguaaccucccaaagcgggcggguuauauccucaugggagucguacaaaaguggaggugagaccaagcuguaa

SEQ ID NO: 62600 - RNA, 1575 nt, Artificial Sequence
  derived and/or modified CDS sequence (wt) from glycoprotein__RABV__AB563823.1
augauuccucaggcucuuuugcuuguaccccuucuggucuuuucauuguguuucggaaaauuucccaucuacacgauaccggacaaacuuggucccuggagccccauugauauacaucaucucagcuguccgaacaauuugguuguggaggaugaaggauguaccaaccugucagguuucucguacauggaacucaagguaggauacauuucagccaucaaagugaacggguucacuuguacggguguagugacagaagcagagaccuacaccaacuuuguuggcuaugucacuaccacguuuaagagaaagcacuuccgcccaacgccggaugcaugcagagccgcauauaacuggaagauggcuggugaccccagauaugaagaaucucugcauaacccuuacccugauuaucauuggcuccgaacugugaagaccaccaaagaaucucuugucaucauaucuccaaguguggcagauuuggacccauacgauaaaucccuucacucgagaguuuuuccuagcggaaaaugcucaggcauaacggugucuucuaccuacugcucuacuaaccacgacuauaccaucuggaugccugagaauccuagacuagggaccucuugugacauuuucaccaauagcagagggaagagagcauccaaagggagcaagaccuguggauuuguagaugagagaggccuguacaagucucugaaaggagcaugcaaacugaaacugugugggguucugggacucagacuuauggauggaacaugggccgcgauccagacaucagaugagaccaaauggugcccuccugaucaguuagugaaccuacaugacuuucgcucggaugaaauugaacaucuugucguggaggagcuggucaagaaaagggaagagugucuagaugcacuggaguccaucaugaccaccaagucugugaguuucagacgucucagucacuugaggaaacuugugccuggguuuggaaaagcauauaccauauuuaauaagaccuugauggaggcugaugcucacuacaaaucaguccggacuuggaaugagaucauccccucuaaaggguguuuaagaguaggggggagaugucacccucaugugaacgggguguucuucaacgguaucaucuuaggcccugacggccaugugcuaaucccggagaugcagucgucucuccuccagcagcauauggaguuguuggaauccucagucauccccuuaaugcaccccuuggcagauccaucaacaguuuuuaaagaugaugacgaggcggaagauuuuguugagguucaccuuccagaugugcacaagcaggucucaggggucgaucucggucucccaagcugggggaaguauguguugaugagcgcaggcgucuugaccgcgcuaauguugaugauuuucuuaaugacguguuguagaagggccaauagaguagaaucagcacaacacagucuuggagagagggggaggaaagugucgguaaccucccaaagcgggcguguuauauccucaugggagucguacaaaaguggaggugagaccaagcuguaa

SEQ ID NO: 62601 - RNA, 1575 nt, Artificial Sequence
  derived and/or modified CDS sequence (wt) from glycoprotein__RABV__AB563824.1
augauuccucaggcucuuuuguuuguaccccuucuggucuuuucauuguguuucggaaaauuucccaucuacacgauaccggacaaacuuggucccuggagccccauugauauacaucaucucagcuguccgaacaauuugguuguggaggaugaaggauguaccaaccuaucagguuucucguacauggaacucaagguaggauacauuucagccaucaaagugaacggguucacuuguacggguguagugacagaagcagagaccuacaccaacuuugucggcuaugucacuaccacguuuaagagaaagcacuuccgcccaacaccggaugcaugcagagccgcauauaacuggaagauggcuggugaccccagauaugaagaaucucugcauaacccuuacccugauuaucauuggcuccgaacugugaagaccaccaaagaaucucuugucauaauaucuccaaguguggcagauuuggacccauacgauaaaucccuucacucgagaguuuuuccuagcggaaaaugcucaggcauaacggugucuucuaccuacugcucuacuaaccacgacuauaccaucuggaugccugagaauccuagacuagggaccucuugugacauuuucaccaauagcagagggaagagagcauccaaagggagcaagaccuguggauuuguagaugagagaggccuguacaagucucugaaaggagcaugcaaacugaaacugugugggguucugggacucagacuuauggauggaacaugggccgcgauccagacaucagaugagaccaaauggugcccuccugaucaguuagugaaccuacaugacuuucgcucggaugaaauugaacaucuugucguggaggagcuggucaagaaaagggaagagugucuagaugcacuggaguccaucaugaccaccaagucugugaguuucagacgucucagucacuugaggaaacuugugccuggguuuggaaaagcauauaccauauuuaauaagaccuugauggaggcugaugcucacuacaaaucaguccggacuuggaaugagaucauccccucuaaaggguguuuaagaguaggggggagaugucacccucaugugaacgggguguucuucaacgguaucaucuuaggcccugacggccaugugcuaaucccggagaugcagucgucucuccuccagcagcauauggaguuguuggaauccucagucauccccuuaaugcaccccuuggcagauccaucaacaguuuuuaaagaugaugacgaggcggaagauuuuguugagguucaccuuccagaugugcacaagcaggucucaggggucgaucucggucucccaagcugggggaaguauguguugaugagcgcaggcgucuugaccgcgcuaauguugaugauuuucuuaaugacguguuguagaagggccaauagaguagaaucagcacaacacagucuuggagagagggggaggaaagugucgguaaccucccaaagcgggcggguuauauccucaugggagucguacaaaaguggaggugagaccaagcuguaa

SEQ ID NO: 62602 - RNA, 1575 nt, Artificial Sequence
  derived and/or modified CDS sequence (wt) from glycoprotein__RABV__AB563826.1
augauuccucaggcucuuuuguuuguaccccuucuggucuuuucauuguguuucggaaaauuucccaucuacacgauaccggacaaacuuggucccuggagccccauugauauacaucaucucagcuguccgaacaauuugguuguggaggaugaaggauguaccaaccugucagguuucucguacauggaacucaagguaggauacauuucagccaucaaagugaacggguucacuuguacggguguagugacagaagcagagaccuacaccaacuuuguuggcuaugucacuaccacguuuaagagaaagcacuuccgcccaacgccggaugcaugcagagccgcauauaacuggaagauggcuggugaccccagauaugaagaaucucugcauaacccuuacccugauuaucauuggcuccgaacugugaagaccaccaaagaaucucuugucaucauaucuccaaguguggcagauuuggacccauacgauaaaucccuucacucgagaguuuuuccuagcggaaaaugcucaggcauaacggugucuucuaccuacugcucuacuaaccacgacuauaccaucuggaugccugagaauccuagacuagggaccucuugugacauuuucaccaauagcagagggaagagagcauccaaagggagcaagaccuguggauuuguagaugagagaggccuguacaagucucugaaaggagcaugcaaacugaaacugugugggguucugggacucagacuuauggauggaacaugggccgcgauccagacaucagaugagaccaaauggugcccuccugaucaguuagugaaccuacaugacuuucgcucggaugaaauugaacaucuugucguggaggagcuggucaagaaaagggaagagugucuagaugcacuggaguccaucaugaccaccaagucugugaguuucagacgucucagucacuugaggaaacuugugccuggguuuggaaaagcauauaccauauuuaauaagaccuugauggaggcugaugcucacuacaaaucaguccggacuuggaaugagaucauccccucuaaaggguguuuaagaguaggggggagaugucacccucaugugaacgggguguucuucaacgguaucaucuuaggcccugacggccaugugcuaaucccggagaugcagucgucucuccuccagcagcauauggaguuguuggaauccucagucauccccuuaaugcaccccuuggcagauccaucaucaguuuuuaaagaugaugacgaggcggaagauuuuguugagguucaccuuccagaugugcacaagcaggucucaggggucgaucucggucucccaagcugggggaaguauguguugaugagcgcaggcgucuugaccgcgcugauguugaugauuuucuuaaugacguguuguagaagggccaauagaguagaaucagcacaacacagucuuggagagagggggaggaaagugucgguaaccucccaaagcgggcggguuauauccucaugggagucguacaaaaguggaggugagaccaagcuguaa

SEQ ID NO: 62603 - RNA, 1575 nt, Artificial Sequence
  derived and/or modified CDS sequence (wt) from glycoprotein__RABV__AB563827.1
augauuccucaggcucuuuuguuuguaccccuucuggucuuuucauuguguuucggaaaauuucccaucuacacgauaccggacaaacuuggucccuggagccccauugauauacaucaucucagcuguccgaacaauuugguuguggaggaugaaggauguaccaaccugucagguuucucguacauggaacucaagguaggauacauuucagccaucaaagugaacggguucacuuguacggguguagugacagaagcagagaccuacaccaacuuuguuggcuaugucacuaccacguuuaagagaaagcacuuccgcccaacgccggaugcaugcagagccgcauauaacuggaagauggcuggugaccccagauaugaagaaucucugcauaacccuuacccugauuaucauuggcuccgaacugugaagaccaccaaagaaucucuugucaucauaucuccaaguguggcagauuuggacccauacgauaaaucccuucacucgagaguuuuuccuagcggaaaaugcucaggcauaacggugucuucuaccuacugcucuacuaaccacgacuauaccaucuggaugccugagaauccuagacuagggaccucuugugacauuuucaccaauagcagagggaagagagcauccaaagggagcaagaccuguggauuuguagaugagagaggccuguacaagucucugaaaggagcaugcaaacugaaacugugugggguucugggacucagacuuauggauggaacaugggucgcgauccagacaucagaugagaccaaauggugcccuccugaucaguuagugaaccuacaugacuuucgcucggaugaaauugaacaucuugucguggaggagcuggucaagaaaagggaagagugucuagaugcacuggaguccaucaugaccaccaagucugugaguuuuagacgucucagucacuugaggaaacuugugccuggguuuggaaaagcauauaccauauuuaauaagaccuugauggaggcugaugcucacuacaaaucaguccggacuuggaaugagaucauccccucuaaaggguguuuaagaguaggggggagaugucacccucaugugaacgggguguucuucaacgguaucaucuuaggcccugacggccaugugcuaaucccggagaugcagucgucucuccuccagcagcauauggaguuguuggaauccucagucauccccuuaaugcaccccuuggcagauccaucaacaguuuuuaaagaugaugacgaggcggaagauuuuguugagguucaccuuccagaugugcacaagcaggucucaggggucgaucucggucucccaagcugggggaaguauguguugaugagcgcaggcgucuugaccgcgcuaauguugaugauuuucuuaaugacguguuguagaagggccaauagaguagaaucagcacaacacagucuuggagagagggggaggaaagugucgguaaccucccaaagcgggcggguuauauccucaugggagucguacaaaaguggaggugagaccaagcuguaa

SEQ ID NO: 62604 - RNA, 1575 nt, Artificial Sequence
  derived and/or modified CDS sequence (wt) from glycoprotein__RABV__AB563830.1
augauuccucaggcucuuuugcuuguaccccuucuggucuuuucauuguguuucggaaaauuucccaucuacacgauaccggacaaacuuggucccuggagccccauugauauacaucaucucagcuguccgaacaauuugguuguggaggaugaaggauguaccaaccugucagguuucucguacauggaacucaagguaggauacauuucagccaucaaagugaacggguucacuuguacggguguagugacagaagcagagaccuacaccaacuuuguuggcuaugucacuaccacguuuaagagaaagcacuuccgcccaacgccggaugcaugcagagccgcauauaacuggaagauggcuggugaccccagauaugaagaaucucugcauaacccuuacccugauuaucauuggcuccgaacugugaagaccaccaaagaaucucuugucaucauaucuccaaguguggcagauuuggacccauacgauaaaucccuucacucgagaguuuuuccuagcggaaaaugcucaggcauaacggugucuucuaccuacugcucuacuaaccacgacuauaccaucuggaugccugagaauccuagacuagggaccucuugugacauuuucaccaauagcagagggaagagagcauccaaagggagcaagaccuguggauuuguagaugagagaggccuguacaagucucugaaaggagcaugcaaacugaaacugugugggguucugggacucagacuuauggauggaacaugggccgcgauccagacaucagaugagaccaaauggugcccuccugaucaguuagugaaccuacaugacuuucgcucggaugaaauugaacaucuugucguggaggagcuggucaagaaaagggaagagugucuagaugcacuggaguccaucaugaccaccaagucugugaguuucagacgucucagucacuugaggaaacuugugccuggguuuggaaaagcauauaccauauuuaauaagaccuugauggaggcugaugcucacuacaaaucaguccggacuuggaaugagaucauccccucuaaaggguguuuaagaguaggggggagaugucacccucaugugaacgggguguucuucaacgguaucaucuuaggcccugacggccaugugcuaaucccggagaugcagucgucucuccuccagcagcauauggaguuguuggaauccucagucauccccuuaaugcaccccuuggcagauccaucaacaguuuuuaaagaugaugacgaggcggaagauuuuguugagguucaccuuccagaugugcacaagcaggucucaggggucgaucucggucucccaagcugggggaaguauguguugaugagcgcaggcaucuugaccgcgcuaauguugaugauuuucuuaaugacguguuguagaagggccaauagaguagaaucagcacaacacagucuuggagagagggggaggaaagugucgguaaccucccaaagcgggcguguuauauccucaugggagucguacaaaaguggaggugagaccaagcuguaa

SEQ ID NO: 62605 - RNA, 1575 nt, Artificial Sequence
  derived and/or modified CDS sequence (wt) from glycoprotein__RABV__AB563836.1
augauuccucaggcucuuuugcuuguaccccuucuggucuuuucauuguguuucggaaaauuucccaucuacacgauaccggacaaacuuggucccuggagccccauugauauacaucaucucagcuguccgaacaauuugguuguggaggaugaaggauguaccaaccugucagguuucucguacauggaacucaagguaggauacauuucagccaucaaagugaacggguucacuuguacggguguagugacagaagcagagaccuacaccaacuuuguuggcuaugucacuaccacguuuaagagaaagcacuuccgcccaacgccggaugcaugcagagccgcauauaacuggaagauggcuggugaccccagauaugaagaaucucugcauaacccuuacccugauuaucauuggcuccgaacugugaagaccaccaaagaaucucuugucaucauaucuccaaguguggcagauuuggacccauacgauaaaucccuucacucaagaguuuuuccuagcggaaaaugcucaggcauaacggugucuucuaccuacugcucuacuaaccacgacuauaccaucuggaugccugagaauccuagacuagggaccucuugugacauuuucaccaauagcagagggaagagagcauccaaagggagcaagaccuguggauuuguagaugagagaggccuguacaagucucugaaaggagcaugcaaacugaaacugugugggguucugggacucagacuuauggauggaacaugggccgcgauccagacaucagaugagaccaaauggugcccuccugaucaguuagugaaccuacaugacuuucgcucggaugaaauugaacaucuugucguggaggagcuggucaagaaaagggaagagugucuagaugcacuggaguccaucaugaccaccaagucugugaguuucagacgucucagucacuugaggaaacuugugccuggguuuggaaaagcauauaccauauuuaauaagaccuugauggaggcugaugcucacuacaaaucaguccggacuuggaaugagaucauccccucuaaaggguguuuaagaguaggggggagaugucacccucaugugaacgggguguucuucaacgguaucaucuuaggcccugacggccaugugcuaaucccggagaugcagucgucucuccuccagcagcauauggaguuguuggaauccucagucauccccuuaaugcaccccuuggcagauccaucaacaguuuuuaaagaugaugacgaggcggaagauuuuguugagguucaccuuccagaugugcacaagcaggucucaggggucgaucucggucucccaagcugggggaaguauguguugaugagcgcaggcgucuugaccgcgcuaauguugaugauuuucuuaaugacguguuguagaagggccaauagaguagaaucagcacaacacagucuuggagagagggggaggaaagugucgguaaccucccaaagcgggcguguuauauccucaugggagucguacaaaaguggaggugagaccaagcuguaa

SEQ ID NO: 62606 - RNA, 1575 nt, Artificial Sequence
  derived and/or modified CDS sequence (wt) from glycoprotein__RABV__AB563837.1
augauuccucaggcucuuuuguuuguaccccuucuggucuuuucauuguguuucggaaaauuucccaucuacacgauaccggacaaacuuggucccuggagccccauugauauacaucaucucagcuguccgaacaauuugguuguggaggaugaaggauguaccaaccugucagguuucucguacauggaacucaagguaggauacauuucagccaucaaagugaacggguucacuuguacggguguagugacagaagcagagaccuacaccaacuuuguuggcuaugucacuaccacguuuaagagaaagcacuuccgcccaacgccggaugcaugcagagccgcauauaacuggaagauggcuggugaccccagauaugaagaaucucugcauaacccuuacccugauuaucauuggcuccgaacugugaagaccaccaaagaaucucuugucaucauaucuccaaguguggcagauuuggacccauacgauaaaucccuucacucgagaguuuuuccuagcggaaaaugcucaggcauaacgguguuuucuaccuacugcucuacuaaccacgacuauaccaucuggaugccugagaauccuagacuagggaccucuugugacauuuucaccaauagcagagggaagagagcauccaaagggagcaagaccuguggauuuguagaugagagaggccuguacaagucucugaaaggagcaugcaaacugaaacugugugggguucugggacucagacuuauggauggaacaugggccgcgauccagacaucagaugagaccaaauggugcccuccugaucaguuagugaaccuacaugacuuucgcucggaugaaauugaacaucuugucguggaggagcuggucaagaaaagggaagagugucuagaugcacuggaguccaucaugaccaccaagucugugaguuucagacgucucagucacuugaggaaacuugugccuggguuuggaaaagcauauaccauauuuaauaagaccuugauggaggcugaugcucacuacaaaucaguccggacuuggaaugagaucauccccucuaaaggguguuuaagaguaggggggagaugucacccucaugugaacgggguguucuucaacgguaucaucuuaggcccugacggccaugugcuaaucccggagaugcagucgucucuccuccagcagcauauggaguuguuggaauccucagucauccccuuaaugcaccccuuggcagauccaucaacaguuuuuaaagaugaugacgaggcggaagauuuuguugagguucaccuuccagaugugcacaagcaggucucaggggucgaucucggucucccaagcugggggaaguauguguugaugagcgcaggcgucuugaccgcgcugauguugaugauuuucuuaaugacguguuguagaagggccaauagaguagaaucagcacaacacagucuuggagagagggggaggaaagugucgguaaccucccaaagcgggcggguuauauccucaugggagucguacaaaaguggaggugagaccaagcuguaa

SEQ ID NO: 62607 - RNA, 1575 nt, Artificial Sequence
  derived and/or modified CDS sequence (wt) from glycoprotein__RABV__AB563838.1
augauuccucaggcucuuuuguuuguaccccuucuggucuuuucguuguguuucggaaaauuucccaucuacacgauaccggacaaacuuggucccuggagccccauugauauacaucaucucagcuguccgaacaauuugguuguggaggaugaaggauguaccaaccugucagguuucucguacauggaacucaagguaggauacauuucagccaucaaaguaaacggguucacuuguacggguguagugacagaagcagagaccuacaccaacuuuguuggcuaugucacuaccacguuuaagagaaagcacuuccgcccaacgccggaugcaugcagagccgcauauaacuggaagauggcuggugaccccagauaugaagaaucucugcauaauccuuacccugauuaucauuggcuccgaacugugaagaccaccaaagaaucucuuguuaucauaucuccaaguguggcagauuuggacccauaugauaaaucccuucacucgagaguuuuuccuagcggaaaaugcucaggcauaacggugucuucuaccuacugcuccacuaaccacgacuauaccaucuggaugccugagaauccuagacuagggaccucuugugacauuuucaccaauagcagagggaagagagcauccaaagggagcaagaccuguggauuuguggaugagagaggccuguacaagucucugaaaggagcaugcaaacugaaacuaugugggguucugggacucagacuuauggauggaacaugggccgcgauccagacaucagaugagaccaaauggugcccuccugaccaguuagugaaccuacaugacuuucgcucggaugaaauugagcaucuuguuguggaggagcuggucaagaaaagggaagagugucuagaugcacuggaguccaucaugaccaccaagucugugaguuucagacgucucagucacuugaggaaacuugugcccggguuuggaaaagcauauaccauauucaacaagaccuugauggaggcugaugcucacuacaaaucaguccggacuuggaaugagaucauccccuccaaaggguguuuaagagucggggggagaugucacccucaugugaacgggguguucuucaaugguaucaucuuaggcccugacggccaugugcuaaucccggagaugcagucgucucuccuccagcagcauauggaguuauuggaauccucagucauucccuuaaugcaucccuuggcagauccaucaacaguuuuuaaagaugaugacgaggcggaagauuuuguugagguucaccuuccagaugugcacaagcaggucucaggggucgaucucggucucccaagcugggggaaguauguguugaugagcgcaggcgucuugaccgcauuaauguugaugauuuucuuaaugacguguuguagaaggaccaauagagcagaaucagcacaacacagucuuggagagagggggaggaaagugucgguaaccucccaaagcgggcggguuauauccucaugggagucauacaaaaguggaggugagaccaagcuguaa

SEQ ID NO: 62608 - RNA, 1575 nt, Artificial Sequence
  derived and/or modified CDS sequence (wt) from glycoprotein__RABV__AB563839.1
augauuccucaggcucuuuuguuuguaccccuucuggucuuuucauuguguuucggaaaauuucccaucuacacgauaccggacaaacuuggucccuggagccccauugauauacaucaucucagcuguccgaacaauuugguuguggaggaugaaggauguaccaaccugucagguuucucguacauggaacucaagguaggauacauuucagccaucaaagugaacggguucacuuguacggguguagugacagaagcagagaccuacaccaacuuuguuggcuaugucacuaccacguuuaagagaaagcacuuccgcccaacgccggaugcaugcagagccgcauauaacuggaagauggcuggugaccccagauaugaagaaucucugcauaauccuuacccugauuaucauuggcuccgaacugugaagaccaccaaagaaucucuuguuaucauaucuccaaguguggcagauuuggacccauacgauaaaucccuucacucgagaguuuuuccuagcggaaaaugcucaggcauaacggugucuucuaccuacugcuccacuaaccacgacuauaccaucuggaugccugagaauccuagacuagggaccucuugugacauuuucaccaacagcagagggaagagagcaucaaaagggagcaagaccuguggauuuguagaugagagaggccuguacaagucucugaaaggagcaugcaaacugaaacuaugugggguucugggacucagacuuauggauggaacaugggccgcgauccagacaucagaugagaccaaauggugcccuccugaucaguuagugaaccuacaugacuuucgcucggaugaaauugaacaucuuguuguggaggagcuggucaagaaaagggaagagugucuagaugcacuggaguccaucaugaccacaaagucugugaguuucagacgucucagucacuugaggaaacuugugcccggguuuggaaaagcauauaccauauucaauaagaccuugauggaggcugaugcucacuacaaaucaguccggacuuggaaugagaucauccccucuaaaggguguuuaagagucggggggagaugucacccucauguaaacgggguguucuucaaugguaucaucuuaggcccugacggccaugugcuaaucccggagaugcagucgucucuccuccagcagcauauggaguuauuggaauccucagucauccccuuaaugcaucccuuggcagauccaucaacaguuuuuaaagaugaugaugaggcggaagauuuuguugagguucaccucccagaugugcacaagcaggucucaggggucgaucucggucucccaagcugggggaaguauguguugaugugcgcaggcgucuugaccgcauuaauguugaugauuuucuuaaugacguguugucgaagggccaauagagcagaaucagcacaacacagucuuggagagagggggaggaaagugucgguaaccucccaaagcgggcggguuauauccucaugggagucauacaaaaguggaggugagaccaagcuguaa

SEQ ID NO: 62609 - RNA, 1575 nt, Artificial Sequence
  derived and/or modified CDS sequence (wt) from glycoprotein__RABV__AB563841.1
augauuccucaggcucuuuuguuuguaccccuucuggucuuuucauuguguuucggaaaauuucccaucuacacgauaccggacaaacuuggucccuggagccccauugauauacaucaucucagcuguccgaacaauuugguuguugaggaugaaggauguaccaaccugucagguuucucguacauggaacucaagguaggauacauuucagccaucaaagugaacggguucacuuguacggguguagugacagaagcagagaccuacaccaacuuuguuggcuaugucacuaccacguuuaagagaaagcacuuccgcccaacgccggaugccugcagagccgcauauaacuggaagauggcuggugaccccagauaugaagaaucucugcauaauccuuacccugauuaucauuggcuccgaacugugaagaccaccaaagaaucucuuguuaucauaucuccaaguguggcagauuuggacccauaugauaaaucccuucacucgagaguuuuuccuagcggaagaugcucaggcauaacggugucuucuaccuacugcucuacuaaccacgacuauaccaucuggaugccugagaauccuagacuagggaccucuugugacauuuucaccaauagcagagggaagagagcaucuaaagggagcaagaccuguggauuuguagaugagagaggccuguacaagucucugaaaggagcaugcaaacugaaacuaugugggguucugggacucagacuuauggauggaacaugggccgcgauccagacaucagaugagaccaaauggugcccuccugaucaguuagugaaccugcaugacuuucgcucggaugaaauugaacaucuuguuguggaggagcuggucaagaaaagggaagagugucuagaugcacuggaguccaucaugaccaccaagucugugaguuucagacgucucagucacuugaggaaacuugugcccggguuuggaaaagcauauaccauauucaauaaaaccuugauggaggcugaugcucacuacaaaucaguccggacuuggaaugagaucauccccucuaaaggguguuuaagagucggggggagaugucacccucaugugaacgggguguucuucaaugguaucaucuuaggcccugacggccaugugcuaaucccggagaugcagucgucucuccuccagcagcacauggaguuguuggaauccucagucaucccuuuaaugcaucccuuggcagauccaucaacaguuuuuaaagaugaugacgaggcggaagauuuuguugagguucaccuuccagaugugcacaagcaggucucaggggucgaucucggucuuccaagcugggggaaguauguguugaugagcgcaggcgucuugacugcauuaauguugaugauuuucuuaacgacguguuguagaagggccgauagagcagaaucagcgcaacacagucuuggagagagggggaggaaagugucgguaaccucccagagcgggcggguuauauccucaugggagucauacaaaaguggaggugagaccaagcuguaa

SEQ ID NO: 62610 - RNA, 1575 nt, Artificial Sequence
  derived and/or modified CDS sequence (wt) from glycoprotein__RABV__AB563842.1
augauuccucaagcucuuuuguuuguaccccuucuggucuuuucauuguguuucggaaaauuucccaucuacacgauaccggacaaacuuggucccuggagccccauugauauacaucaucucagcuguccgaacaauuugguuguggaggaugaaggauguaccaaccugucagguuucucguacauggaacucaagguaggauacauuucagccaucaaagugaacggguucacuuguacggguguagugacagaagcagagaccuacaccaacuuuguuggcuaugucacuaccacguuuaagagaaagcacuuccgcccaacgccggaugcaugcagagccgcauauaacuggaaaauggcuggugaccccagauaugaagaaucucugcauaauccuuacccugauuaucauuggcucagaacugugaagaccaccaaagaaucucuuguuaucauaucuccaaguguggcagauuuggacccauacgauaaaucccuucacucgagagucuucccuagcggaaaaugcucaggcauaacggugucuucuaccuacugcucuacuaaccacgacuauaccaucuggaugccugagaauccuagacuagggaccucuugugacauuuucaccaauagcagagggaagagggcauccaaagggagcaagaccuguggauuuguagaugaaagaggccuguacaagucucugaaaggagcaugcaaacugaaacugugugggguucugggacuuagacuuauggauggaacaugggccgcgauccagacaucagaugagaccaaauggugcccuccugaucaguuagugaaccuacaugacuuucgcucggaugaaauugaacaucuugucguggaggagcuggucaagaaaagggaagagugucuagaugcacuggaguccaucaugaccaccaagucugugaguuucagacgucucagucacuugaggaaacuugugcccggguuuggaaaagcauauaccauauuuaauaagaccuugauggaggcugaugcucacuacaaaucaguccggacuuggaaugagaucauccccucuaaaggguguuuaagaguaggggggagaugucacccucaugugaacgggguguucuucaaugguaucaucuuaggcccugacggccaugugcuaaucccggagaugcagucgucucuccuccagcagcauauggaguuguuggaauccucagucauccccuuaaugcaucccuuggcagauccaucaacaguuuuuaaagaugaugacgaggcggaagauuuuguugagguucaccuuccagaugugcacaagcaggucucaggggucgaucucggucucccaagcugggggaaguauguguugaugagcgcaggcgucuuaaccgcgcuaauguugaugauuuucuuaaugacguguuguagaagggccaauagagcagaaucagcacaacacagucuuagagagagggggaggaaagugucgguaaccucccaaagcgggcggguuaucuccucaugggagucauacaaaaguggaggugagaccaagcuguaa

SEQ ID NO: 62611 - RNA, 1575 nt, Artificial Sequence
  derived and/or modified CDS sequence (wt) from glycoprotein__RABV__AB563843.1
augauuccucaggcucuuuuguuuguaccccuucuggucuuuucauuguguuucggaaaauuucccaucuacacgauaccggacaaacuuggucccuggagccccauugauauacaucaucucagcuguccgaacaauuugguuguggaggaugaaggauguaccaaccugucagguuucucguacauggaacucaagguaggauacauuucagccaucaaagugaacggguucacuuguacggguguagugacagaagcagagaccuacaccaacuuuguuggcuaugucacuaccacguuuaagagaaagcacuuccgcccaacgccggaugcaugcagagccgcauauaacuggaagauggcuggugaccccagauaugaagaaucucugcauaauccuuacccugauuaucauuggcuccgaacugugaagaccaccaaagagucucuuguuaucauaucuccaaguguggcagauuuggacccauacgauaaaucccuucacucgagaguuuuuccuagcggaaagugcucaggcauaacggugucuucuaccuacugcucuacuaaccacgacuauaccaucuggaugccugagaauccuagacuagggaccucuugugacauuuucaccaauagcagagggaagagagcauccaaagggagcaagaccuguggauuuguagaugagagaggccuguacaagucucugaaaggagcaugcaaacugaaacugugugggguucugggacucagacuuauggauggaacaugggccgcgauccagacaucagaugagaccaaauggugcccuccugaucaguuagugaaccuacaugacuuucgcucggaugaaauugaacaucuugucguggaggagcuggucaagaaaagagaagagugucuagaugcacuggaguccaucaugaccaccaagucugugaguuucagacgucucagucacuugaggaaacuugugcccggguuuggaaaagcauauaccauauuuaauaagaccuugauggaggcugaugcucacuacaaaucaguccggacuuggaaugagaucauccccucuaaaggguguuuaagaguaggggggagaugucacccucaugugaacgggguguucuucaaugguaucaucuuaggcccugacggccaugugcuaaucccggagaugcagucgucucuccuccagcagcauauggaguuguuggaauccucagucauccccuuaaugcaucccuuggcagauccaucaacaguuuuuaaagaugaugacgaggcggaagauuuuguugagguucaccuuccagaugugcacaagcaggucucaggggucgaucucggucucccaagcugggggaaguauguguugaugagcgcaggcgucuugaccgcgcuaauguugaugauuuucuuaacgacguguuguagaagggccgauagagcagaaucagcacaacacagccuuggagagagggggaggaaagugucaguaaccucccaaagcgggcggguuauauccucaugggagucauacaaaaguggaggugagaccaagcuguaa

SEQ ID NO: 62612 - RNA, 1575 nt, Artificial Sequence
  derived and/or modified CDS sequence (wt) from glycoprotein__RABV__AB563844.1
augauuccucaagcucuuuuguuuguaccccuucuggucuuuucguuguguuucggaaaauuucccaucuacacgauaccggacaaacuuggucccuggagccccauugauauacaucaucucagcuguccgaacaauuugguuguggaggaugaaggauguaccaaccugucagguuucucguacauggaacucaagguaggauacauuucagccaucaaagugaacggguucacuuguacggguguagugacagaagcagagaccuacaccaacuuuguuggcuaugucacuaccacguuuaagagaaagcacuuccgcccaacgccggaugcaugcagagccgcauauaacuggaagauggcuggugaccccagauaugaagaaucucugcauaauccuuacccugauuaucauuggcucagaacugugaagaccaccaaagaaucucuuguuaucauaucuccaaguguggcagauuuggacccauacgauaaaucccuucacucgagagucuucccuagcggaaaaugcucaggcauaacggugucuucuaccuacugcucuacuaaccacgacuauaccaucuggaugccugagaauccuagacuagggaccucuugugacauuuucaccaauagcagagggaagagggcauccaaagggagcaagaccuguggauuuguagaugaaagaggccuguacaagucucugaaaggagcaugcaaacugaaacugugugggguucugggacucagacuuauggauggaacaugggccgcgauccagacuucagaugagaccaaauggugcccuccugaucaguuagugaaccuacaugacuuucgcucggaugaaauugaacaucuugucguggaggagcuggucaagaaaagggaagagugucuagaugcacuggaguccaucaugaccaccaagucugugaguuucagacgucucagucacuugaggaaacuugugcccggguuuggaaaagcauauaccauauuuaauaagacuuugauggaggcugaugcucacuacaaaucaguccggacuuggaaugagaucauccccucuaaaggguguuuaagaguaggggggagaugucacccucaugugaacgggguguucuucaaugguaucaucuuaggcccugacggccaugugcuaaucccggagaugcagucgucucuccuccagcagcauauggaguuguuggaauccucagucauccccuuaaugcaucccuuggcagauccaucaacaguuuuuaaagaugaugacgaggcggaagauuuuguugagguucaccuuccagaugugcacaagcaggucucaggggucgaucucggucucccaagcugggggaaguauguguugaugagcgcaggcgucuuaaccgcgcuaauguugaugauuuucuugaugacguguuguagaagggccaauagagcagaaucagcacaacacagucuuggagagagggggaggaaagugucgguaaccucccaaagcgggcggguuauauccucaugggagucauacaaaaguggaggugagaccaagcuguaa

SEQ ID NO: 62613 - RNA, 1575 nt, Artificial Sequence
  derived and/or modified CDS sequence (wt) from glycoprotein__RABV__AB563845.1
augaauccucaggcucuuauguuuguaccucuucuggucuuuucauuguguuuugggaaauuccccaucuacacgauaccggacaaacuuggucccuggagccccauugauauacaucaucucagcuguccgaacaauuugguuguugaggacgaaggauguaccaaccugucagguuucucauacauggaacucaaaguaggauacauuucagccaucaaagugaacggguucacuuguacggguguggugacagaagcagaaacuuacaccaacuuuguuggcuaugucacuaccacguuuaagagaaagcacuuccgcccgacgccggaugcaugcagagccgcauauaacuggaagauggcuggugacccuagauaugaagaaucucugcauaauccuuacccugauuaucauuggcuccggacugugaagaccaccaaagaaucucuuguuaucauaucuccaagcguggcagaucuagacccauaugacaaaucccuucacucgagaguuuuuccuagcggaaaaugcucaggcauaacagugucuucuaccuacugcucuacuaaccacgacuauaccaucuggaugccugagaauccuagacuagggaccucuugugacauuuucaccaauagcagagggaagagagcauccaaagggagcaagaccuguggauuuguagaugagagaggccuauacaagucucugaaaggagcaugcaaauugaagcuaugugggguucuaggacucagacuuauggauggaacaugggccgcgauccagacaucagaugagaccaaauggugcccuccugaucaguuagugaaccuacaugacuuucgcucggaugaaauugagcaucuuguuguggaggagcuagucaagaaaagggaagagugucuagaugcacuggaguccaucaugaccaccaaguccgugaguuucagacgucucagucacuugaggaaacuugugccuggguucggaaaagcauauaccauauucaauaagaccuugauggaggcugaugcucacuacaaaucaguccggacuuggaaugagaucauccccucuaaaggguguuugagagucggggggagaugucacccccaugugaacgggguguucuucaaugguaucauauuaggcccugacggccaugugcuaaucccggagaugcagucgucucuccuccagcagcauauggaguuguuggaauccucagucauccccuuaaugcaucccuuggcagauccaucaacgguuuuuaaagaugaugacgaggcggaagauuuuguugagguucaccuuccagaugugcacaagcaggucucagggguugaucucggucucccaagcugggggaaguauguguugaugagcgcaggaguccugaccgcacuaauguugaugauuuucuuaaugacguguugcagaagggccaauagagcagaaucagcacaacacagucuuggagagaggggaaggaaagugucgguaaccucccaaagcgggcggguuauauccucaugggagucauacaaaaguggaggugagaccaagcuguag

SEQ ID NO: 62614 - RNA, 1575 nt, Artificial Sequence
  derived and/or modified CDS sequence (wt) from glycoprotein__RABV__AB563846.1
augauuccucaggcucuuuuguuuguaccccuucuggucuuuucauuguguuucggaaaauuucccaucuacacgauaccggacaaacuuggucccuggagccccauugauauacaucaucucagcuguccgaacaauuugguuguggaggaugaaggauguaccaaccugucagguuucucguacauggaacucaagguaggauacauuucagccaucaaagugaacggguucacuuguacggguguagugacagaagcagagaccuacaccaacuuuguuggcuaugucacuaccacguuuaagagaaagcacuuccgcccaacgccggaugcaugcagagccgcauauaacuggaagauggcuggugaccccagauaugaagaaucucugcauaauccuuacccugauuaucauuggcuccgaacugugaagaccaccaaagagucucuuguuaucauaucuccaaguguggcagauuuggacccauacgauaaaucccuucacucgagaguuuuuccuagcggaaagugcucaggcauaacggugucuucuaccuacugcucuacuaaccacgacuauaccaucuggaugccugagaauccuagacuagggaccucuugugacauuuucaccaauagcagagggaagagagcauccaaagggagcaagaccuguggauuuguagaugagagaggccuguacaagucucugaaaggagcaugcaaacugaaacugugugggguucugggacucagacuuauggauggaacaugggccgcgauccagacaucagaugagaccaaauggugcccuccugaucaguuagugaaccuacaugacuuucgcucggaugaaauugaacaucuugucguggaggagcuggucaagaaaagagaagagugucuagaugcacuggaguccaucaugaccaccaagucugugaguuucagacgucucagucacuugaggaaacuugugcccggguuuggaaaagcauauaccauauuuaauaagaccuugauggaggcugaugcucacuacaaaucaguccggacuuggaaugagaucauccccucuaaaggguguuuaagaguaggggggagaugucacccucaugugaacgggguguucuucaaugguaucaucuuaggcccugacggccaugugcuaaucccggagaugcagucgucucuccuccagcagcauauggaguuguuggaauccucagucauccccuuaaugcaucccuuggcagauccaucaacaguuuuuaaagaugaugacgaggcggaagauuuuguugagguucaccuuccagaugugcacaagcaggucucaggggucgaucucggucucccaagcugggggaaguauguguugaugagcgcaggcgucuugaccgcgcuaauguugaugauuuucuuaacgacguguuguagaagggccaauagagcagaaucagcacaacacagccuuggagagagggggaggaaagugucaguaaccucccaaagcgggcggguuauauccucaugggagucauacaaaaguggaggugagaccaagcuguaa

SEQ ID NO: 62615 - RNA, 1575 nt, Artificial Sequence
  derived and/or modified CDS sequence (wt) from glycoprotein__RABV__AB563847.1
augauuccucaggcucuuuuguuuguaccccuucuggucuuuucauuguguuucggaaaauuucccaucuacacgauaccggacaaacuuggucccuggagccccauugauauacaucaucucagcuguccgaacaauuugguuguggaggaugaaggauguaccaaccugucagguuucucguacauggaacucaagguaggauacauuucagccaucaaagugaacggguucacuuguacagguguagugacagaagcagagaccuacaccaacuuuguuggcuaugucacuaccacguuuaagagaaagcacuuccgcccaacgccggaugcaugcagagccgcauauaacuggaagauggcuggugaccccagauaugaagaaucucugcauaauccuuacccugauuaucauuggcuccgaacugugaagaccaccaaagagucucuuguuaucauaucuccaaguguggcagauuuggacccauacgauaaaucccuucacucgagaguuuuuccuagcggaaagugcucaggcauaacggugucuucuaccuacugcucuacuaaccacgacuauaccaucuggaugccugagaauccuagacuagggaccucuugugacauuuucaccaauagcagagggaagagagcauccaaagggagcaagaccuguggauuuguagaugagagaggccuguacaagucucugaaaggagcaugcaaacugaaacugugugggguucugggacucagacuuauggauggaacaugggccgcgauccagacaucagaugagaccaaauggugcccuccugaucaguuagugaaccuacaugacuuucgcucggaugaaauugaacaucuugucguggaggagcuggucaagaaaagagaagagugucuagaugcacuggaguccaucaugaccaccaagucugugaguuucagacgucucagucacuugaggaaacuugugcccggguuuggaaaagcauauaccauauuuaauaagaccuugauggaggcugaugcucacuacaaaucaguccggacuuggaaugagaucauccccucuaaaggguguuuaagaguaggggggagaugucacccucaugugaacgggguguucuucaaugguaucaucuuaggcccugacggccaugugcuaaucccggagaugcagucgucucuccuccagcagcauauggaguuguuggaauccucagucauccccuuaaugcaucccuuggcagauccaucaacaguuuuuaaagaugaugacgaggcggaagauuuuguugagguucaccuuccagaugugcacaagcaggucucaggggucgaucucggucucccaagcugggggaaguauguguugaugagcgcaggcgucuugaccgcgcuaauguugaugauuuucuuaacgacguguuguagaagggccaauagagcagaaucagcacaacacagccuuggagagagggggaggaaagugucaguaaccucccaaagcgggcggguuauauccucaugggagucauacaaaaguggaggugagaccaagcuguaa

SEQ ID NO: 62616 - RNA, 1575 nt, Artificial Sequence
  derived and/or modified CDS sequence (wt) from glycoprotein__RABV__AB563848.1
augauuccucaagcucuuuuguuuguaccccuucuggucuuuucauuguguuucggaaaauuucccaucuacacgauaccggacaaacuuggucccuggagccccauugauauacaucaucucagcuguccgaacaauuugguuguggaggaugaaggauguaccaaccugucagguuucucguacauggaacucaagguaggauacauuucagccaucaaagugaacggguucacuuguacggguguagugacagaagcagagaccuacaccaacuuuguuggcuaugucacuaccacguuuaagagaaagcacuuccgcccaacgccggaugcaugcagagccgcauauaacuggaagauggcuggugaccccagauaugaagaaucucugcauaauccuuacccugauuaucauuggcucagaacugugaagaccaccaaagaaucucuuguuaucauaucuccaaguguggcagauuuggacccauacgauaaaucccuucacucgagagucuucccuagcggaaaaugcucaggcauaacggugucuucuaccuacugcucuacuaaccacgacuauaccaucuggaugccugagaauccuagacuagggaccucuugugacauuuucaccaauagcagagggaagagggcauccaaagggagcaagaccuguggauuuguagaugaaagaggccuguacaagucucugaaaggagcaugcaaacugaaacugugugggguucuaggacucagacuuauggauggaacaugggccgcgauccagacaucagaugagaccaaauggugcccuccugaucaguuagugaaccuacaugacuuucgcucggaugaaauugaacaucuugucguggaggagcuggucaagaaaagggaagagugucuagaugcacuggaguccaucaugaccaccaagucugugaguuucagacgucucagucacuugaggaaacuugugcccggguuuggaaaagcauauaccauauucaauaagaccuugauggaggcugaugcucacuacaaaucaguccggacuuggaacgagaucauccccucuaaaggguguuuaagagucggggggagaugucacccucaugugaacgggguguucuucaaugguaucaucuuaggcccugacggccaugugcuaaucccggagaugcagucgucucuccuccagcagcauauggaguuguuggaauccucagucauccccuugaugcaucccuuggcagauccaucaacaguuuuuaaagaugaugacgaggcggaagauuuuguugagguucaccuuccagaugugcacaagcaggucucaggggucgaucucggucucccaagcugggggaaguauguguugaugagcgcaggcgucuuaaccgcgcuaauguugacgauuuucuuaaugacguguuguagaagggccaauagagcagaaucagcacaacacagucuuggagagagggggaggaaagugucgguaaccucccaaagcgggcggguuauauccucaugggagucauacaaaaguggaggugagaccaagcuguaa

SEQ ID NO: 62617 - RNA, 1575 nt, Artificial Sequence
  derived and/or modified CDS sequence (wt) from glycoprotein__RABV__AB563849.1
augauuccucaggcucuuuuguuuguaccccuucuggucuuuucauuguguuucggaaaauuucccaucuacacgauaccggacaaacuuggucccuggagccccauugauauacaucaucucagcuguccgaacaauuugguuguggaggaugaaggauguaccaaccugucagguuucucguacauggaacucaagguaggauacauuucagccaucaaagugaacggguucacuuguacggguguggugacagaagcagagaccuacaccaacuuuguuggcuaugucacuaccacguuuaagagaaagcacuuccgcccaacgccggaugcaugcagagccgcauauaacuggaagauggcuggugaccccagauaugaagaaucucugcauaauccuuacccugauuaucauuggcuccgaacugugaagaccaccaaagaaucucuuguuaucauaucuccaaguguggcagauuuggacccauacgauaaaucccuucacucgagaguuuuuccuagcggaaaaugcucaggcauaacggugucuucuaccuacugcucuacuaaccacgacuauaccaucuggaugccugagaauccuagacuagggaccucgugugacauuuucaccaauagcagagggaagagagcauccaaagggagcaagaccuguggauuuguagaugagaggggccuguacaagucucugaaaggagcaugcaaacugaaacugugugggguucugggacucagacuuauggauggaacaugggccgcgauccagacaucagaugagaccaaauggugcccuccugaucaguuagugaaccuacaugacuuucgcucggaugaaauugaacaucuugucguggaggagcuggucaagaaaagggaagagugucuagaugcacuggaguccaucaugaccaccaagucugugaguuucagacgucucagucacuugaggaaacuugugcccggguuuggaaaagcauauaccauauuuaauaagaccuugauggaggcugaugcucacuacaaaucaguccggacuuggaaugagaucauccccucuaaaggguguuuaagaguaggggggagaugucacccucaugugaacgggguguucuucaaugguaucaucuuaggcccugacggccaugugcuaaucccggagaugcagucgucucuccuccagcagcauauggaguuguuggaauccucagucauccccuuaaugcaucccuuggcagauccaucaacaguuuuuaaagaugaugacgaggcggaagauuuuguugagguucaccuuccagaugugcacaagcaggucucaggggucgaucucggucucccaagcugggggaaguauguguugaugagcgcaggugucuugaccgcgcuaauguugaugauuuucuuaacgacguguuauagaagggccaauagagcagaaucagcacaacacagucuuggagagaaggggaggaaagugucgguaaccucccaaagcgggcggguuauauccucaugggagucauacaaaaguggaggugagaccaagcuguaa

SEQ ID NO: 62618 - RNA, 1575 nt, Artificial Sequence
  derived and/or modified CDS sequence (wt) from glycoprotein__RABV__AB563850.1
augauuccucaggcucuuuuguuuguaccccuucuggucuuuucauuguguuucggaaaauuucccaucuacacgauaccggacaaacuuggucccuggagccccauugauauacaucaucucagcuguccgaacaauuugguuguugaggaugaaggauguaccaaccugucagguuucucguacauggaacucaagguaggauacauuucagccaucaaagugaacggguucacuuguacggguguagugacagaagcagagaccuacaccaacuuuguuggcuaugucacuaccacguuuaagagaaagcacuuccgcccaacgccggaugcaugcagagccgcauauaacuggaagauggcuggugaccccagauaugaagaaucucugcauaauccuuacccugauuaucauuggcuccgaacugugaagaccaccaaagaaucucuuguuaucauaucuccaaguguggcagauuuggacccauaugauaaaucccuucacucgagaguuuuuccuagcggaaaaugcucaggcauaacggugucuucuaccuacugcucuacuaaccacgacuauaccaucuggaugccugagaauccuagacuagggaccucuugugacauuuucaccaauagcagagggaagagagcaucuaaagggagcaagaccuguggauuuguagaugagagaggccuguacaagucucugaaaggagcaugcaaacugaaacuaugugggguucugggacucagacuuauggauggaacaugggccgcgauccagacaucagaugagaccaaauggugcccuccugaucaguuagugaaccugcaugacuuucgcucggaugaaauugaacaucuuguuguggaggagcuggucaagaaaagggaagagugucuagaugcacuggaguccaucaugaccaccaagucugugaguuucagacgucucagucacuugaggaaacuugugcccggguuuggaaaagcauauaccauauucaauaaaaccuugauggaggcugaugcucacuacaaaucaguccggacuuggaaugagaucauccccucuaaaggguguuuaagagucggggggagaugucacccucaugugaacgggguguucuucaaugguaucaucuuaggcccugacggccaugugcuaaucccggagaugcagucgucucuccuccagcagcacauggaguuguuggaauccucagucaucccuuuaaugcaucccuuggcagauccaucaacaguuuuuaaagaugaugacgaggcggaagauuuuguugagguucaccuuccagaugugcacaagcaggucucaggggucgaucucggucuuccaagcugggggaaguauguguugaugagcgcaggcgucuugacugcauuaauguugaugauuuucuuaacgacguguuguagaagggccgauagagcagaaucagcgcaacacagucuuggagagagggggaggaaagugucgguaaccucccagagcgggcggguuauauccucaugggagucauacaaaaguggaggugagaccaagcuguaa

SEQ ID NO: 62619 - RNA, 1575 nt, Artificial Sequence
  derived and/or modified CDS sequence (wt) from glycoprotein__RABV__AB563851.1
augauuccucaagcucuuuuguuuguaccccuucuggucuuuucauuguguuucggaaaauuucccaucuacacgauaccggacaaacuuggucccuggagccccauugauauacaucaucucagcuguccgaacaauuugguuguggaggaugaaggauguaccaaccugucagguuucucguacauggaacucaagguaggauacauuucagccaucaaagugaacggguucacuuguacggguguagugacagaagcagagaccuacaccaacuuuguuggcuaugucacuaccacguuuaagagaaagcacuuccgcccaacgccggaugcaugcagagccgcauauaacuggaagauggcuggugaccccagauaugaagaaucucugcauaauccuuacccugauuaucauuggcucagaacugugaagaccaccaaagaaucucuuguuaucauaucuccaaguguggcagauuuggacccauacgauaaaucccuucacucgagagucuucccuagcggaaaaugcucaggcauaacggugucuucuaccuacugcucuacuaaccacgacuauaccaucuggaugccugagaauccuagacuagggaccucuugugacauuuucaccaauagcagagggaagagggcauccaaagggagcaagaccuguggauuuguagaugaaagaggccuguacaagucucugaaaggagcaugcaaacugaaacugugugggguucuaggacucagacuuauggauggaacaugggccgcgauccagacaucagaugagaccaaauggugcccuccugaucaguuagugaaccuacaugacuuucgcucggaugaaauugaacaucuugucguggaggagcuggucaagaaaagggaagagugucuagaugcacuggaguccaucaugaccaccaagucugugaguuucagacgucucagucacuugaggaaacuugugcccggguuuggaaaagcauauaccauauuuaauaagaccuugauggaggcugaugcucacuacaaaucaguccggacuuggaaugagaucauccccucuaaaggguguuuaagaguaggggggagaugucacccucaugugaacgggguguucuucaaugguaucaucuuaggcccugacggccaugugcuaaucccggagaugcagucgucucuccuccagcagcauauggaguuguuggaauccucagucauccccuugaugcaucccuuggcagauccaucaacaguuuuuaaagaugaugacgaggcggaagauuuuguugagguucaccuuccagaugugcacaagcaggucucaggggucgaucucggucucccaagcugggggaaguauguguugaugagcgcaggcgucuuaaccgcgcuaauguugacgauuuucuuaaugacguguuguagaagggccaauagagcagaaucagcacaacacagucuuggagagagggggaggaaagugucgguaaccucccaaagcgggcggguuauauccucaugggagucauacaaaaguggaggugagaccaagcuguaa

SEQ ID NO: 62620 - RNA, 1575 nt, Artificial Sequence
  derived and/or modified CDS sequence (wt) from glycoprotein__RABV__AB563852.1
augaauccucaggcucuuauguuuguaccucuucuggucuuuucauuguguuuugggaaauuccccaucuacacgauaccggacaaacuuggucccuggagccccauugauauacaucaucucagcuguccgaacaauuugguuguugaggacgaaggauguaccaaccugucagguuucucauacauggaacucaaaguaggauacauuucagccaucaaagugaacggguucacuuguacggguguggugacagaagcagaaacuuacaccaacuuuguuggcuaugucacuaccacguuuaagagaaagcacuuccgcccgacgccggaugcaugcagagccgcauauaacuggaagauggcuggugacccuagauaugaagaaucucugcauaauccuuacccugauuaucauuggcuccggacugugaagaccaccaaagaaucucuuguuaucauaucuccaagcguggcagaucuagacccauaugacaaaucccuucacucgagaguuuuuccuagcggaaaaugcucaggcauaacagugucuucuaccuacugcucuacuaaccacgacuauaccaucuggaugccugagaauccuagacuagggaccucuugugacaccuucaccaauagcagagggaagagagcauccaaagggagcaagaccuguggauuuguagaugagagaggccuauacaagucucugaaaggagcaugcaaauugaagcuaugugggguucuaggacucagacuuauggauggaacaugggccgcgauccagacaucagaugagaccaaauggugcccuccugaucaguuagugaaccuacaugacuuucgcucggaugaaauugagcaucuuguuguggaggagcuagucaagaaaagggaagagugucuagaugcacuggaguccaucaugaccaccaaguccgugaguuucagacgucucagucacuugaggaaacuugugccuggguucggaaaagcauauaccauauucaauaagaccuugauggaggcugaugcucacuacaaaucaguccggacuuggaaugagaucauccccucuaaaggguguuugagagucggggggagaugucacccccaugugaacgggguguucuucaaugguaucauauuaggcccugacggccaugugcuaaucccggagaugcagucgucucuccuccagcagcauauggaguuguuggaauccucagucauccccuuaaugcaucccuuggcagauccaucaacgguuuuuaaagaugaugacgaggcggaagauuuuguugagguucaccuuccagaugugcacaagcaggucucagggguugaucucggucucccaagcugggggaaguauguguugaugagcgcaggaguccugaccgcacuaauguugaugauuuucuuaaugacguguugcagaagggccaauagagcagaaucagcacaacacagucuuggagagaggggaaggaaagugucgguaaccucccaaagcgggcggguuauauccucaugggagucauacaaaaguggaggugagaccaagcuguag

SEQ ID NO: 62621 - RNA, 1575 nt, Artificial Sequence
  derived and/or modified CDS sequence (wt) from glycoprotein__RABV__AB563854.1
augauuccucaggcucuuauguuuguaccucuucuggucuuuucauuguguuucgggaaauuccccauuuacacgauaccggacaaacuuggucccuggagccccauugauauacaucaucucagcuguccgaacaauuugguuguggaggacgaaggauguaccaaccugucaggguucucauacauggaacucaaaguaggauacauuucagccaucaaagugaacggguucacuuguacggguguggugacagaagcagaaacuuacaccaacuuuguuggcuaugucacuaccacguuuaagagaaagcacuuccgcccgacaccggaugcaugcagagccgcauauaacuggaagauggcuggugacccuagauaugaagaaucucugcauaauccuuacccugauuaucauuggcuccggacugugaagaccaccaaagaaucucuuguuaucauaucuccaaguguggcagaucuggacccauacgacaaaucccuucacucgagaguuuuuccuagcggaaaaugcucaggcauaacggugucuucuaccuacugcucuacuaaccacgacuauaccaucuggaugccugagaauccuagacuagggaccucuugugacauuuucaccaauagcagagggaagagagcauccaaagggagcaagaccuguggauuuguagaugagagaggcuuauacaaaucucugaaaggagcaugcaaauugaaacuaugugggguucuaggacucagacuuauggauggaacaugggccgcgauccagacaucagaugagaccaaauggugcccuccugaucaguuagugaaccuacaugacuuucgcucggaugaaauugagcaucuuguuguggaggagcuggucaagaaaagggaagagugucuagaugcacuggaauccaucaugaccaccaaguccgugaguuucagacgucucagucacuugaggaaacuugugccuggguucggaaaagcauauaccauauucaauaagaccuugauggaggcugaugcucacuacaaaucaguccggacuuggaaugagaucauccccucuaaaggguguuugagagucggggggagaugucacccccaugugaacgggguguucuucaaugguaucaucuuaggcccugacggccaugugcugaucccggagaugcagucgucucuccuccagcagcauauggaguuguuggaauccucagucauccccuuaaugcaucccuuggcagauccaucaacaguuuuuaaagaugaugacgaggcggaagauuuuguugagguucaccuuccagaugugcacaagcaggucucagggguugaucucggucucccaagcugggggaaguauguguugaugagcgcaggaguccugaccgcacuaauguugaugauuuucuuaaugacguguugcagaagggccaauagagcagaaucagcacaacacagucuuggagagaggggaaggaaagugucgguaaccucccaaagcgggcguguuauauccucaugggagucauacaaaaguggaggugagaccaagcuguag

SEQ ID NO: 62622 - RNA, 1575 nt, Artificial Sequence
  derived and/or modified CDS sequence (wt) from glycoprotein__RABV__AB563855.1
augaauccucaggcucuuauguuuguaccucuucuggucuuuucauuguguuucgggaaauuccccaucuacacgauaccggacaaacuuggucccuggagccccauugauauacaucaucucagcuguccgaacaauuugguuguggaggacgaaggauguaccaaccugucagguuucucauacauggaacucaaaguaggauacauuucagccaucaaagugaacggguucacuuguacggguguggugacagaagcagaaacuuacaccaacuuuguuggcuaugucacuaccacguuuaagagaaagcacuuccgcccgacgccggaugcaugcagagccgcauauaacuggaagauggcuggugacccuagauaugaagaaucucugcauaauccuuacccugauuaucauuggcuccggacugugaagaccaccaaagaaucucuuguuaucauaucuccaaguguggcagaucuggacccauaugacaaaucccuucacucgagaguuuuuccuagcggaaaaugcucaggcauaacagugucuucuaccuacugcucuacuaaccacgacuauaccaucuggaugccugagaauccuagacuagggaccucuugugacauuuucaccaauagcagagggaagagagcauccaaagggagcaagaccuguggauuuguagaugagagaggccuauacaagucucugaaaggagcaugcaaauugaaacuaugugggguucuaggacucagacuuauggauggaacaugggccgcgauccagacaucagaugagaccaaauggugcccuccugaucaguuagugaaccuacaugacuuucgcucggaugaaauugagcaucuuguuguagaggagcuggucaagaaaagggaagagugucuagaugcacuggaguccaucaugaccaccaagucugugaguuucagacgucucagucacuugaggaaacuugugccuggguucggaaaagcauauaccauauucaauaagaccuugauggaggcugaugcucacuacaaaucaguccggacuuggaaugagaucauccccucuaaaggguguuugagagucggggggagaugucacccccaugugaacgggguguucuucaaugguaucauauuaggcccugacggccaugugcuaaucccggagaugcagucgucucuccuccagcagcauauggaguuguuggaauccucagucauccccuuaaugcaucccuuggcagauccaucaacaguuuuuaaagaugaugacgaggcggaagauuuuguugagguucaccuuccagaugugcacaagcaggucucagggguugaucucggucucccaagcugggggaaguauguguugaugagcgcaggaguccugaccgcacuaauguugaugauuuucuuaaugacguguugcagaagggccaauagagcagaaucagcacaacacagucuuggggagaggggaaggaaagugucgguaaccucccaaagcgggcggguuauauccucaugggagucauacaaaaguggaggugagaccaagcuguag

SEQ ID NO: 62623 - RNA, 1575 nt, Artificial Sequence
  derived and/or modified CDS sequence (wt) from glycoprotein__RABV__AB563856.1
augaauccucaggcucuuauguuuguaccucuucuggucuuuucauuguguuuugggaaauuccccaucuacacgauaccggacaaacuuggucccuggagccccauugauauacaucaucucagcuguccgaacaauuugguuguugaggacgaaggauguaccaaccugucagguuucucauacauggaacucaaaguaggauacauuucagccaucaaagugaacggguucacuuguacggguguggugacagaagcagaaacuuacaccaacuuuguuggcuaugucacuaccacguuuaagagaaagcacuuccgcccgacgccggaugcaugcagagccgcauauaacuggaagauggcuggugacccuagauaugaagaaucucugcauaauccuuacccugauuaucauuggcuccggacugugaagaccaccaaagaaucucuuguuaucauaucuccaagcguggcagaucuagacccauaugacaaaucccuucacucgagaguuuuuccuagcggaaaaugcucaggcauaacagugucuucuaccuacugcucuacuaaccacgacuauaccaucuggaugccugagaauccuagacuagggaccucuugugacauuuucaccaauagcagagggaagagagcauccaaagggagcaagaccuguggauucguagaugagagaggccuauacaagucucugaaaggagcaugcaaauugaagcuaugugggguucuaggacucagacuuauggauggaacaugggccgcgauccagacaucagaugagaccaaauggugcccuccugaucaguuagugaaccuacaugacuuucgcucggaugaaauugagcaucuuguuguggaggagcuagucaagaaaagggaagagugucuagaugcacuggaguccaucaugaccaccaaguccgugaguuucagacgucucagucacuugaggaaacuugugccuggguucggaaaagcauauaccauauucaauaagaccuugauggaggcugaugcucacuacaaaucaguccggacuuggaaugagaucauccccucuaaaggguguuugagagucggggggagaugucacccccaugugaacgggguguucuucaaugguaucauauuaggcccugacggccaugugcuaaucccggagaugcagucgucucuccuccagcagcauauggaguuguuggaauccucagucauccccuuaaugcaucccuuggcagauccaucaacgguuuuuaaagaugaugacgaggcggaagauuuuguugagguucaccuuccagaugugcacaagcaggucucagggguugaucucggucucccaagcugggggaaguauguguugaugagcgcaggaguccugaccgcacuaauguugaugauuuucuuaaugacguguugcagaagggccaauagagcagaaucagcacaacacagucuuggagagaggggaaggaaagugucgguaaccucccaaagcgggcggguuauauccucaugggagucauacaaaaguggaggugagaccaagcuguag

SEQ ID NO: 62624 - RNA, 1575 nt, Artificial Sequence
  derived and/or modified CDS sequence (wt) from glycoprotein__RABV__AB563857.1
augaauccucaggcucuuauguuuguaccucuucuggucuuuucauuguguuucgggaaauuccccaucuacacgauaccggacaaacuuggucccuggagccccauugauauacaucaucucagcuguccgaacaauuugguuguggaggacgaaggauguaccaaccugucagguuucucauacauggaacucaaaguaggauacauuucagccaucaaagugaacggguucacuuguacggguguggugacagaagcagaaacuuacaccaacuuuguuggcuaugucacuaccacguuuaagagaaagcacuuccgcccgacgccggaugcaugcagagccgcauauaacuggaagauggcuggugacccuagauaugaagaaucucugcauaauccuuacccugauuaucauuggcuccggacugugaagaccaccaaagaaucucuuguuaucauaucuccaaguguggcagaucuggacccauacgacaaaucccuucacucgagaguuuuuccuagcggaaaaugcucaggcauaacagugucuucuaccuacugcucuacuaaccacgacuauaccaucuggaugccugagaauccuagacuagggaccucuugugacauccucaccaauagcagagggaagagagcauccaaagggagcaagaccuguggauuuguagaugagagaggccuauacaagucucugaaaggagcaugcaaauugaaacuaugugggguucuaggacucagacuuauggauggaacaugggccgcgauccagacaucagaugagaccaaauggugcccuccugaucaguuagugaaccuacaugacuuucgcucggaugaaauugagcaucuuguuguggaggagcuggucaagaaaagggaagagugucuagaugcacuggaguccaucaugaccaccaaguccgugaguuucagacgucucagucacuugaggaaacuugugccuggguucggaaaagcauauaccauauucaauaagaccuugauggaggcugaugcucacuacaaaucaguccggacuuggaaugagaucauccccucuaaaggguguuugagagucggggggagaugucacccccaugugaacgggguguucuucaaugguaucauauuaggcccugacggccaugugcugaucccggagaugcagucgucucuccuccagcagcauauggaguuguuggaauccucagucauccccuuaaugcaucccuuggcagauccaucaacaguuuuuaaagaugaugacgaggcggaagauuuuguugagguucaccuuccagaugugcacaagcaggucucagggguugaucucggucucccaagcugggggaaguauguguugaugagugcaggaguccugaccgcacuaauguugaugauuuucuuaaugacguguugcagaagggccaauagagcagaaucagcacaacacagucuuggagagaggggaaggaaagugucgguaaccucccaaagcgggcggguuauauccucaugggagucauacaaaaguggaggugagaccaagcuguag

SEQ ID NO: 62625 - RNA, 1575 nt, Artificial Sequence
  derived and/or modified CDS sequence (wt) from glycoprotein__RABV__AB563860.2
augauuccucaggcucuuuuguuuguaccccuucuggucuuuucauuguguuucggaaaauuucccaucuacacgauaccggacaaacuuggucccuggagccccauugauauacaucaucucagcuguccgaacaauuugguuguggaggaugaaggauguaccaaccugucagguuucucguacauggaacucaagguaggauacauuucagccaucaaagugaacggguucacuuguacggguguagugacagaagcagagaccuacaccaacuuuguuggcuaugucacuaccacguuuaagagaaagcacuuccgcccaacgccggaugcaugcagagccgcauauaacuggaagauggcuggugaccccagauaugaagaaucucugcauaauccuuacccugauuaucauuggcuccgaacugugaagaccaccaaagaaucucuuguuaucauaucuccaaguguggcagauuuggacccauacgauaaaucccuucacucgagaguuuuuccuagcggaaaaugcucaggcauaacggugucuucuaccuacugcuccacuaaccaugacuauaccaucuggaugccugagaauccuagacuagggaccucuugugacauuuucaccaacagcagagggaagagagcaucaaaagggagcaagaccuguggauuuguagaugagagaggccuguacaagucucugaaaggagcaugcaaauugaaacuaugugggguucugggacucagacuuauggauggaacaugggccgcgauccagacaucagaugagaccaaauggugcccuccugaucaguuagugaaccuacaugacuuucgcucggaugaaauugaacaucuuguuguggaggagcuggucaagaaaagggaagagugucuagaugcacuggaguccaucaugaccacaaagucugugaguuucagacgucucagucacuugaggaaacuuguacccggguuuggaaaagcauauaccauauucaauaagaccuugauggaggcugaugcucacuacaaaucaguccggacuuggaaugagaucauccccucuaaaggguguuuaagagucggggggagaugucacccucauguaaacgggguguucuucaaugguaucaucuuaggcccugacggccaugugcuaaucccggagaugcagucgucucuccuccagcagcauauggaguuauuggaauccucagucauccccuuaaugcaucccuuggcagauccaucaacaguuuuuaaagaugaugacgaggcggaagauuuuguugagguucaccuuccagaugugcacaagcaggucucaggugucgaucucggucucccaagcugggggaaguauguguugaugagcgcaggcgucuugaccgcauuaauguugaugauuuucuuaaugacguguugucgaagggccaauagagcagaaucagcacaacacagucuuggagagagggggaggaaagugucgguaaccucccagagcgggcggguuauauccucaugggaaucauacaaaaguggaggugagaccaagcuguaa

SEQ ID NO: 62626 - RNA, 1575 nt, Artificial Sequence
  derived and/or modified CDS sequence (wt) from glycoprotein__RABV__AB563861.1
augauuccucaggcucuuuuguuuguaccccuucuggucuuuucauuguguuucggaaaauuucccaucuacacgauaccggacaaacuuggucccuggagccccauugauauacaucaucucagcuguccgaacaauuugguuguggaggaugaaggauguaccaaccugucagguuucucguacauggaacucaagguaggauacauuucagccaucaaagugaacggguucacuuguacggguguagugacagaagcagagaccuacaccaacuuuguuggcuaugucacuaccacguuuaagagaaagcacuuccgcccaacgccggaugcaugcagagccgcauauaacuggaagauggcuggugaccccagauaugaagaaucucugcauaauccuuacccugauuaucauuggcuccgaacugugaagaccaccaaggaaucucuuguuaucauaucuccaaguguggcagauuuggacccauacgauaaaucccuucacucgagaguuuuuccuagcggaaaaugcucaggcauaacggugucuucuaccuacugcuccacuaaccacgacuauaccaucuggaugccugagaauccuagacuagggaccucuugugacauuuucaccaacagcagagggaagagagcaucaaaagggagcaagaccuguggauuuguagaugagagaggccuguacaagucucugaaaggagcaugcaaacugaaacuaugugggguucugggacucagacuuauggauggaacaugggccgcgauccagacaucagaugagaccaaauggugcccuccugaucaguuagugaaccuccaugacuuucgcucggaugaaauugaacaucuuguuguggaggagcuggucaagaaaagggaagagugucuagaugcacuggaguccaucaugaccacaaagucugugaguuucagacgucucagucacuugaggaaacuugugcccggguuuggaaaagcauauaccauauucaauaagaccuugauggaggcugaugcucacuacaaaucaguccggacuuggaaugagaucauccccucuaaaggguguuuaagagucggggggagaugucacccucauguaaacgggguguucuucaaugguaucaucuuaggcccugacggccaugugcuaaucccggagaugcagucgucucuccuccagcagcauauggaguuauuggaauccucagucauccccuuaaugcaucccuuggcagauccaucaacaguuuuuaaagaugaugacgaggcggaagauuuuguugagguucaccuuccagaugugcacaagcaggucucaggggucgaucucggucucccaagcugggggaaguauguguugaugagcgcaggcgucuugaccgcauuaauguugaugauuuucuuaaugacguguugucgaagggccaauagagcagaaucagcacaacacagucuuggagagagggggaggaaagugucgguaaccucccaaagcgggcggguuauauccucaugggagucauacaaaaguggaggugagaccaagcuguaa

SEQ ID NO: 62627 - RNA, 1575 nt, Artificial Sequence
  derived and/or modified CDS sequence (wt) from glycoprotein__RABV__AB563862.1
augauuccucaggcucuuuuguuuguaccccuucuggucuuuucauuguguuucggaaaauuucccaucuacacgauaccggacaaacuuggucccuggagccccauugauauacaucaucucagcuguccgaacaauuugguuguggaggaugaaggauguaccaaccugucagguuucucguacauggaacucaagguaggauacauuucagccaucaaagugaacggguucacuuguacggguguagugacagaagcagagaccuacaccaacuuuguuggcuaugucacuaccacguucaagagaaagcacuuccgcccaacgccggaugcaugcagagccgcauauaacuggaagaugucuggugaccccagauaugaagaaucucugcauaauccuuacccugauuaucauuggcuccgaacugugaagaccaccaaagaaucucuuguuaucauaucuccuaguguggcagauuuggacccauacgauaaaucccuucacucgagaguuuuuccuagcggaaaaugcucaggcauaacggugucuucuaccuacugcuccacuaaccacgacuauaccaucuggaugccugagaauccuagacuagggaccucuugugacauuuucaccaacagcagagggaagagagcaucaaaagggagcaagaccuguggauuuguagaugagagaggccuguacaagucucugaaaggagcaugcaaacugaaacuaugugggguucugggacucagacuuauggauggaacaugggccgcgauccagacaucagaugagaccaaauggugcccuccugaucaguuagugaaccuacaugacuuucgcucggaugaaaucgaacaucuuguuguggaggagcuggucaagaaaagggaagagugucuagaugcacuggaguccaucaugaccacaaagucugugaguuucagacgucucagucacuugaggaaacuugugcccggguuuggaaaagcauauaccauauucaauaagaccuugauggaggcugaugcucacuacaaaucaguccggacuuggaaugagaucauccccucuaaaggguguuuaagagucggggggagaugucacccucauguaaacgggguguucuucaaugguaucaucuuaggcccugacggccaugugcuaaucccggagaugcagucgucucuccuccagcagcauauggaguuauuggaauccucagucauccccuuaaugcaucccuuggcagauccaucaacaguuuuuaaagaugaugacgaggcggaagauuuuguugagguucaccuuccagaugugcacaagcaggucucaggggucgaucucggucucccaagcugggggaaguauguguugaugagcgcaggcgucuugaccgcauuaauguugaugauuuucuuaaugacguguugucgaagggccaauagaacagaaucagcacaacacagucuuggagagagggggaggaaagugucgguaaccucccaaagcgggcggguuauauccucaugggagucauacaaaaguggaggugagaccaagcuguaa

SEQ ID NO: 62628 - RNA, 1575 nt, Artificial Sequence
  derived and/or modified CDS sequence (wt) from glycoprotein__RABV__AB563863.1
augauuccucaggcucuuuuguuuguaccccuucuggucuuuucauuguguuucggaaaauuucccaucuacacgauaccggacaaacuuggucccuggagccccauugauauacaucaucucagcuguccgaacaauuugguuguggaggaugaaggauguaccaaccugucagguuucucguacauggaacucaagguaggauacauuucagccaucaaagugaacggguucacuuguacggguguggugacagaagcagagaccuacaccaacuuuguuggcuaugucacuaccacguuuaagagaaagcacuuccgcccaacgccggaugcaugcagagccgcauauaacuggaagauggcuggugaccccagauaugaagaaucucugcauaauccuuacccugauuaucauuggcuccgaacugugaagaccaccaaagaaucucuuguuaucauaucuccaaguguggcagaucuggacccauacgauaaaucccuucacucgagaguuuuuccuagcggaaaaugcucaggcauaacggugucuucuaccuacugcucuacuaaccacgacuauaccaucuggaugccugagaauccuagacuagggaccucgugugacauuuucaccaauagcagagggaagagagcauccaaagggagcaagaccuguggauuuguagaugagagaggccuguacaagucucugaaaggagcaugcaaacugaaacugugugggguucugggacucagacuuauggauggaacaugggccgcgauccagacaucagaugagaccaaauggugcccuccugaucaguuagugaaccuacaugacuuucgcucggaugaaauugaacaucuugucguggaggagcuggucaagaaaagggaagagugucuagaugcacuggaguccaucaugaccaccaagucugugaguuucagacgucucagucacuugaggaaacuugugcccggguuuggaaaagcauauaccauauuuaauaagaccuugauggaggcugaugcucacuacaaaucaguccggacuuggaaugagaucauccccucuaaaggguguuuaagaguaggggggagaugucacccucaugugaacgggguguucuucaaugguaucaucuuaggcccugacggccaugugcuaaucccggagaugcagucgucucuccuccagcagcauauggaguuguuggaauccucagucauccccuuaaugcaucccuuggcagauccaucaacaguuuuuaaagaugaugacgaggcggaagauuuuguugagguucaccuuccagaugugcacaagcaggucucaggggucgaucucggucuccccagcugggggaaguauguguugaugagcgcaggugucuugaccgcgcuaauguugaugauuuucuuaaugacguguuguagaagggccaauagagcagaaucagcacaacacagucuuggagagaaggggaggaaagugucgguaaccucccaaagcgggcggguuauauccucaugggagucauacaaaaguggaggugagaccaagcuguaa

SEQ ID NO: 62629 - RNA, 1575 nt, Artificial Sequence
  derived and/or modified CDS sequence (wt) from glycoprotein__RABV__AB563864.1
augauuccucaggcucuuuuguuuguaccccuucuggucuuuucauuguguuucggaaaauuucccaucuacacgauaccggacaaacuuggucccuggagccccauugauauacaucaucucagcuguccgaacaauuugguuguggaggaugaaggauguaccaaccugucagguuucucguacauggaacucaagguaggauacauuucagccaucaaagugaacggguucacuuguacggguguagugacagaagcagagaccuacaccaacuuuguuggcuaugucacuaccacguuuaagagaaagcacuuccgcccaacgccggaugcaugcagagccgcauauaacuggaagauggcuggugaccccagauaugaagaaucucugcauaauccuuacccugauuaucauuggcuccgaacugugaagaccaccaaagagucucuuguuaucauaucuccaaguguggcagauuuggacccauacgauaaaucccuucacucgagaguuuuuccuagcggaaagugcucaggcauaacggugucuucuaccuacugcucuacuaaccacgacuauaccaucuggaugccugagaauccuagacuagggaccucuugugacauuuucaccaauagcagagggaagagagcauccaaagggagcaagaccuguggauuuguagaugagagaggccuguacaagucucugaaaggagcaugcaaacugaaacugugugggguucugggacucagacuuauagauggaacaugggccgcgauccagacaucagaugagaccaaauggugcccuccugaucaguuagugaaccuacaugacuuucgcucggaugaaauugaacaucuugucguggaggagcuggucaagaaaagagaagagugucuagaugcacuggaguccaucaugaccaccaagucugugaguuucagacgucucagucacuugaggaaacuugugcccggguuuggaaaagcauauaccauauuuaauaagaccuugauggaggcugaugcucacuacaaaucaguccggacuuggaaugagaucauccccucuaaaggguguuuaagaguaggggggagaugucacccucaugugaacgggguguucuucaaugguaucaucuuaggcccugacggccaugugcuaaucccggagaugcagucgucucuccuccagcagcauauggaguuguuggaauccucagucauccccuuaaugcaucccuuggcagauccaucaacaguuuuuaaagaugaugacgaggcggaagauuuuguugagguucaccuuccagaugugcacaagcaggucucaggggucgaucucggucucccaagcugggggaaguauguguugaugagcgcaggcgucuugaccgcgcuaauguugaugauuuucuuaacgacguguuguagaagggccaauagagcagaaucagcacaacacagccuuggagagagggggaggaaagugucagcaaccucccaaagcgggcggguuauauccucaugggagucauacaaaaguggaggugagaccaagcuguaa

SEQ ID NO: 62630 - RNA, 1575 nt, Artificial Sequence
  derived and/or modified CDS sequence (wt) from glycoprotein__RABV__AB563865.1
augauuccucaggcucuuuuguuuguaccccuucuggucuuuucauuguguuucggaaaauuuccuaucuacacaauaccggacaaacuuggucccuggagccccauugacauacaucaucucagcuguccgaacaauuugguuguggaggaugaaggauguaccaaccugucagguuucucguacauggaacucaagguaggauacauuucagccaucaaagugagcggguucacuuguacggguguagugacggaagcagagaccuacaccaacuuuguuggcuaugucacuaccacguuuaagagaaagcacuuccgcccaacgccggaugcaugcagagccgcauauaacuggaagauggcuggugaccccagauaugaagaaucucugcauaauccuuacccugauuaucauuggcuccgaacugugaagaccaccaaagagucucucguuaucauaucuccaaguguggcagauuuggacccauacgauaaaucccuucacucgagaguuuuuccuagcggaaaaugcucaggcauaacggugucuucuaccuacugcuccacuaaccacgacuauaccaucuggaugccugagaauccuagacuagggaccucuugugacauuuucaccaauagcagagggaagagagcauccaaagggagcaagaccuguggauuuguagaugagagaggccuguacaagucucugaaaggagcaugcaaacugaaacuaugugggguucuggggcucagacuuauggauggaacaugggccgcgauccagacaucagaugagaccaaauggugcccuccugaucaguuagugaaccuacaugacuuucgcucggaugaaauugaacaucuuguuguggaggagcuggucaagaaaagggaagagugucuagaugcacuggaguccaucaugaccaccaagucugugaguuucagacgucucagucacuugaggaaacuugugcccggguuuggaaaagcauauaccauauucaauaagaccuugauggaggcugaugcucacuacaaaucaguccggacuuggaaugagaucauccccucuaaaggguguuuaagagucggggggagaugucacccucaugugaacgggguguucuucaaugguaucaucuuaggcccggacggccaugugcuaaucccggagaugcagucgucucuccuccagcagcauauggaguuauuggaauccucagucauccccuuaaugcaucccuuggcagauccaucaacaguuuuuaaagaugaugacgaggcggaagauuuuguugagguucaccuuccagaugugcacaagcaggucucaggggucgaucucggucucccaagcugggggaaguauguguugaugagcgcaggcgccuugaccgcauuaauguugaugauuuucuuaaugacguguuguagaagggccaauagagcagaaucagcacaacacagucuuggagagggggggaggaaagugucgguaaccucccaaagugggcggguuauauccucaugggagucauacaaaaguggaggugagaccaagcuguaa

SEQ ID NO: 62631 - RNA, 1575 nt, Artificial Sequence
  derived and/or modified CDS sequence (wt) from glycoprotein__RABV__AB563867.1
augauuccucaggcucuuuuguuuguaccccuucuggucuuuucauuguguuucggaaaauuuccuaucuacacaauaccggacaaacuuggucccuggagccccauugacauacaucaucucagcuguccgaacaauuugguuguggaggaugaaggauguaccaaccugucagguuucucguacauggaacucaagguaggauacauuucagccaucaaagugagcggguucacuuguacggguguagugacggaagcagagaccuacaccaacuuuguuggcuaugucacuaccacguuuaagagaaagcacuuccgcccaacgccggaugcaugcagagccgcauauaacuggaagauggcuggugaccccagauaugaagaaucucugcauaauccuuacccugauuaucauuggcuccgaacugugaagaccaccaaagagucucucguuaucauaucuccaaguguggcagauuuggacccauacgauaaaucccuucacucgagaguuuuuccuagcggaaaaugcucaggcauaacggugucuucuaccuacugcuccacuaaccacgacuauaccaucuggaugccugagaauccuagacuagggaccucuugugacauuuucaccaauagcagagggaagagagcauccaaagggagcaagaccuguggauuuguagaugagagaggccuguacaagucucugaaaggagcaugcaaacugaaacuaugugggguucuggggcucagacuuauggauggaacaugggccgcgauccagacaucagaugagaccaaauggugcccuccugaucaguuagugaaccuacaugacuuucgcucggaugaaauugaacaucuuguuguggaggagcuggucaagaaaagggaagagugucuagaugcacuggaguccaucaugaccaccaagucugugaguuucagacgucucagucacuugaggaaacuugugcccggguuuggaaaagcauauaccauauucaauaagaccuugauggaggcugaugcucacuacaaaucaguccggacuuggaaugagaucauccccucuaaaggguguuuaagagucggggggagaugucacccucaugugaacgggguguucuucaaugguaucaucuuaggcccggacggccaugugcuaaucccggagaugcagucgucucuccuccagcagcauauggaguuauuggaauccucagucauccccuuaaugcaucccuuggcagauccaucaacaguuuuuaaagaugaugacgaggcggaagauuuuguugagguucaccuuccagaugugcacaagcaggucucaggggucgaucucggucucccaagcugggggaaguauguguugaugagcgcaggcgccuugaccgcauuaauguugaugauuuucuuaaugacguguuguagaaaggccaauagagcagaaucagcacaacacagucuuggagagggggggaggaaagugucgguaaccucccaaagugggcggguuauauccucaugggagucauacaaaaguggaggugagaccaagcuguaa

SEQ ID NO: 62632 - RNA, 1575 nt, Artificial Sequence
  derived and/or modified CDS sequence (wt) from glycoprotein__RABV__AB563870.1
augauuccucaagcucuuuuguuuguaccccuucuggucuuuucauuguguuucggaaaauuucccaucuacacgauaccggacaaacuuggucccuggagccccauugauauacaucaucucagcuguccgaacaauuugguuguggaggaugaaggauguaccaaccugucagguuucucguacauggaacucaagguaggauacauuucagccaucaaagugaacggguucacuuguacggguguagugacagaagcagagaccuacaccaacuuuguuggcuaugucacuaccacguuuaagagaaagcacuuccgcccaacgccggaugcaugcagagccgcauauaacuggaagauggcuggugaccccagauaugaagaaucucugcauaauccuuacccugauuaucauuggcucagaacugugaagaccaccaaagaaucucuuguuaucauaucuccaaguguggcagauuuggacccauacgauaaaucccuucacucgagagucuucccuagcggaaaaugcucaggcauaacggugucuucuaccuacugcucuacuaaccacgacuauaccaucuggaugccugagaauccuagacuagggaccucuugugacauuuucaccaauagcagagggaagagggcauccaaagggagcaagaccuguggauuuguagaugaaagaggccuguacaagucucugaaaggagcaugcaaacugaaacugugugggguucuaggacucagacuuauggauggaacaugggccgcgauccagacaucagaugagaccaaauggugcccuccugaucaguuagugaaccuacaugacuuucgcucggaugaaauugaacaucuugucguggaggagcuggucaagaaaagggaagagugucuagaugcacuggaguccaucaugaccaccaagucugugaguuucagacgucucagucacuugaggaaacuugugcccggguuuggaaaagcauauaccauauuuaauaagaccuugauggaggcugaugcucacuacaaaucaguccggacuuggaaugagaucauccccucuaaaggguguuuaagaguaggggggagaugucacccucaugugaacgggguguucuucaaugguaucaucuuaggcccugacggccaugugcuaaucccggagaugcagucgucucuccuccagcagcauauggaguuguuggaauccucagucauccccuugaugcaucccuuggcagauccaucaacaguuuuuaaagaugaugacgaggcggaagauuuuguugagguucaccuuccagaugugcacaagcaggucucaggggucgaucucggucucccaagcugggggaaguauguguugaugagcgcaggcgucuuaaccgcgcuaauguugacgauuuucuuaauaacguguuguagaagggccaauagagcagaaucagcacaacacagucuuggagagagggggaggaaagugucgguaaccucccaaagcgggcggguuauauccucaugggagucauacaaaaguggaggugagaccaagcuguaa

SEQ ID NO: 62633 - RNA, 1575 nt, Artificial Sequence
  derived and/or modified CDS sequence (wt) from glycoprotein__RABV__AB563871.1
augaauccucaggcucuuauguuuguaccucuucuggucuuuucauuguguuucgggaaauuccccaucuacacgauaccggacaaacuuggucccuggagccccauugauauacaucaucucagcuguccgaacaauuugguuguggaggacgaaggauguaccaaccugucagguuucucauacauggaacucaaaguaggauacauuucagccaucaaagugaacggguucacuuguacggguguggugacagaagcagaaacuuacaccaacuuuguuggcuaugucacuaccacguuuaagagaaagcacuuccgcccgacgccggaugcaugcagagccgcauauaacuggaagauggcuggugacccuagauaugaggaaucucugcauaauccuuacccugauuaucauuggcuccggacugugaagaccaccaaagaaucucuuguuaucauaucuccaaguguggcagaucuggacccauaugacaaaucccuucacucgagaguuuuuccuagcggaaaaugcucaggcauaacagugucuucuaccuacugcucuacuaaccacgacuauaccaucuggaugccugagaauccuagacuagggaccucuugugacauuuucaccaauagcagagggaagagagcauccaaagggagcaagaccuguggauuuguagaugagagaggccuauacaagucucugaaaggagcaugcaaauugaaacuaugugggguucuaggacucagacuuauggauggaacaugggccgcgauccagacaucagaugagaccaaauggugcccuccugaucaguuagugaaccuacaugacuuucgcucggaugaaauugagcaucuuguuguagaggagcuggucaagaaaagggaagagugucuagaugcacuggaguccaucaugaccaccaagucugugaguuucagacgucucagucacuugaggaaacuugugccuggguucggaaaagcauauaccauauucaauaagaccuugauggaggcugaugcucacuacaaaucaguccggacuuggaaugagaucauccccucuaaaggguguuugagagucggggggagaugucacccccaugugaacgggguguucuucaaugguaucauauuaggcccugacggccaugugcuaaucccggagaugcagucgucucuccuccagcagcauauggaguuguuggaauccucagucauccccuuaaugcaucccuuggcagauccaucaacaguuuuuaaagaugaugacgaggcggaagauuuuguugagguucaccuuccagaugugcacaagcaggucucagggguugaucucggucucccaagcugggggaaguauguguugaugagcgcaggaguccugaccgcacuaauguugaugauuuucuuaaugacguguugcagaagggccaauagagcagaaucagcacaacacagucuuggggagaggggaaggaaagugucgguaaccucccaaagcgggcggguuauauccucaugggagucauacaaaaguggaggugagaccaagcuguag

SEQ ID NO: 62634 - RNA, 1575 nt, Artificial Sequence
  derived and/or modified CDS sequence (wt) from glycoprotein__RABV__AB563873.1
augaauccucaggcucuuauguuuguaccucuucuggucuuuucauuguguuucgggaaauuccccaucuacacgauaccggacaaacuuggucccuggagccccauugauauacaucaucucagcuguccgaacaauuugguuguggaggacgaaggauguaccaaccugucagguuucucauacauggaacucaaaguaggauacauuucagccaucaaagugaacggguucacuuguacggguguggugacagaagcagaaacuuacaccaacuuuguuggcuaugucacuaccacguuuaagagaaagcacuuccgcccgacgccggaugcaugcagagccgcauauaacuggaagauggcuggugacccuagauaugaagaaucucugcauaauccuuacccugauuaucauuggcuccggacugugaagaccaccaaagaaucucuuguuaucauaucuccaaguguggcagaucuggacccauacgacaaaucccuucacucgagaguuuuuccuagcggaaaaugcucaggcauaacagugucuucuaccuacugcucuacuaaccacgacuauaccaucuggaugccugagaauccuagacuagggaccucuugugacauuuucaccaauagcagagggaagagagcauccaaagggagcaagaccuguggauuuguagaugagagaggccuauacaagucucugaaaggagcaugcaaauugaaacuaugugggguucuaggacucagacuuauggauggaacaugggccgcgauccagacaucagaugagaccaaauggugcccuccugaucaguuagugaaccuacaugacuuucgcucggaugaaauugagcaucuuguuguggaggagcuggucaagaaaagggaagagugucuagaugcacuggaguccaucaugaccaccaaguccgugaguuucagacgucucagucacuugaggaaacuugugccuggguucggaaaagcauauaccauauucaauaagaccuugauggaggcugaugcucacuacaaaucaguccggacuuggaaugagaucauccccucuaaaggguguuugagagucggggggagaugucacccccaugugaacgggguguucuucaaugguaucauauuaggcccugacggccaugugcugaucccggagaugcagucgucucuccuccagcagcauauggaguuguuggaauccucagucauccccuuaaugcaucccuuggcagauccaucaacaguuuucaaagaugaugacgaggcggaagauuuuguugagguucaccuuccagaugugcacaagcaggucucagggguugaucucggucucccaagcugggggaaguauguguugaugagugcaggaguccugaccgcacuaauguugaugauuuucuuaaugacguguugcagaagggccaauagagcagaaucagcacaacacagucuuggagagaggggaaggaaagugucgguaaccucccaaagcgggcggguuauauccucaugggagucauacaaaaguggaggugagaccaagcuguag

SEQ ID NO: 62635 - RNA, 1575 nt, Artificial Sequence
  derived and/or modified CDS sequence (wt) from glycoprotein__RABV__AB563874.1
augaauccucaggcucuuauguuuguaccucuucuggucuuuucauuguguuucgggaaauuccccaucuacacgauaccggacaaacuuggucccuggagccccauugauauacaucaucucagcuguccgaacaauuugguuguggaggacgaaggauguaccaaccugucagguuucucauacauggaacucaaaguaggauacauuucagccaucaaagugaacggguucacuuguacggguguggugacagaagcagaaacuuacaccaacuuuguuggcuaugucacuaccacguuuaagagaaagcacuuccgcccgacgccggaugcaugcagagccgcauauaacuggaagauggcuggugacccuagauaugaagaaucucugcauaauccuuacccugauuaucauuggcuccggacugugaagaccaccaaagaaucucuuguuaucauaucuccaaguguggcagaucuggacccauaugacaaaucccuucacucgagaguuuuuccuagcggaaaaugcucaggcauaacagugucuucuaccuacugcucuacuaaccacgacuauaccaucuggaugccugagaauccuagacuagggaccucuugugacauuuucaccaauagcagagggaagagagcauccaaagggagcaagaccuguggauuuguagaugagagaggccuauacaagucucugaaaggagcaugcaaauugaaacuaugugggguucuaggacucagacuuauggauggaacaugggccgcgauccagacaucagaugagaccaaauggugcccuccugaucaguuagugaaccuacaugacuuucgcucggaugaaauugagcaucuuguuguagaggagcuggucaagaaaagggaagagugucuagaugcacuggaguccaucaugaccaccaagucugugaguuucagacgucucagucacuugaggaaacuugugccuggguucggaaaagcauauaccauauucaauaagaccuugauggaggcugaugcucacuacaaaucaguccggacuuggaaugagaucauccccucuaaaggguguuugagagucggggggagaugucacccccaugugaacgggguguucuucaaugguaucauauuaggcccugacggccaugugcuaaucccggagaugcagucgucucuccuccagcagcauauggaguuguuggaauccucagucauccccuuaaugcaucccuuggcagauccaucaacaguuuuuaaagaugaugacgaggcggaagauuuuguugagguucaccuuccagaugugcacaagcaggucucagggguugaucucggucucucaagcugggggaaguauguguugaugagcgcaggaguccugaccgcacuaauguugaugauuuucuuaaugacguguugcagaagggccaauagagcagaaucagcacaacacagucuuggggagaggggaaggaaagugucgguaaccucccaaagcgggcggguuauauccucaugggagucauacaaaaguggaggugagaccaagcuguag

SEQ ID NO: 62636 - RNA, 1575 nt, Artificial Sequence
  derived and/or modified CDS sequence (wt) from glycoprotein__RABV__AB563875.1
augaauccucaggcucuuauguuuguaccucuucuggucuuuucauuguguuuugggaaauuccccaucuacacgauaccggacaaacuuggucccuggagccccauugauauacaucaucucagcuguccgaacaauuugguuguugaggacgaaggauguaccaaccugucagguuucucauacauggaacucaaaguaggauacauuucagccaucaaagugaacggguucacuuguacggguguggugacagaagcagaaacuuacaccaacuuuguuggcuaugucacuaccacguuuaagagaaagcacuuccgcccgacgccggaugcaugcagagccgcauauaacuggaagauggcuggugacccuagauaugaagaaucucugcauaauccuuacccugauuaucauuggcuccggacugugaagaccaccaaagaaucucuuguuaucauaucuccaagcguggcagaucuagacccauaugacaaaucccuucacucgagaguuuuuccuagcggaaaaugcucaggcauaacagugucuucuaccuacugcucuacuaaccacgacuauaccaucuggaugccugagaauccuagacuagggaccucuugugacauuuucaccaauagcagagggaagagagcauccaaagggagcaagaccuguggauuuguagaugagagaggccuauacaagucucugaaaggagcaugcaaauugaagcuaugugggguucuaggacucagacuuauggauggaacaugggccgcgauccagacaucagaugagaccaaauggugcccuccugaucaguuagugaaccuacaugacuuucgcucggaugaaauugagcaucuuguuguggaggagcuagucaagaaaagggaagagugucuagaugcacuggaguccaucaugaccaccaaguccgugaguuucagacgucucagucacuugaggaaacuugugccuggguucggaaaagcauauaccauauucaauaagaccuugauggaggcugaugcucacuacaaaucaguccggacuuggaaugagaucauccccucuaaaggguguuugagagucggggggagaugucacccccaugugaacgggguguucuucaaugguaucauauuaggcccugacggccaugugcuaaucccggagaugcagucgucucuccuccagcagcauauggaguuguuggaauccucagucauccccuuaaugcaucccuuggcagauccaucaacgguuuuuaaagaugaugacgaggcggaagauuuuguugagguucaccuuccagaugugcacaagcaggucucagggguugaucucggucucccaagcugggggaaguauguguugaugagcgcaggaguccugaccgcacuaauguugaugauuuucuuaaugacguguugcagaagggccaauagagcagaaucagcacaacacagucuuggagagaggagaaggaaagugucgguaaccucccaaagcgggcggguuauauccucaugggagucauacaaaaguggaggugagaccaagcuguag

SEQ ID NO: 62637 - RNA, 1575 nt, Artificial Sequence
  derived and/or modified CDS sequence (wt) from glycoprotein__RABV__AB563878.1
augauuccucaggcucuuuuguuuguaccccuucuggucuuuucauuguguuucggaaaauuucccaucuacacgauaccggacaaacuuggucccuggagccccauugauauacaucaucucagcuguccgaacaauuugguuguggaggaugaaggauguaccaaccugucagguuucucguacauggaacucaagguaggauacauuucagccaucaaagugaacggguucacuuguacggguguggugacagaagcagagaccuacaccaacuuuguuggcuaugucacuaccacguuuaagagaaagcacuuccgcccaacgccggaugcaugcagagccgcauauaacuggaagauggcuggugaccccagauaugaagaaucucugcauaauccuuacccugauuaucauuggcuccgaacugugaagaccaccaaagaaucucuuguuaucauaucuccaaguguggcagauuuggacccauacgauaaaucccuucacucgagaguuuuuccuagcggaaaaugcucaggcauaacggugucuucuaccuacugcucuacuaaccacgacuauaccaucuggaugccugagaauccuagacuagggaccucgugugacauuuucaccaauagcagagggaagagagcauccaaagggagcaagaccuguggauuuguagaugagaggggccuguacaagucucugaaaggagcaugcaaacugaaacugugugggguucugggacucagacuuauggauggaacaugggccgcgauccagacaucagaugagaccaaauggugcccuccugaucaguuagugaaccuacaugacuuucgcucggaugaaauugaacaucuugucguggaggagcuggucaagaaaagggaagagugucuagaugcacuggaguccaucaugaccaccaagucugugaguuucagacgucucagucacuugaggaaacuugugcccggguuuggaaaagcauauaccauauuuaauaagaccuugauggaggcugaugcucacuacaaaucaguccggacuuggaaugagaucauccccucuaaaggguguuuaagaguaggggggagaugucacccucaugugaacgggguguucuucaaugguaucaucuuaggcccugacggccaugugcuaaucccggagaugcagucgucucuccuccagcagcauauggaguuguuggaauccucagucauccccuuaaugcaucccuuggcagauccaucaacaguuuuuaaagaugaugacgaggcggaagauuuuguugagguucaccuuccagaugugcacaagcaggucucaggggucgaucucggucucccaagcugggggaaguauguguugaugagcgcaggugucuugaccgcgcuaauguugaugauuuucuuaacgacguguuguagaagggccaauagagcagaaucagcacaacacagucuuggagagaaggggaggaaagugucgguaaccucccaaagcgggcggguuauauccucaugggagucauacaaaaguggaggugagaccaagcuguaa

SEQ ID NO: 62638 - RNA, 1575 nt, Artificial Sequence
  derived and/or modified CDS sequence (wt) from glycoprotein__RABV__AB563879.1
augauuccucaagcucuuuuguuuguaccccuucuggucuuuucguuguguuucggaaaauuucccaucuacacgauaccggacaaacuuggucccuggagccccauugauauacaucaucucagcuguccgaacaauuugguuguggaggaugaaggauguaccaaccugucagguuucucguacauggaacucaagguaggauacauuucagccaucaaagugaacggguucacuuguacggguguagugacagaagcagagaccuacaccaacuuuguuggcuaugucacuaccacguuuaagagaaagcacuuccgcccaacgccggaugcaugcagagccgcauauaacuggaagauggcuggugaccccagauaugaagaaucucugcauaauccuuacccugauuaucauuggcucagaacugugaagaccaccaaagaaucucuuguuaucauaucuccaaguguggcagauuuggacccauaugauaaaucccuucacucgagagucuucccuagcggaaaaugcucaggcauaacggugucuucuaccuacugcucuacuaaccacgacuauaccaucuggaugccugagaauccuagacuagggaccucuugugacauuuucaccaauagcagagggaagagggcauccaaagggagcaagaccuguggauuuguagaugaaagaggccuguacaagucucugaaaggagcaugcaaacugaaacugugugggguucugggacucagacuuauggauggaacaugggccgcgauccagacuucagaugagaccaaauggugcccuccugaucaguuagugaaccuacaugacuuucgcucggaugaaauugaacaucuugucguggaggagcuggucaagaaaagggaagagugucuagaugcacuggaguccaucaugaccaccaagucugugaguuucagacgucucagucacuugaggaaacuugugcccggguuuggaaaagcauauaccauauuuaauaagacuuugauggaggcugaugcucacuacaaaucaguccggacuuggaaugagaucauccccucuaaaggguguuuaagaguaggggggagaugucacccucaugugaacgggguguucuucaaugguaucaucuuaggcccugacggccaugugcuaaucccggagaugcagucgucucuccuccagcagcauauggaguuguuggaauccucagucauccccuuaaugcaucccuuggcagauccaucaacaguuuuuaaagaugaugacgaggcggaagauuuuguugagguucaccuuccagaugugcacaagcaggucucaggggucgaucucggucucccaagcugggggaaguauguguugaugagcgcaggcgucuuaaccgcgcuaauguugaugauuuucuugaugacguguuguagaagggccaauagagcagaaucagcacaacacagucuuggagagagggggaggaaagugucgguaaccucccaaagcgggcggguuauauccucaugggagucauacaaaaguggaggugagaccaagcuguaa

SEQ ID NO: 62639 - RNA, 1575 nt, Artificial Sequence
  derived and/or modified CDS sequence (wt) from glycoprotein__RABV__AB563881.1
augauuccucaggcucuuuuguuuguaccccuucuggucuuuucauuguguuucggaaaauuuccuaucuacacaauaccggacaaacuuggucccuggagccccauugacauacaucaucucagcuguccgaacaauuugguuguggaagaugaaggauguaccaaccugucagguuucucguacuuggaacucaagguaggauacauuucugccaucaaagugaacggguucacuuguacggguguagugacggaagcagagaccuacaccaacuuuguuggcuaugucacuaccacguuuaagagaaagcacuuccgcccaacgccggaugcaugcagagccgcauauaacuggaagauggcuggugaccccagauaugaagaaucucugcauaauccuuacccugauuaucauuggcuccgaacugugaagaccaccaaagagucucuuguuaucauaucuccaaguguggcagauuuggacccauacgauaaaucccuucacucgagaguuuuuccuagcggaaaaugcucaggcauaacggugucuucuaccuacugcuccacuaaccacgacuauaccaucuggaugccugagaauccuagacuagggaccucuugugacauuuucaccaauagcagagggaagagagcauccaaagggagcaaaaccuguggauuuguagaugagagaggccuguacaagucucugaaaggagcaugcaaacugaaacuaugugggguucugggacucagacuuauggauggaacaugggccgcgauccagacaucagaugagaccaaauggugcccuccugaucaguuagugaaccuacaugacuuucgcucggaugaaauugaacaucuuguuguggaggagcuggucaagaaaagggaagagugucuagaugcacuggaguccaucaugaccaccaagucugugaguuucagacgucucagucacuugaggaaacuugugcccggguuuggaaaagcauauaccauauucaauaagaccuugauggaggcugaugcucacuacaaaucaguccggacuuggaaugagaucauccccucuaaaggguguuuaagagucggggggagaugucacccucaugugaacgggguguucuucaaugguaucaucuuaggcccugacggccaugugcuaaucccggagaugcagucgucucuccuccagcagcauauggaguuauuggaauccucagucauccccuuaaugcaucccuuggcagauccaucaacaguuuuuaaagaugaugacgaggcggaagauuuuguugagguucaccuuccagaugugcacaagcaggucucaggggucgaucucggucucccaagcugggggaaguauguguugaugagcgcaggcgucuugaccgcauuaauguugaugauuuucuuaaugacguguuguagaagggccaauagagcagacucagcacaacacagucuuggagagggggagaggaaagugucgguaaccucccaaagugggcggguuauauccucaugggagucauacaaaaguggaggugagaccaagcuguaa

SEQ ID NO: 62640 - RNA, 1575 nt, Artificial Sequence
  derived and/or modified CDS sequence (wt) from glycoprotein__RABV__AB563883.1
augauuccucaagcucuuuuguuuguacccuuucuggucuuuucauuguguuucggaaaauuucccaucuacacgauaccggacaaacuuggucccuggagccccauugauauacaucaucucagcuguccgaacaauuugguuguggaggaugaaggauguaccaaccugucagguuucucguacauggaacucaagguaggauacauuucagccaucaaagugaacggguucacuuguacggguguagugacagaagcagagaccuacaccaacuuuguuggcuaugucacuaccacguuuaagagaaagcacuuccgcccaacgccggaugcaugcagagccgcauauaacuggaagauggcuggugaccccagauaugaagaaucucugcauaauccuuacccugauuaucauuggcucagaacugugaagaccaccaaagaaucucuuguuaucauaucuccaaguguggcagauuuggacccauacgauaaaucccuucacucgagagucuucccuagcggaaaaugcucaggcauaacggugucuucuaccuacugcucuacuaaccacgacuauaccaucuggaugccugagaauccuagacuagggaccucuugugacauuuucaccaauagcagagggaagagggcauccaaagggagcaagaccuguggauuuguagaugaaagaggccuguacaagucucugaaaggagcaugcaaacugaaacugugugggguucuaggacucagacuuauggauggaacaugggccgcgauccagacaucagaugagaccaaauggugcccuccugaucaguuagugaaccuacaugacuuucgcucggaugaaauugaacaucuugucguggaggagcuggucaagaaaagggaagagugucuagaugcacuggaguccaucaugaccaccaagucugugaguuucagacgucucagucacuugaggaaacuugugcccggguuuggaaaagcauauaccauauuuaauaagaccuugauggaggcugaugcucacuacaaaucaguccggacuuggaaugagaucauccccucuaaaggguguuuaagaguaggggggagaugucacccucaugugaacgggguguucuucaaugguaucaucuuaggcccugacggccaugugcuaaucccggagaugcagucgucucuccuccagcagcauauggaguuguuggaauccucagucauccccuugaugcaucccuuggcagauccaucaacaguuuuuaaagaugaugacgaggcggaagauuuuguugagguucaccuuccagaugugcacaagcaggucucaggggucgaucucggucucccaagcugggggaaguauguguugaugagcgcaggcgucuuaaccgcgcuaauguugacgauuuucuuaaugacguguuguagaagggccaauagagcagaaucagcacaacacagucuuggagagagggggaggaaagugucgguaaccucccaaagcgggcggguuauauccucaugggagucauacaaaaguggaggugagaccaagcuguaa

SEQ ID NO: 62641 - RNA, 1575 nt, Artificial Sequence
  derived and/or modified CDS sequence (wt) from glycoprotein__RABV__AB563884.1
augauuccucaagcucuuuuguuuguaccccuucuggucuuuucguuguguuucggaaaauuucccaucuacacgauaccggacaaacuuggucccuggagccccauugauauacaucaucucaguuguccgaacaauuugguuguggaggaugaaggauguaccaaccugucagguuucucguacauggaacucaagguaggauacauuucagccaucaaagugaacggguucacuuguacggguguagugacagaagcagagaccuacaccaacuuuguuggcuaugucacuaccacguuuaagagaaagcacuuccgcccaacgccggaugcaugcagagccgcauauaacuggaagauggcuggugaccccagauaugaagaaucucugcauaauccuuacccugauuaucauuggcucagaacugugaagaccaccaaagaaucucuuguuaucauaucuccaaguguggcagauuuggacccauacgauaaaucccuucacucgagagucuucccuagcggaaaaugcucaggcauaacggugucuucuaccuacugcucuacuaaccacgacuauaccaucuggaugccugagaauccuagacuagggaccucuugugacauuuucaccaauagcagagggaagagggcauccaaagggagcaagaccuguggauuuguagaugaaagaggccuguacaagucucugaaaggagcaugcaaacugagacugugugggguucuaggacucagacuuauggauggaacaugggccgcgauccagacgucagaugagaccaaauggugcccuccugaucaguuagugaaccuacaugacuuucgcucggaugaaaucgaacaucuugucguggaggagcuggucaagaaaagggaagagugucuagaugcacuggaguccaucaugaccaccaagucugugaguuucagacgucucagucacuugaggaaacuugugcccggguuuggaaaagcauauaccauauuuaauaagacuuugauggaggcugaugcucacuacaaaucaguccggacuuggaaugagaucauccccucuaaaggguguuuaagaguaggggggagaugucacccucaugugaacgggguguucuucaaugguaucaucuuaggcccugacggccaugugcuaaucccggagaugcagucgucucuccuccagcagcauauggaguuguuggaauccucagucauccccuuaaugcaucccuuggcagauccaucaacaguuuuuaaagaugaugacgaggcggaagauuuuguugagguucaccuuccagaugugcacaagcaggucucaggggucgaucucggucucccaagcugggggaaguauguguugaugagcgcaggcgucuuaaccgcgcuaauguugaugauuuucuuaaugacguguuguagaagggccaauagagcagaaucagcacaacacagucuuggagagagggggaggaaagugucgguaaccucccaaagcgggcgaguuauauccucaugggagucauacaaaaguggaggugagaccaagcuguaa

SEQ ID NO: 62642 - RNA, 1575 nt, Artificial Sequence
  derived and/or modified CDS sequence (wt) from glycoprotein__RABV__AB563886.1
augauuccucaggcucuuuuguuuguaccccuucuggucuuuucauuguguuucggaaaauuucccaucuacacgauaccggacaaacuuggucccuggagccccauugauauacaucaucucagcuguccgaacaauuugguuguggaggaugaaggauguaccaaccugucagguuucucguacauggaacucaagguaggauacauuucagccaucaaagugaacggguucacuuguacggguguagugacagaagcagagaccuacaccaacuuuguuggcuaugucacuaccacguuuaagagaaagcacuuccgcccaacgccggaugcaugcagagccgcauauaacuggaagauggcuggugaccccagauaugaagaaucucugcauaauccuuacccugauuaucauuggcuccgaacugugaagaccaccaaagaaucucuuguuaucauaucuccaaguguggcagauuuggacccauacgauaaaucccuucacucgagaguuuuuccuagcggaaaaugcucaggcauaacggugucuucuaccuacugcuccacuaaccacgacuauaccaucuggaugccugagaauccuagacuagggaccucuugugacauuuucaccaauagcagagggaagagagcguccaaagggagcaagaccuguggauuuguagaugagagaggccuguacaagucucugaaaggagcaugcaaacugaaacuaugugggguucugggacucagacuuauggaugggacaugggccgcgauccagacaucagaugagaccaaauggugcccuccugaucaguuagugaaccuacaugacuuucgcucggaugaaauugaacaucuuguuguggaggagcuggucaagaaaagggaagagugucuagaugcacuggaguccaucauaaccaccaagucugugaguuucagacgucucagucacuugaggaaacuugugcccggguuuggaaaagcauauaccauauucaauaagaccuugauggaggcugaugcucacuacaaaucaguccggacuuggaaugagaucauccccucuaaaggguguuuaagagucggggggagaugucacccucaugugaacgggguguucuucaaugguaucaucuuaggcccugacggccaugugcuaaucccggagaugcagucgucucuccuccagcagcauauggaguuauuggaauccucagucauccccuuaaugcaucccuuggcagauccgucaacaguuuuuaaagaugaugacgaggcggaagauuuuguugagguucaccuuccagaugugcacaagcaggucucagggguugaucucggucucccaagcugggggaaguauguguugaugagcgcaggcgucuugaccgcauuaauguugaugauuuucuuaaugacguguuguagaagggccaauagaguagaaucagcacaacacagucuuggagagagggggaggaaagugucuguaaccucccaaagcgggcggguuauauccucaugggagucauacaaaaguggaggugagaccaagcuguaa

SEQ ID NO: 62643 - RNA, 1575 nt, Artificial Sequence
  derived and/or modified CDS sequence (wt) from glycoprotein__RABV__AB563887.1
augauuccucaggcucuuuuguuuguaccccuucuggucuuuucauuguguuucggaaaauuucccaucuacacgauaccggacaaacuuggucccuggagccccauugauauacaucaucucagcuguccgaacaauuugguuguggaggaugaaggauguaccaaccugucagguuucucguacauggaacucaagguaggauacauuucagccaucaaagugaacggguucacuuguacggguguagugacagaagcagagaccuacaccaacuuuguuggcuaugucacuaccacguuuaagagaaagcacuuccgcccaacgccggaugcaugcagagccgcauauaacuggaagauggcuggugaccccagauaugaagaaucucugcauaauccuuacccugauuaucauuggcucagaacugugaagaccaccaaagaaucucuuguuaucauaucuccaaguguggcagauuuggacccauacgauaaaucucuucacucgagaguuuuuccuagcggaaaaugcucaggcauaacggugucuucuaccuacugcuccacuaaccacgacuauaccaucuggaugccugagaauccuagacuagggaccucuugugacauuuucaccaacagcagagggaagagagcaucaaaagggagcaagaccuguggauuuguagaugagagaggccuguacaagucucugaaaggagcaugcaaacugaaacuaugugggguucugggacucagacuuauggauggaacaugggccgcgauccagacaucagaugagaccaaauggugcccuccugaucaguuagugaaccuacaugacuuucgcucggaugaaauugaacaucuuguuguggaggagcuggucaagaaaagggaagagugucuagaugcacuggaguccaucaugaccacaaagucugugaguuucagacgucucagucacuugaggaaacuugugcccggguuuggaaaagcauauaccauauucaauaagaccuugauggaggcugaugcucacuacaaaucaguccggacuuggaaugagaucauccccucuaaaggguguuuaagagucggggggagaugucacccucauguaaacgggguguucuucaaugguaucaucuuaggcccugacggccaugugcuaaucccggagaugcagucgucucuccuccagcagcauauggaguuauuggaauccucagucauccccuuaaugcaucccuuggcagauccaucaacaguuuuuaaagaugaugacgaggcggaagauuuuguugagguucaccuuccagaugugcacaagcaggucucaggggucgaucuuggucucccaagcugggggaaguauguguugaugagcgcaggcgucuugaccgcauuaauguugaugauuuucuuaaugacguguugucgaagggccaauagagcagaaucagcacaacacagucuuggagagagggggaggaaagugucgguaaccucccaaagcgggcggguuauauccucaugggagucauacaaaaguggaggugagaccaagcuguaa

SEQ ID NO: 62644 - RNA, 1575 nt, Artificial Sequence
  derived and/or modified CDS sequence (wt) from glycoprotein__RABV__AB563888.1
augauuccucaggcucuuuuguuuguaccccuucuggucuuuucauuguguuucggaaaauuucccaucuacacgauaccggacaaacuuggucccuggagccccauugauauacaucaucucagcuguccgaacaauuugguuguggaggaugaaggauguaccaaccugucagguuucucguacauggaacucaagguaggauacauuucagccaucaaagugaacggguucacuuguacggguguagugacagaagcagagaccuacaccaacuuuguuggcuaugucacuaccacguuuaagagaaagcacuuccgcccaacgccggaugcaugcagagccgcauauaacuggaagauggcuggugaccccagauaugaagaaucucugcauaauccuuacccugauuaucauuggcuccgaacugugaagaccaccaaagaaucucuuguuaucauaucuccaaguguggcagauuuggacccauacgauaaaucccuucacucgagaguuuuuccuagcggaaaaugcucaggcauaacggugucuucuaccuacugcuccacuaaccacgacuauaccaucuggaugccugagaauccuagacuagggaccucuugugacauuuucaccaacagcagagggaagagagcaucaaaagggagcaagaccuguggauuuguagaugagagaggccuguacaagucucugaaaggagcaugcaaauugaaacuaugugggguucugggacucagacuuauggauggaacaugggccgcgauccagacaucagaugagaccaaauggugcccuccugaucaguuagugaaccuacaugacuuucgcucggaugaaauugaacaucuuguuguggaggagcuggucaagaaaagggaagagugucuagaugcacuggaguccaucaugaccacaaagucugugaguuucagacgucucagucacuugaggaaacuugugcccggguuuggaaaagcauauaccauauucaauaagaccuugauggaggcugaugcucacuacaaaucaguccggacuuggaaugagaucauccccucuaaaggguguuuaagagucggggggagaugucacccucauguaaacgggguguucuucaaugguaucaucuuaggcccugacggccaugugcuaaucccggagaugcagucgucucuccuccagcagcauauggaguuauuggaauccucagucauccccuuaaugcaucccuuggcagauccaucaacaguuuuuaaagaugaugacgaggcggaagauuuuguugagguucaccuuccagaugugcacaagcaggucucaggugucgaucucggucucccaagcugggggaaguauguguugaugagcgcaggcgucuugaccgcauuaauguugaugauuuucuuaaugacguguugucgaagggccaauagagcagaaucagcacaacacagucuuggagagagggggaggaaagugucgguaaccucccagagcgggcggguuauauccucaugggaaucauacaaaaguggaggugagaccaagcuguaa

SEQ ID NO: 62645 - RNA, 1575 nt, Artificial Sequence
  derived and/or modified CDS sequence (wt) from glycoprotein__RABV__AB563889.1
augauuccucaggcucuuuuguuuguacccauucuggucuuuucauuguguuucggaaaauuucccaucuacacgauaccggacaaacuuggucccuggagccccauugacauacaucaucucagcuguccgaacaauuugguuguggaggaugaaggauguaccaaccugucagguuucucguacauggaacucaagguaggauacauuucagccaucaaagugaacggauucacuuguacggguguagugacagaagcagagaccuauaccaacuuuguuggcuaugucacuaccacguuuaagagaaagcacuuccgcccaacgccggaugcaugcagagccgcauauaacuggaagauggcuggugaccccagauaugaagaaucucugcauaauccuuacccugauuaucauuggcuccgaacugugaagaccaccaaagaaucucuuguuaucauaucuccaaguguggcagauuuggacccauacgauaaaucccuucacucgagaguuuuuccuagcggaaaaugcucaggcauaacgguguccucuaccuacugcuccacuaaccacgauuauaccaucuggaugccugaaaauccuagacuagggaccucuugugacauuuucaccaauagcagagggaagagagcauccaaagggagcaagaccuguggauuuguagaugagagaggccuguacaagucucugaaaggagcaugcaaacugaaacuaugugggguucugggacucagacuuauggauggaacaugggccgcgauccagacaucagaugagaccaaauggugcccuccugaccaguuagugaaccuacaugacuuucgcucggaugaaauugaacaucuuguuguggaggaguuggucaagaaaagggaagagugucuagaugcacuggaguccaucaugaccaccaagucugugaguuucagacgucucagucacuugaggaaacuugugcccggguuuggaaaagcauauaccauauucaauaagaccuugauggaggccgaugcucacuacaaaucaguccggacuuggaacgagaucauccccucuaaaggguguuuaagagucggggggagaugucacccucaugugaacgggguguucuucaaugguaucaucuuaggcccugauggccaugugcuaaucccggagaugcagucgucucuccuccaacagcauauggaguuguuggaauccucagucauccccuuaaugcaucccuuggcagauccaucaacaguuuuuaaagaugaugacgaggcggaagauuuuguugagguucaccuuccagauguacacaagcaggucucaggggucgaucucggucucccaagcugggggaaguauguguugaugagcgcaggcgucuugaccgcacuaauguugaugauuuucuuaaugacaugcuguagaagggccaauagaguagaaucagcacaacacagucuuggagagagggggaggaaagugucgguaaccucccaaagcgggcggguuauauccucaugggagucauacaaaaguggaggugagaccaagcuguaa

SEQ ID NO: 62646 - RNA, 1575 nt, Artificial Sequence
  derived and/or modified CDS sequence (wt) from glycoprotein__RABV__AB563890.1
augauuccucaggcucuuuuguuuguaccccuucuggucuuuucauuguguuucgggaaauuccccaucuacacgauaccugacaaacuuggucccuggagccccauugauauacaucaucucagcuguccgaacaauuugguuguagaggaugaaggauguaccaaccugucagguuucucauacauggaacucaaaguaggauacauuucagccaucaaagugaacggguucaccuguacggguguggugacagaggcagaaaccuacaccaacuuuguuggcuauguuacuaccacguuuaagagaaagcacuuccgcccgaugccggaugcgugcagagccgcauauaacuggaagauggcuggugaccccagauaugaagagucucugcauaauccuuacccugauuaucauuggcuccggacugugaagaccaccaaagaaucucuuguuaucauaucuccaaguguggcagauuuggauccauacgacaaaucccuucacucgagaguuuuuccuagcggaaaaugcucaggcauaacagugucuucuaccuacugcucuacuaaccaugacuauaccaucuggaugccugagaauccuagacuagggaccucuugugacauuuucaccaauagcagggggaagagagcauccaaagggagcaagaccuguggauuuguagaugagagaggccuauacaaaucucugaaaggagcuugcaaacugaaacuaugugggguucuuggacucagacuuauggauggaacaugggcagcaauccagacaucagaugagaccaaauggugcccuccugaucaguuggugaaccuacaugacuuucguucggaugaaauugaacaucuuguuguggaggagcuggucaagaaaagggaagagugucuagaugcacuggaguccaucaugaccaccaaguccgugaguuucagacgucucagucacuugaggaaacuugugccuggguuugggaaagcguauaccauauucaauaagaccuugauggaggcugaugcucauuacaaaucaguccggacuuggaaugagaucaucccauccaaaggguguuuaagagucggggggagaugucacccucaugugaacgggguuuucuucaaugguaucaucuuaggcccugacggccaugugcuaaucccggagaugcagucgucucuccuccagcagcauauggaguuguuggaauccucaguuauccccuugaugcaucccuuggcagacccaucaacaguuuucaaagaugaugacgaggcggaagauuuuguugagguucaccuuccagaugugcacaagcaggucucaggggucgaucucggucucccaagcugggggaaguaugugcugaugagcgcaggcgucuugaccguacuaauguugaugauuuucuucaugacguguuguagaagggccaauagaguggaaucagcacaacacagucuuggagagagggggaggaaagugucgguaaccucccaaagcgggcgggucauauccucaugggagucauacaaaaguggaggugagaccaaacuguaa

SEQ ID NO: 62647 - RNA, 1575 nt, Artificial Sequence
  derived and/or modified CDS sequence (wt) from glycoprotein__RABV__AB563891.1
augauuccucaggcucuuuuguuuguaccccuucuggucuuuucauuguguuucgggaaauuccccaucuacacgauaccugacaaacuuggucccuggagccccauugauauacaucaucucagcuguccgaacaauuugguuguagaggaugaaggauguaccaaccugucagguuucucauacauggaacucaaaguaggauacauuucagccaucaaagugaacggguucacuuguacggguguggugacagaggcagaaaccuacaccaacuuuguuggcuauguuacuaccacguuuaagagaaagcacuuccgcccgaugccggaugcgugcagagccgcauauaacuggaagauggcuggugaccccagauaugaagagucucugcauaauccuuacccugauuaucauuggcuccggacugugaagaccaccaaagaaucucuuguuaucauaucuccaaguguggcagauuuggacccauacgacaaaucccuucacucgagaguuuuuccuagcggaaaaugcucaggcauaacagugucuucuaccuacugcucuacuaaccaugacuauaccaucuggaugccugagaauccuagacuagggaccuccugugacauuuucaccaauagcagggggaagagagcauccaaagggagcaagaccuguggauuuguagaugagagaggccuauacaaaucucugaaaggagcuugcaaacugaaacuaugugggguucuuggacucagacuuauggauggaacaugggcagcaauccagacaucagaugagaccaaauggugcccuccugaucaguuggugaaccuacaugacuuucguucggaugaaauugaacaucuuguuguggaggagcuggucaagaaaagggaagagugucuagaugcacuggaguccaucaugaccaccaaguccgugaguuucagacgucucagucacuugaggaaacuugugccuggguuuggaaaagcguauaccauauucaauaagaccuugauggaggcugaugcucauuacaaaucaguccggacuuggaaugagaucaucccaucuaaaggguguuuaagagucggggggagaugucacccucaugugaacgggguuuucuucaaugguaucaucuuaggcccugacggccgugugcuaaucccggagaugcagucgucucuccuccagcagcauauggaguuauuggaauccucaguuauccccuuaaugcaucccuuggcagauccaucaacaguuuucaaagaugaugacgaggcggaagauuuuguugagguucaccuuccagaugugcacaagcaggucucaggggucgaucucggucucccaagcugggggaaguaugugcugaugagcgcaggcgucuugaccguacuaauguugaugauuuucuucaugacguguuguagaagggccaauagaguggaaucagcacaacacagucuuggagagagggggaggaaagugucgguaaccucccaaagcgggcgggucauauccucaugggaaucauacaaaagcggaggugagaccaaacuguaa

SEQ ID NO: 62648 - RNA, 1575 nt, Artificial Sequence
  derived and/or modified CDS sequence (wt) from glycoprotein__RABV__AB563892.1
augauuccucaggcucuuuuguuuguaccccuucuggucuuuucauuguguuucgggaaauuccccaucuacacgauaccugacaaacuuggucccuggagccccauugacauacaucaucucagcuguccgaacaauuugguuguagaggaugaaggauguaccaaccugucagguuucucauacauggaacucaaaguaggauacauuucagccaucaaagugaacggguucacuuguacggguguggugacagaggcagaaaccuacaccaacuuuguuggcuauguuacuaccacguuuaagagaaagcacuuccgcccgacgccggaugcgugcagagccgcauauaacuggaagauggcuggugaccccagauaugaagagucucugcauaauccuuacccugauuaucauuggcuccggacugugaagaccaccaaagaaucucuuguuaucauaucuccaaguguggcagauuuggacccauacgacaaaucccuucacucgagaguuuuuccuagcggaaaaugcucaggcauaacagugucuucuaccuacugcucuacuaaccaugacuauaccaucuggaugccugagaauccuagacuagggaccucuugugacauuuucaccaauagcagggggaagagagcauccaaagggagcaagaccuguggauuuguagaugagagaggccuauacaaaucucugaaaggagcuugcaaacugaaacuaugugggguucuuggacucagacuuauggauggaacaugggcagcaauccagacaucagaugagaccaaauggugcccuccugaucaguuggugaaccuacaugacuuucguucggaugaaauugaacaucuuguuguggaggagcuggucaagaaaagggaagagugucuagaugcacuggaguccaucaugaccaccaaguccgugaguuucagacgucucagucacuugaggaaacuugugccuggguuuggaaaagcguauaccauauucaauaagaccuugauggaggcugaugcucauuacaaaucaguccggacuuggaaugagaucaucccaucuaaaggguguuuaagagucggggggagaugucacccucaugugaacgggguuuucuucaaugguaucaucuuaggcccugacggccaugugcuaaucccggagaugcagucgucucuccuccagcagcauauggaguuguuggaauccucaguuauccccuuaaugcaucccuuggcagauccaucaacaguuuucaaagaugaugacgaggcggaagauuuuguugagguucaccuuccagaugugcacaagcaggucucaggagucgaucucggucucccaagcugggggaaguaugugcugaugagcgcaggcgucuugaccguacuaauguugaugauuuucuucaugacguguuguagaagggccaauagaguggaaucagcacaacacagucuuggagagagggggaggaaagugucgguaaccucccaaagcgggcgggucauauccucaugggagucauacaaaaguggaggugagaccaaacuguaa

SEQ ID NO: 62649 - RNA, 1575 nt, Artificial Sequence
  derived and/or modified CDS sequence (wt) from glycoprotein__RABV__AB563893.1
augauuccucaggcucuuuuguuuguaccccuucuggucuuuucauuguguuucgggaaauuccccaucuacacgauaccugacaaacuuggucccuggagccccauugauauacaucaucucagcuguccgaacaauuugguuguagaggaugaaggaugcaccaaccugucagguuucucauacauggaacucaaaguaggauacauuucagccaucaaagugaacggguucacuuguacggguguggugacagaggcagaaaccuacaccaacuuuguuggcuauguuacuaccacguuuaagagaaagcacuuccgcccgaugccggaugcgugcagagccgcauauaacuggaagauggcuggugaccccagauaugaagagucucugcauaauccuuacccugauuaucauuggcuccgaacugugaagaccaccaaagaaucucuuguuaucauaucuccaaguguggcagauuuggacccauacgacaaaucccuucacucgagaguuuuuccuagcggaaaaugcucaggcauaacagugucuucuaccuacugcucuacuaaccaugacuauaccaucuggaugccugagaauccuagacuagggaccucuugugacauuuucaccaauagcagggggaagagagcauccaaagggagcaagaccuguggauuuguagaugagagaggccuauacaaaucucugaaaggagcuugcaaacugaaacuaugugggguucuuggacucagacuuauggauggaacaugggcagcaauccagacaucagaugagaccaaauggugcccuccugaucaguuggugaaccuacaugacuuucguucggaugaaauugaacaucuuguuguggaggagcuggucaagaaaagggaagagugucuagaugcacuggaguccaucaugaccaccaaguccgugaguuucagacgucucagucacuugaggaaacuugugccuggguuuggaaaagcguauaccauauucaauaagaccuugauggaggcugaugcucauuacaaaucaguccggacuuggaaugagaucaucccaucuaaaggguguuuaagagucggggggagaugucacccucaugugaacgggguuuucuucaaugguaucaucuuaggcccugacggccaugugcuaaucccggagaugcagucgucucuccuccagcagcauauggaguuguuggaauccucaguuauccccuuaaugcaucccuuggcagauccaucaacaguuuucaaagaugaugacgaggcggaagauuuuguugagguucaccuuccagaugugcacaagcaggucucaggggucgaucucggucucccaagcugggggaaguaugugcugaugagcgcaggcgucuugaccguacuaauguugaugauuuucuucaugacguguuguagaagggccaauagaguggaaucagcacaacacagucuuggagagagggggaggaaagugucgguaaccucccaaagcgggcgggucauauccucaugggagucauacaaaaguggaggugagaccaaacuguaa

SEQ ID NO: 62650 - RNA, 1575 nt, Artificial Sequence
  derived and/or modified CDS sequence (wt) from glycoprotein__RABV__AB563894.1
augauuccucaggcucuuuuguuuguaccccuucuggucuuuucauuguguuucgggaaauuccccaucuacacgauaccugacaaacuuggucccuggagccccauugauauacaucaucucagcuguccgaacaauuugguuguagaggaugaaggauguaccaaccugucagguuucucauacauggaacucaaaguaggauacauuucagccaucaaagugaacggguucacuuguacggguguggugacggaggcagaaaccuacaccaacuuuguuggcuauguuacuaccacguuuaagagaaagcacuuccgcccgaugccggaugcgugcagagccgcauauaacuggaagauggcuggugaccccagauaugaagagucucugcauaauccuuacccugauuaucauuggcuccggacugugaagaccaccaaagaaucucuuguuaucauaucuccaaguguggcagauuuggacccauacgacaaaucccuucacucgagaguuuuuccuagcgggaaaugcucaggcauaacagugucuucuaccuacugcucuacuaaccaugacuauaccaucuggaugccugagaauccuagacuagggaccucuugugacauuuucaccaauagcagggggaagagagcauccaaagggagcaagaccuguggauuuguagaugagagaggccuauacaaaucucugaaaggagcgugcaaacugaaacuaugugggguucuuggacucagacuuauggauggaacaugggcagcaauccagacaucagaugagaccaaauggugcccuccugaucaguuggugaaccugcaugacuuucguucggaugaaauugaacaucuuguuguggaggagcuggucaagaaaagggaagagugucuagaugcacuggaguccaucaugaccaccaagucugugaguuucagacgucucagucacuugaggaaacuugugccuggguuuggaaaagcguauaccauauucaauaagaccuugauggaggcugaugcucauuacaaaucaguccggacuuggaaugagaucaucccaucuaaaggguguuuaagagucggggggagaugucacccucaugugaacgggguuuucuucaaugguaucaucuuaggcccugacggccaugugcuaaucccggagaugcagucgucucuccuccagcagcauauggaguuguuggaauccucaguuauccccuuaaugcaccccuuggcagauccaucaacaguuuucaaagaugaugacgaggcggaggauuuuguugagguucaccuuccagaugugcacaagcaggucucaggggucgaucucggucucccaagcugggggaaguaugugcugaugagcgcaggcgucuugaccguacuaauguugaugauuuucuucaugacguguuguagaagggccaauagaguggaaucagcacaacacagucuuggagagagggggaggaaagugucgguaaccucccaaagcgggcgggucauauccucaugggagucauacaaaaguggaggugagaccaaacuguaa

SEQ ID NO: 62651 - RNA, 1575 nt, Artificial Sequence
  derived and/or modified CDS sequence (wt) from glycoprotein__RABV__AB563900.1
augauuccucaggcucuuauguuugugccccuucuggucuuuucauuguguuucgggaaauuccccaucuacacgauaccggacaaacuuggccccuggagccccauugauauacaucaucucagcuguccgaacaauuuaguuguggaggaugaaggauguaccaaccugucagguuucucauacauggaacucaaagugggauauauuucagccaucaaagugaacggguucacuuguacggguguggugacagaagcagaaaccuacaccaacuuuguuggcuaugucacuacuacguuuaagagaaagcacuuccgcccgaugccagaugcaugcagagccgcauauaacuggaagauggcuggugaccccagauaugaggagucucugcauaauccuuaccccgauuaucauuggcuccggacugugaagaccaccaaagaaucucuuguuaucauaucuccaaguguggcagauuuggacccauacgauaaaucccuucacucgagaguuuucccuagcggaaaaugcucaggcaugacagugucuucuaccuacugcucuacuaaccacgacuauaccaucuggaugccugagaauccuagacuagggaccucuugugacauuuucaccaauagcagggggaagagagcauccaaagggagcaagaccuguggauuuguagaugagagaggccuauacaaaucucugaaaggagcgugcaaacugaaacuaugugggguucuuggacucagacuuauggauggaacaugggccgcaauccagacaucagaugagaccaaauggugcccuccugaucaguuagugaaccuacaugacuuucguucggaugaaauugaacaccuuguuguggaggagcuggucaagaaaagggaagagugucuagaugcacuggaguccaucaugaccaccaagucugugaguuucagacgucucagucacuugaggaaacuugugccuggguuugggaaagcguauaccauauucaauaagaccuugauggaggcugaugcucacuacaagucaguccggacuuggaaugagaucauccccucuaaaggguguuuaagagucggggggagaugucacccucaugugaacgggguuuucuucaaugguaucaucuuaggcccugacggccaugugcuaaucccggagaugcagucgucucuccuccagcagcauauggaguugcuggaauccucagucauccccuuaaugcaucccuuggcagauccaucaacaguuuuuaaaggugaugacgaggcggaagauuuuguugagguucaccuuccagaugugcacaagcagguuucaggggucgaucucggucucccaagcugggggaaguauguguugaugagcgcaggcguuuugaccgcacuaauguugaugauuuucuuaaugacguguuguaaaagggccaauagagcagaaucagcacaccacagucuuggagagagggggaggaaagugucgguaaccucccaaagcgggcgggucauauccucaugggagucauacaaaaguggaggugagacuaaacuguaa

SEQ ID NO: 62652 - RNA, 1575 nt, Artificial Sequence
  derived and/or modified CDS sequence (wt) from glycoprotein__RABV__AB563901.1
augauuccucaagcucuuuuguuuguaccccuucuggucuuuucauuguguuucggaaaauuucccaucuacacgauaccggacaaacuuggucccuggagccccauugauauacaucaucucagcuguccgaacaauuugguuguggaggaugaaggauguaccaaccugucagguuucucguacauggaacucaagguaggauacauuucagccaucaaagugaacggguucacuuguacggguguagugacagaagcagagaccuacaccaacuuuguuggcuaugucacuaccacguuuaagagaaagcacuuccgcccgacgccggaugcaugcagagccgcauauaacuggaagauggcuggugaccccagauaugaagaaucucugcacaauccuuacccugauuaucauuggcucagaacugugaagaccaccaaagaaucucucguuaucauaucuccaaguguggcagauuuggacccauacgauaaaucccuucacucgagagucuucccuagcggaaaaugcucaggcauaacggugucuucuaccuacugcucuacuaaccacgacuauaccaucuggaugccugagaauccuagacuagggaccucuugugacauuuucaccaauagcagagggaagagggcauccaaagggagcaagaccuguggauuuguagaugaaagaggccuguacaagucucugaaaggagcaugcaaacugaaacugugugggguucuaggacucagacuuauggauggaacaugggccgcgauccagacaucagaugagaccaaauggugcccuccugaucaguuagugaaccuacaugacuuucgcucggaugaaauugaacaucuugucguggaggagcuggucaagaaaagggaagagugucuagaugcacuggaguccaucaugaccaccaagucugugaguuucagacgucucagucacuugaggaaacuugugcccggguuuggaaaagcauauaccauauuuaauaagaccuugauggaggcugaugcucacuacaaaucaguccggacuuggaaugagaucauccccucuaaaggguguuuaagaguaggggggagaugucacccucaugugaacgggguguucuucaaugguaucaucuuaggcccugacggccaugugcuaaucccggagaugcagucgucucuccuccagcagcauauggaguuguuggaauccucagucauccccuugaugcaucccuuggcagauccaucaacaguuuuuaaagaugaugacgaggcggaagauuuuguugagguucaccuuccagaugugcacaagcaggucucaggggucgaucucggucucccaagcugggggaaguauguguugaugagcgcaggcgucuuaaccgcgcuaauguugacgauuuucuuaaugacguguuguagaagggccaauagagcagaaucagcacaacacagucuuggagagagggggaggaaagugucgguaaccccccaaagcgggcggguuauauccucaugggagucauacaaaaguggaggugagaccaagcuguaa

SEQ ID NO: 62653 - RNA, 1575 nt, Artificial Sequence
  derived and/or modified CDS sequence (wt) from glycoprotein__RABV__AB563904.1
augauuccucaagcucuuuuguuuguaccccuucuggucuuuucguuguguuucggaaaauuucccaucuacacgauaccggacaaacuuggucccuggagccccauugauauacaucaucucagcuguccgaacaauuugguuguggaggaugaaggauguaccaaccugucagguuucucguacauggaacucaagguaggauacauuucagccaucaaagugaacggguucacuuguacggguguagugacagaagcagagaccuacaccaacuuuguuggcuaugucacuaccacguuuaagagaaagcacuuccgcccaacgccggaugcaugcagagccgcauauaacuggaagauggcuggugaccccagauaugaagaaucucugcauaauccuuacccugauuaucauuggcucagaacugugaagaccaccaaagaaucucuuguuaucauaucuccaaguguggcagauuuggacccauacgauaaaucccuucacucgagagucuucccuagcggaaaaugcucaggcauaacggugucuucuaccuacugcucuacuaaccacgacuauaccaucuggaugccugagaauccuagacuagggaccucuugugacauuuucaccaauagcagagggaagagggcauccaaagggagcaagaccuguggauuuguagaugaaagaggccuguacaagucucugaaaggagcaugcaaacugaaacugugugggguucugggacucagacuuauggauggaacaugggccgcgauccagacgucagaugagaccaaauggugcccuccugaucaguuagugaaccuacaugacuuucgcucggaugaaauugaacaucuugucguggaggagcuggucaagaaaagggaagagugucuagaugcacuggaguccaucaugaccaccaagucugugaguuucagacgucucagucacuugaggaaacuugugcccggguuuggaaaagcauauaccauauuuaauaagacuuugauggaggcugaugcucacuacaaaucaguccggacuuggaaugagaucauccccucuaaaggguguuuaagaguaggggggagaugucacccucaugugaacgggguguucuucaaugguaucaucuuaggcccugacggccaugugcuaaucccggagaugcagucgucucuccuccagcagcauauggaguuguuggaauccucagucauccccuuaaugcaucccuuggcagauccaucaacaguuuuuaaagaugaugacgaggcggaagauuuuguugagguucaccuuccagaugugcacaagcaggucucaggggucgaucucggucucccaagcugggggaaguauguguugaugagcgcaggcgucuuaaccgcgcuaauguugaugauuuucuugaugacguguuguagaagggccaauagagcagaaucagcacaacacagucuuggagagagggggaggaaagugucgguaaccucccaaagcgggcggguuauauccucaugggagucauacaaaaguggaggugagaccaagcuguaa

SEQ ID NO: 62654 - RNA, 1575 nt, Artificial Sequence
  derived and/or modified CDS sequence (wt) from glycoprotein__RABV__AB563907.1
augauuccucaggcucuuuuguuuguaccccuucuggucuuuucauuguguuucggaaaauuucccaucuacacgauaccggacaaacuuggucccuggagccccauugauauacaucaucucagcuguccgaacaauuugguuguggaggaugaaggauguaccaaccugucagguuucucguacauggaacucaagguaggauacauuucagccaucaaagugaacggguucacuuguacggguguggugacagaagcagagaccuacaccaacuuuguuggcuaugucacuaccacguuuaagagaaagcacuuccgcccaacgccggaugcaugcagagccgcauauaacuggaagauggcuggugaccccagauaugaagaaucucugcauaauccuuacccugauuaucauuggcuccgaacugugaagaccaccaaagaaucucuuguuaucauaucuccaaguguggcagaucuggacccauacgauaaaucccuucacucgagaguuuuuccuagcggaaaaugcucaggcauaacggugucuucuaccuacugcucuacuaaccacgacuauaccaucuggaugccugagaauccuagacuagggaccucgugugacauuuucaccaauagcagagggaagagagcauccaaagggagcaagaccuguggauuuguagaugagagaggccuguacaagucucugaaaggagcaugcaaacugaaacugugugggguucugggacucagacuuauggauggaacaugggccgcgauccagacaucagaugagaccaaauggugcccuccugaucaguuagugaaccuacaugacuuucgcucggaugaaauugaacaucuugucguggaggagcuggucaagaaaagggaagagugucuagaugcacuggaguccaucaugaccaccaagucugugaguuucagacgucucagucacuugaggaaacuugugcccggguuuggaaaagcauauaccauauuuaauaagaccuugauggaggcugaugcucacuacaaaucaguccggacuuggaaugagaucauccccucuaaaggguguuuaagaguaggggggagaugucacccucaugugaacgggguguucuucaaugguaucaucuuaggcccugacggccaugugcuaaucccggagaugcagucgucucuccuccagcagcauauggaguuguuggaauccucagucauccccuuaaugcaucccuuggcagauccaucaacaguuuuuaaagaugaugacgaggcggaagauuuuguugagguucaccuuccagaugugcacaagcaggucucaggggucgaucucggucucccaagcuggggaaaguauguguugaugagcgcaggugucuugaccgcgcuaauguugaugauuuucuuaaugacguguuguagaagggccaauagagcagaaucagcacaacacagucuuggagagaaggggaggaaagugucgguaaccucccaaagcgggcggguuauauccucaugggagucauacaaaaguggaggugagaccaagcuguaa

SEQ ID NO: 62655 - RNA, 1575 nt, Artificial Sequence
  derived and/or modified CDS sequence (wt) from glycoprotein__RABV__AB563911.1
augauuccucaggcucuuuuguuuguaccccuucuggucuuuucauuguguuucgggaaauuucccaucuacacgauaccugacaaacuuggucccuggagccccauugauauacaucaucucagcuguccgaacaauuugguuguagaggaugaaggauguaccaaccugucagguuucucauacauggaacucaaaguaggauacauuucagccaucaaagugaacggguucacuuguacggguguggugacagaggcagaaaccuacaccaacuuuguuggcuauguuacuaccacguuuaagagaaagcacuuccgcccgaugccggaugcgugcagagccgcauauaacuggaagauggcuggugaccccagauaugaagagucucugcauaauccuuacccugauuaucauuggcuccggacugugaagaccaccaaagaaucucuuguuaucauaucuccaaguguggcagauuuggacccauacgacaaaucccuucacucgagaguuuuuccuagcggaaaaugcucaggcauaacagugucuucuaccuacugcucuacuaaccaugacuauaccaucuggaugccugagaauccuagacuagggaccuccugugacauuuucaccaauagcagggggaagagagcauccaaagggagcaagaccuguggauuuguagaugagagaggccuauacaaaucucugaaaggagcuugcaaacugaaacuaugugggguucuuggacucagacuuauggauggaacaugggcagcaauccagacaucagaugagaccaaauggugcccuccugaucaguuggugaaccuacaugacuuucguucggaugaaauugaacaucuuguuguggaggagcuggucaagaaaagggaagagugucuagaugcacuggaguccaucaugaccaccaaguccgugaguuucagacgucucagucacuugaggaaacuugugccuggguuuggaaaagcguauaccauauucaauaagaccuugauggaggcugaugcucauuacaaaucaguccggacuuggaaugagaucaucccaucuaaaggguguuuaagagucggggggagaugucacccucaugugaacgggguuuucuucaaugguaucaucuuaggcccugacggccaugugcuaaucccggagaugcagucgucucuccuccagcagcauauggaguuauuggaauccucaguuauccccuuaaugcaucccuuggcagauccaucaacaguuuucaaagaugaugacgaggcggaagauuuuguugagguucaccuuccagaugugcacaagcaggucucaggggucgaucucggucucccaagcugggggaaguaugugcugaugagcgcaggcgucuugaccguacuaauguugaugauuuucuucaugacguguuguagaagggccaauagaguggaaucagcacaacacagucuuggagagagggggaggaaagugucgguaaccucccaaagcgggcgggucauauccucaugggaaucauacaaaagcggaggugagaccaaacuguaa

SEQ ID NO: 62656 - RNA, 1575 nt, Artificial Sequence
  derived and/or modified CDS sequence (wt) from glycoprotein__RABV__AB563912.1
augauuccucaggcucuuuuguuuguaccccuucuggucuuuucauuguguuucgggaaauuccccaucuacacgauaccugacaaacuuggucccuggagccccauugauauacaucaucucagcuguccgaacaauuugguuguagaggaugaaggauguaccaaccugucagguuucucauacauggaacucaaagugggauacauuucagccaucaaagugaacggguucacuuguacggguguggugacggaggcagaaaccuacaccaacuuuguuggcuauguuacuaccacguuuaagagaaagcacuuccgcccgaugccggaugcgugcagagccgcauauaacuggaagauggcuggugaccccagauaugaagagucucugcauaauccuuacccugauuaucauuggcuccggacugugaagaccaccaaagaaucucuuguuaucauaucuccaaguguggcagauuuggacccauacgacaaaucccuucacucgagaguuuuuccuagcgggaaaugcucaggcauaacagugucuucuaccuacugcucuacuaaccaugacuauaccaucuggaugccugagaauccuagacuagggaccucuugugacauuuucaccaauagcagggggaagagagcauccaaagggagcaagaccuguggauuuguagaugagagaggccuauacaaaucucugaaaggagcgugcaaacugaaacuaugugggguucuuggacucagacuuauggauggaacaugggcagcaauccagacaucagaugagaccaaauggugcccuccugaucaguuggugaaccugcaugacuuucguucggaugaaauugaacaucuuguuguggaggagcuggucaagaaaagggaagagugucuugaugcacuggaguccaucaugaccaccaagucggugaguuucagacgucucagucacuugaggaaacuugugccuggguuuggaaaagcguauaccauauucaauaagaccuugauggaggcugaugcucauuacaaaucaguccggacuuggaaugagaucaucccaucuaaaggguguuuaagagucggggggagaugucacccucaugugaacgggguuuucuucaaugguaucaucuuaggcccugacggccaugugcuaaucccggagaugcagucgucucuccuccagcagcauauggaguuguuggaauccucaguuauccccuuaaugcaccccuuggcagauccaucaacaguuuucaaagaugaugacgaggcggaggauuuuguugagguucaccuuccagaugugcacaagcaggucucaggggucgaucucggucucccaagcugggggaaguaugugcugaugagcacaggcgucuugaccguacuaauguugaugauuuucuucaugauguguuguagaagggccaauagaguggaaucagcacaacacagucuuggagagagggggaggaaagugucgguaaccucccaaagcgggcgggucauauccucaugggagucauacaaaaguggaggugagaccaaacuguaa

SEQ ID NO: 62657 - RNA, 1575 nt, Artificial Sequence
  derived and/or modified CDS sequence (wt) from glycoprotein__RABV__AB563913.1
augauuccucaggcucuuuuguuuguaccccuucuggucuuuucauuguguuucgggaaauuccccaucuacacgauaccugacaaacuuggucccuggagccccauugauauacaucaucucagcuguccgaacaauuugguuguagaggaugaaggauguaccaaccugucagguuucucauacauggaacucaaaguaggauacauuucagccaucaaagugaacggguucaccuguacggguguggugacagaggcagaaaccuacaccaacuuuguuggcuauguuacuaccacguuuaagagaaagcacuuccgcccgaugccggaugcgugcagagccgcauauaacuggaagauggcuggugaccccagauaugaagagucucugcauaauccuuacccugauuaucauuggcuccggacugugaagaccaccaaagaaucucuuguuaucauaucuccaaguguggcagauuuggacccauacgacaaaucccuucacucgagaguuuuuccuagcggaaaaugcucaggcauaacagugucuucuaccuacugcucuacuaaccaugacuauaccaucuggaugccugagaauccuagacuagggaccucuugugacauuuucaccaauagcagggggaagagagcauccaaagggagcaagaccuguggauuuguagaugagagaggccuauacaaaucucugaaaggagcuugcaaacugaaacuaugugggguucuuggacucagacuuauggauggaacaugggcagcaauccagacaucagaugagaccaaauggugcccuccugaucaguuggugaaccuacaugacuuucguucggaugaaauugaacaucuuguuguggaggagcuggucaagaaaagggaagagugucuagaugcacuggaguccaucaugaccaccaaguccgugaguuucagacgucucagucacuugaggaaacuugugccuggguuuggaaaagcguauaccauauucaauaagaccuugauggaggcugaugcucauuacaaaucaguccggacuuggaaugagaucaucccaucuaaaggguguuuaagagucggggggagaugucacccucaugugaacgggguuuucuucaaugguaucaucuuaggcccugacggccaugugcugaucccggagaugcagucgucucuccuccagcagcauauggaguuguuggaauccucaguuauccccuugaugcaucccuuggcagauccaucaacaguuuucaaagaugaugacgaggcggaagauuuuguugagguucaccuuccagaugugcacaagcaggucucaggggucgaucucggucucccaagcugggggaaguaugugcugaugagcgcaggcgucuugaccguacuaauguugaugauuuucuucaugacguguuguagaagggccaauagaguggaaucagcacaacacagucuuggagagagggggaggaaagugucgguaaccucccaaagcgggcgggucauauccucaugggagucauacaaaaguggaggugagaccaaacuguaa

SEQ ID NO: 62658 - RNA, 1575 nt, Artificial Sequence
  derived and/or modified CDS sequence (wt) from glycoprotein__RABV__AB563914.1
augauuccucaggcucuuuuguuuguaccccuucuggucuuuucauuguguuucgggaaauuccccaucuacacuauaccugacaaacuuggucccuggagccccauugauauacaucaucucagcuguccgaacaauuugguuguagaggaugaaggauguaccaaccugucagguuucucauacauggaacucaaaguaggauacauuucagccaucaaagugaacggguucacuuguacggguguggugacggaggcagaaaccuacaccaacuuuguuggcuauguuacuaccacguuuaagagaaagcacuuccgcccgaugccggaugcgugcagagccgcauauaacuggaagauggcuggugaccccagauaugaagagucucugcauaauccuuacccugauuaucauuggcuccggacugugaagaccaccaaagaaucucuuguuaucauaucuccaaguguggcagauuuggacccauacgacaaaucccuucacucgagaguuuuuccuagcggaaaaugcucaggcauaacagugucuucuaccuacugcucuacuaaccaugacuauaccaucuggaugccugagaauccuagacuagggaccucuugugacauuuucaccaauagcagggggaagagagcauccaaagggagcaagaccuguggauuuguagaugagagaggccuauacaaaucucugaaaggagcgugcaaacugaaacuaugugggguucuuggacucagacuuauggauggaacaugggcagcaauccagacaucagaugagaccaaauggugcccuccugaucaguuggugaaccugcaugacuuucguucggaugaaauugagcaucuuguuguggaagagcuggucaagaaaagggaagagugucuagaugcacuggaguccaucaugaccaccaaguccgugaguuucagacgucucagucacuugaggaaacuugugccuggguuuggaaaagcguauaccauauucaauaagaccuugauggaagcugaugcucauuacaaaucaguccggacuuggaaugagaucaucccaucuaaaggguguuuaagagucggggggagaugucacccucaugugaacgggguuuucuucaaugguaucaucuuaggcccugacggccaugugcuaaucccggagaugcagucguaucuccuccagcagcauauggaguuguuggaauccucaguuauccccuuaaugcaucccuuggcagauccaucaacaguuuucaaagaugaugacgaggcggaggauuuuguugagguucaccuuccagaugugcacaagcaggucucaggggucgaucucggucucccaagcugggggaaguaugugcugaugagcgcaggcgucuugaccguacuaauguugaugauuuucuucaugacguguuguagaagggccaauagaguggaaucagcacaacacagucuuggagagagggggaggaaagugucgguaaccucccaaagcgggcgggucauauccucaugggagucauacaaaaguggaggugagaccagacuguaa

SEQ ID NO: 62659 - RNA, 1575 nt, Artificial Sequence
  derived and/or modified CDS sequence (wt) from glycoprotein__RABV__AB563915.1
augauuccucaggcucuuuuguuuguaccccuucuggucuuuucauuguguuucgggaaauuccccaucuacacgauaccugacaaacuuggucccuggagccccauugauauacaucaucucagcuguccgaacaauuugguuguagaggaugaaggaugcaccaaccugucagguuucucauacauggaacucaaaguaggauacauuucagccaucaaagugaacggguucacuuguacggguguggugacagaggcagaaaccuacaccaacuuuguuggcuauguuacuaccacguuuaagagaaagcacuuccgcccgaugccggaugcgugcagagccgcauauaacuggaagauggcuggugaccccagauaugaagagucucugcauaauccuuacccugauuaucauuggcuccgaacugugaagaccaccaaagaaucucuugucaucauaucuccaaguguggcagauuuggacccauacgacaaaucccuucacucgagaguuuuuccuagcggaaaaugcucaggcauaacagugucuucuaccuacugcucuacuaaccaugacuauaccaucuggaugccugagaauccuagacuagggaccucuugugacauuuucaccaauagcagggggaagagagcauccaaagggagcaagaccuguggauuuguagaugagagaggccuauacaaaucucugaaaggagcuugcaaacugaaacuaugugggguucuuggacucagacuuauggauggaacaugggcagcaauccagacaucagaugagaccaaauggugcccuccugaucaguuggugaaccuacaugacuuucguucggaugaaauugaacaucuuguuguggaggagcuggucaagaaaagggaagagugucuagaugcacuggaguccaucaugaccaccaaguccgugaguuucagacgucucagucacuugaggaaacuugugccuggguuuggaaaagcguauaccauauucaauaagaccuugauggaggcugaugcucauuacaaaucaguccggacuuggaaugagaucaucccaucuaaaggguguuuaagagucggggggagaugucacccucaugugaacgggguuuucuucaaugguaucaucuuaggcccugacggccaugugcuaaucccggagaugcagucgucucuccuccagcagcauauggaguuguuggaauccucaguuauccccuuaaugcaucccuuggcagauccaucaacaguuuucaaagaugaugacgaggcggaagauuuuguugagguucaccuuccagaugugcacaagcaggucucaggggucgaucucggucucccaagcugggggaaguaugugcugaugagcgcaggcgucuugaccguacuaauguugaugauuuucuucaugacguguuguagaagggccaauagaguggaaucagcacaacacagucuuggagagagggggaggaaagugucgguaaccucccaaagcgggcgggucauauccucaugggagucauacaaaaguggaggugagaccaaacuguaa

SEQ ID NO: 62660 - RNA, 1575 nt, Artificial Sequence
  derived and/or modified CDS sequence (wt) from glycoprotein__RABV__AB563921.1
augaauccucaggcucuuauguuuguaccucuucuggucuuuucauuguguuucgggaaauuccccaucuacacgauaccggacaaacuuggucccuggagccccauugauauacaucaucucagcuguccgaacaauuugguuguggaggacgaaggauguaccaaccugucagguuucucauacauggaacucaaaguaggauacauuucagccaucaaagugaacggguucacuuguacggguguggugacagaagcagaaacuuacaccaacuuuguuggcuaugucacuaccacguuuaagagaaagcacuuccgcccgacgccggaugcaugcagagccgcauauaacuggaagauggcuggugacccuagauaugaagaaucucugcauaauccuuacccugauuaucauuggcuccggacugugaagaccaccaaagaaucucuuguuaucauaucuccaaguguggcagaucuggacccauacgacaaaucccuucacucgagaguuuuuccuagcggaaaaugcucaggcauaacagugucuucuaccuacugcucuacuaaccacgacuauaccaucuggaugccugagaauccuagacuagggaccucuugugacauuuucaccaauagcagagggaagagagcauccaaagggagcaagaccuguggauuuguagaugagagaggccuauacaagucucugaaaggagcaugcaaauugaaacuaugugggguucuaggacucagacuuauggauggaacaugggccgcgauccagacaucagaugagaccaaauggugcccuccugaucaguuagugaaccuacaugacuuucgcucggaugaaauugagcaucuuguuguggaggagcuggucaagaaaagggaagagugucuagaugcacuggaguccaucaugaccaccaaguccgugaguuucagacgucucagucacuugaggaaacuugugccuggguucggaaaagcauauaccauauucaauaagaccuugauggaggcugaugcucacuacaaaucaguccggacuuggaaugagaucauccccucuaaaggguguuugagagucggggggagaugucacccccaugugaacgggguguucuucaaugguaucauauuaggcccugacggccaugugcugaucccggagaugcagucgucucuccuccagcagcauauggaguuguuggaauccucagucauccccuuaaugcaucccuuggcagauccaucaacaguuuuuaaagaugaugacgaggcggaagauuuuguugagguucaccuuccagaugugcacaagcaggucucagggguugaucucggucucccaagcugggggaaguauguguugaugagugcaggaguccugaccgcacuaauguugaugauuuucuuaaugacguguugcagaagggccaauagagcagaaucagcacaacacagucuuggagagaggggaaggaaagugucgguaaccucccaaagcgggcggguuauauccucaugggagucauacaaaaguggaggugagaccaagcuguag

SEQ ID NO: 62661 - RNA, 1575 nt, Artificial Sequence
  derived and/or modified CDS sequence (wt) from glycoprotein__RABV__AB563922.1
augaauccucaggcucuuauguuuguaccucuucuggucuuuucauuguguuucgggaaauuccccaucuacacgauaccggacaaacuuggucccuggagccccauugauauacaucaucucagcuguccgaacaauuugguuguggaggacgaaggauguaccaaccugucagguuucucauacauggaacucaaaguaggauacauuucagccaucaaagugaacggguucacuuguacggguguggugacagaagcagaaacuuacaccaacuuuguuggcuaugucacuaccacguuuaagagaaagcacuuccgcccgacgccggaugcaugcagagccucauauaacuggaagauggcuggugacccuagauaugaagaaucucugcauaauccuuacccugauuaucauuggcuccggacugugaagaccaccaaagaaucucuuguuaucauaucuccaaguguggcagaucuggacccauaugacaaaucccuucacucgagaguuuuuccuagcggaaaaugcucaggcauaacagugucuucuaccuacugcucuacuaaccacgacuauaccaucuggaugccugagaauccuagacuagggaccucuugugacauuuucaccaauagcagagggaagagagcauccaaagggagcaagaccuguggauuuguagaugagagaggccuauacaagucucugaaaggagcaugcaaauugaaacuaugugggguucuaggacucagacuuauggauggaacaugggccgcgauccagacaucagaugagaccaaauggugcccuccugaucaguuagugaaccuacaugacuuucgcucggaugaaauugagcaucuuguuguagaggagcuggucaagaaaagggaagagugucuagaugcacuggaguccaucaugaccaccaagucugugaguuucagacgucucagucacuugaggaaacuugugccuggguucggaaaagcauauaccauauucaauaagaccuugauggaggcugaugcucacuacaaaucaguccggacuuggaaugagaucauccccucuaaaggguguuugagagucggggggagaugucacccccaugugaacgggguguucuucaaugguaucauauuaggcccugacggccaugugcuaaucccggagaugcagucgucucuccuccagcagcauauggaguuguuggaauccucagucauccccuuaaugcaucccuuggcagauccaucaacaguuuuuaaagaugaugacgaggcggaagauuuuguugagguucaccuuccagaugugcacaagcaggucucagggguugaucucggucucccaagcugggggaaguauguguugaugagcgcaggaguccugaccgcacuaauguugaugauuuucuuaaugacguguugcagaagggccaauagagcagaaucagcacaacacagucuuggggagaggggaaggaaagugucgguaaccucccaaagcgggcggguuauauccucaugggagucauacaaaaguggaggugagaccaagcuguag

SEQ ID NO: 62662 - RNA, 1575 nt, Artificial Sequence
  derived and/or modified CDS sequence (wt) from glycoprotein__RABV__AB563923.1
augauuccucaggcucuuauguuugugccucuucuggucuuuucauuguguuucgggaaauuccccaucuacacgauaccggacaaacuuggucccuggagccccauugauauacaucaucucagcuguccgaacaauuugguuguggaggacgaaggaugcaccaaccuguccgguuucucauacauggaacucaaaguaggauacauuucagccaucaaagugaacggguucacuuguacggguguggugacagaagcagaaacuuacaccaacuuuguuggcuaugucacuaccacguuuaagagaaagcacuuccgcccgacgccggaugcaugcagagccgcauauaacuggaagauggcuggugacccuagauaugaagaaucucugcauaauccuuacccugauuaucauuggcuucggacugugaagaccaccaaagaaucucuuguuaucauaucuccaaguguggcagaucuggacccauacgacaaaucccuucacucgagaguuuuuccuagcggaaaaugcucaggcauaacggugucuucuaccuacugcucuacuaaccacgacuauaccaucuggaugccugagaauccuagacuagggaccucuugugauaucuucaccaauagcagagggaagagagcauccaaagggagcaagaccuguggauuuguagaugagagaggccuauacaaaucucugaaaggagcaugcaaauugaaacuaugugggguucuaggacucagacuuauggauggaacaugggccgcgauccagacaucagaugagaccaaauggugcccuccugaucaguuagugaaccuacaugacuuucgcucggaugaaauugagcaucuuguuguggaggagcuggucaggaaaagggaagagugucuagaugcacuggaguccaucaugaccaccaaguccgugaguuucagacgucucagucacuugagaaaacuugugccuggguucggaaaagcauauaccauauucaauaagaccuugauggaggcugaugcucacuacaaaucaguccggacuuggaaugagaucauccccucuaaaggguguuugagagucggggggagaugucacccccaugugaacgggguguucuucaaugguaucauauuaggcccugacggccaugugcuaaucccggagaugcagucgucucuccuccagcagcauauggaguuguuggaauccucagucauccccuuaaugcaucccuuggcagauccaucaacaguuuuuaaagaugaugacgaggcggaagacuuuguugagguucaccuuccagaugugcacaagcaggucucagggguugaucucggucucccaagcugggggaaguauguguugaugagcgcaggaguccugaccgcacuaauguugaugauuuucuuaaugacguguugcagaagggccaauagagcagagucagcacaacacagucuuggagagaggggaaggaaggugucgguaaccucccaaagcgggcggguuauauccucaugggagucauacaaaaguggaggugagaccaagcuguag

SEQ ID NO: 62663 - RNA, 1575 nt, Artificial Sequence
  derived and/or modified CDS sequence (wt) from glycoprotein__RABV__AB563926.1
augauuccucaggcucuuuuguuuguaccccuucuggucuuuucauuguguuucggaaaauuuccuaucuacacaauaccggacaaacuuggucccuggagccccauugacauacaucaucucagcuguccgaacaauuugguuguggaagaugaaggauguaccaaccugucagguuucucguacauggaacucaagguaggauacauuucugccaucaaagugaacggguucacuuguacggguguagugacggaagcagagaccuacaccaacuuuguuggcuaugucacuaccacguuuaagagaaagcacuuccgcccaacgccggaugcaugcagagccgcauauaacuggaagauggcuggugaccccagauaugaagaaucucugcauaauccuuacccugauuaucauuggcuccgaacugugaagaccaccaaagagucucuuguuaucauaucucccaguguggcagauuuggacccauacgauaaaucccuucacucgagaguuuuuccuagcggaaaaugcucaggcauaacggugucuucuaccuacugcuccacuaaccacgacuauaccaucuggaugccugagaauccuagacuagggaccucuugugacauuuucaccaauagcagagggaagagagcauccaaagggagcaaaaccuguggauuuguagaugagagaggccuguacaagucucugaaaggagcaugcaaacugaaacuaugugggguucugggacucagacuuauggauggaacaugggccgcgauccagacaucagaugagaccaaauggugcccuccugaucaguuagugaaccuacaugacuuucgcucggaugaaauugaacaucuuguuguggaggagcuggucaagaaaagggaagagugucuagaugcacuggaguccaucaugaccaccaagucugugaguuucagacgucucagucacuugaggaaacuugugcccggguuuggaaaagcauauaccauauucaauaagaccuugauggaggcugaugcucacuacaaaucaguccggacuuggaaugagaucauccccucuaaaggguguuuaagagucggggggagaugucacccucaugugaacgggguguucuucaaugguaucaucuuaggcccugacggccaugugcuaaucccggagaugcagucgucucuccuccagcagcauauggaguuauuggaauccucagucauccccuuaaugcaucccuuggcagauccaucaacaguuuuuaaagaugaugacgaggcggaagauuuuguugagguucaccuuccagaugugcacaagcaggucucaggggucgaucucggucucccaagcugggggaaguauguguugaugagcgcaggcgucuugaccgcauuaauguugaugauuuucuuaaugacguguuguagaagggccaauagagcagaaucagcacaacacagucuuggagagggggagaggaaagugucgguaaccucccaaagugggcggguuauauccucaugggagucauacaaaaguggaggugagaccaagcuguaa

SEQ ID NO: 62664 - RNA, 1575 nt, Artificial Sequence
  derived and/or modified CDS sequence (wt) from glycoprotein__RABV__AB563927.1
augauuccucaggcucuuuuguuuguaccccuucuggucuuuucauuguguuucggaaaauuucccaucuacacgauaccggacaaacuuggucccuggagccccauugauauacaucaucucagcuguccgaacaauuugguuguggaggaugaaggauguaccaaccugucagguuucucguacauggaacucaagguaggauacauuucagccaucaaagugaacggguucacuuguacggguguagugacagaagcagagaccuacaccaacuuuguuggcuaugucacuaccacguuuaagagaaagcacuuccgcccaacgccggaugcaugcagagccgcauauaacuggaagauggcuggugaccccagauaugaagaaucucugcauaauccuuacccugauuaucauuggcuccgaacugugaagaccaccaaagagucucuuguuaucauaucuccaaguguggcagauuuggacccauacgauaaaucccuucacucgagaguuuuuccuagcggaaagugcucaggcauaacggugucuucuaccuacugcucuacuaaccacgacuauaccaucuggaugccugagaauccuagacuagggaccucuugugacauuuucaccaauagcagagggaagagagcauccaaagggagcaagaccuguggauuuguagaugagagaggccuguacaagucucugaaaggagcaugcaaacugaaacugugugggguucugggacucagacuuauggauggaacaugggccgcgauccagacaucagaugagaccaaauggugcccuccugaucaguuagugaaccuacaugacuuucgcucggaugaaauugaacaucuugucguggaggagcuggucaagaaaagagaagagugucuagaugcacuggaguccaucaugaccaccaagucugugaguuucagacgucucagucacuugaggaaacuugugcccggguuuggaaaagcauauaccauauuuaauaagaccuugauggaggcugaugcucacuacaaaucaguccggacuuggaaugagaucauccccucuaaaggguguuuaagaguaggggggagaugucacccucaugugaacgggguguucuucaaugguaucaucuuaggcccugacggccacgugcuaaucccggagaugcagucgucucuccuccagcagcauauggaguuguuggaauccucagucauccccuuaaugcaucccuuggcagauccaucaacaguuuuuaaagaugaugacgaggcggaagauuuuguugagguucaccuuccagaugugcacaagcaggucucaggggucgaucucggucucccaagcuggggaaaguauguguugaugagcgcaggcgucuugaccgcgcuaauguugaugauuuucuuaacgacguguuguagaagggccaauagagcagaaucagcacaacacagccuuggagagagggggaggaaagugucaguaaccucccaaagcgggcggguuauauccucaugggagucauacaaaaguggaggugagaccaagcuguaa

SEQ ID NO: 62665 - RNA, 1575 nt, Artificial Sequence
  derived and/or modified CDS sequence (wt) from glycoprotein__RABV__AB563928.1
augauuccucaagcucuuuuguuuguaccccuucuggucuuuucauuguguuucggaaaauuucccaucuacacgauaccggacaaacuuggucccuggagccccauugauauacaucaucucagcuguccgaacaauuugguuguggaggaugaaggauguaccaaccugucagguuucucguacauggaacucaagguaggauacauuucagccaucaaagugaacggguucacuuguacggguguagugacagaagcagagaccuacaccaacuuuguuggcuaugucacuaccacguuuaagagaaagcacuuccgcccaacuccggaugcaugcagagccgcauauaacuggaaaauggcuggugaccccagauaugaagaaucucugcauaauccuuacccugauuaucauuggcucagaacugugaagaccaccaaagaaucucuuguuaucauaucuccaaguguggcagauuuggacccauacgauaaaucccuucacucgagagucuucccuagcggaaaaugcucaggcauaacggugucuucuaccuacugcucuacuaaccacgacuauaccaucuggaugccugagaauccuagacuagggaccucuugugacauuuucaccaauagcagagggaagagggcauccaaagggagcaagaccuguggauuuguagaugaaagaggccuguacaagucucugaaaggagcaugcaaacugaaacugugugggguucugggacuuagacuuauggauggaacaugggccgcgauccagacaucagaugagaccaaauggugcccuccugaucaguuagugaaccuacaugacuuucgcucggaugaaauugaacaucuugucguggaggagcuggucaagaaaagggaagagugucuagaugcacuggaguccaucaugaccaccaagucugugaguuucagacgucucagucacuugaggaaacuugugcccggguuuggaaaagcauauaccauauuuaauaagaccuugauggaggcugaugcucacuacaaaucaguccggacuuggaaugagaucauccccucuaaaggguguuuaagaguaggggggagaugucacccucaugugaacgggguguucuucaaugguaucaucuuaggcccugacggccaugugcuaaucccggagaugcagucgucucuccuccagcagcauauggaguuguuggaauccucagucauccccuuaaugcaucccuuggcagauccaucaacaguuuuuaaagaugaugacgaggcggaagauuuuguugagguucaccuuccagaugugcacaagcaggucucaggggucgaucucggucucccaagcugggggaaguauguguugaugagcgcaggcgucuuaaccgcgcuaauguugaugauuuucuuaaugacguguuguagaagggccaauagagcagaaucagcacaacacagucuuagagagagggggaggaaagugucgguaaccucccaaagcgggcggguuaucuccucaugggagucauacaaaaguggaggugagaccaagcuguaa

SEQ ID NO: 62666 - RNA, 1575 nt, Artificial Sequence
  derived and/or modified CDS sequence (wt) from glycoprotein__RABV__AB563929.1
augauuccucaggcucuuuuguuuguaccccuucuggucuuuucauuguguuucggaaaauuucccaucuacacgauaccggacaaacuuggucccuggagccccauugauauacaucaucucagcuguccgaacaauuugguuguggaggaugaaggauguaccaaccugucagguuucucguacauggaacucaagguaggauacauuucagccaucaaagugaacggguucacuuguacggguguagugacagaagcagagaccuacaccaacuuuguuggcuaugucacuaccacguuuaagagaaagcacuuccgcccaacgccggaugcaugcagagccgcauauaacuggaagauggcuggugaccccagauaugaagaaucucugcauaauccuuacccugauuaucauuggcuccgaacugugaagaccaccaaagagucucuuguuaucauaucuccaaguguggcagauuuggacccauacgauaaaucccuucacucgagaguuuuuccuagcggaaagugcucaggcauaacggugucuucuaccuacugcucuacuaaccacgacuauaccaucuggaugccugagaauccuagacuagggaccucuugugacauuuucaccaauagcagagggaagagagcauccaaagggagcaagaccuguggauuuguagaugagagaggccuguacaagucucugaaaggagcaugcaaacugaaacugugugggguucugggacucagacuuauagauggaacaugggccgcgauccagacaucagaugagaccaaauggugcccuccugaucaguuagugaaccuacaugacuuucgcucggaugaaauugaacaucuugucguggaggagcuggucaagaaaagagaagagugucuagaugcacuggaguccaucaugaccaccaagucugugaguuucagacgucucagucacuugaggaaacuugugcccggguuuggaaaagcauauaccauauuuaauaagaccuugauggaggcugaugcucacuacaaaucaguccggacuuggaaugagaucauccccucuaaaggguguuuaagaguaggggggagaugucacccucaugugaacgggguguucuucaaugguaucaucuuaggcccugacggccaugugcuaaucccggagaugcagucgucucuccuccagcagcauauggaguuguuggaauccucagucauccccuuaaugcaucccuuggcagauccaucaacaguuuuuaaagaugaugacgaggcggaagauuuuguugagguucaccuuccagaugugcacaagcaggucucaggggucgaucucggucucccaagcugggggaaguauguguugaugagcgcaggcgucuugaccgcgcuaauguugaugauuuucuuaacgacguguuguagaagggccaauagagcagaaucagcacaacacagccuuggagagagggggaggaaagugucaguaaccucccaaagcgggcggguuauauccucaugggagucauacaaaaguggaggugagaccaagcuguaa

SEQ ID NO: 62667 - RNA, 1575 nt, Artificial Sequence
  derived and/or modified CDS sequence (wt) from glycoprotein__RABV__AB563930.1
augauuccucaagcucuuuuguuuguaccccuucuggucuuuucauuguguuucggaaaauuucccaucuacacgauaccggacaaacuuggucccuggagccccauugauauacaucaucucagcuguccgaacaauuugguuguggaggaugaaggauguaccaaccugucagguuucucguacauggaacucaagguaggauacauuucagccaucaaagugaacggguucacuuguacggguguagugacagaagcggagaccuacaccaacuuuguuggcuaugucacuaccacguuuaagagaaagcacuuccgcccaacgccggaugcaugcagagccgcauauaacuggaagauggcuggugaccccagauaugaagaaucucugcacaauccuuacccugauuaucauuggcucagaacugugaagaccaccaaagaaucucucguuaucauaucuccaaguguggcagauuuggacccauacgauaaaucccuucacucgagagucuucccuagcggaaaaugcucaggcauaacggugucuucuaccuacugcucuacuaaccacgacuauaccaucuggaugccugagaauccuagacuagggaccucuugugacauuuucaccaauagcagagggaagagggcauccaaagggagcaagaccuguggauuuguagaugaaagaggccuguacaagucucugaaaggagcaugcaaacugaaacugugugggguucuaggacucagacuuauggauggaacaugggccgcgauccagacaucagaugagaccaaauggugcccuccugaucaguuagugaaccuacaugacuuucgcucggaugaaauugaacaucuugucguggaggagcuggucaagaaaagggaagagugucuagaugcacuggaguccaucaugaccaccaagucugugaguuucagacgucucagucacuugaggaaacuugugcccggguuuggaaaagcauauaccauauuuaauaagaccuugauggaggcugaugcucacuacaaaucaguccggacuuggaaugagaucauccccucuaaaggguguuuaagaguaggggggagaugucacccucaugugaacgggguguucuucaaugguaucaucuuaggcccugacggccaugugcuaaucccggagaugcagucgucucuccuccagcagcauauggaguuguuggaauccucagucauccccuugaugcaucccuuggcagauccaucaacaguuuuuaaagaugaugacgaggcggaagauuuuguugagguucaccuuccagaugugcacaagcaggucucaggggucgaucucggucucccaagcugggggaaguauguguugaugagcgcaggcgucuuaaccgcgcuaauguugacgauuuucuuaaugacguguuguagaagggccaauagagcagaaucagcacaacacagucuuggagagagggggaggaaagugucgguaaccucccaaagcgggcggguuauauccucaugggagucauacaaaaguggaggugagaccaagcuguaa

SEQ ID NO: 62668 - RNA, 1575 nt, Artificial Sequence
  derived and/or modified CDS sequence (wt) from glycoprotein__RABV__AB563931.1
augauuccucaagcucuuuuguuuguaccccuucuggucuuuucauuguguuucggaaaauuucccaucuacacgauaccggacaaacuuggucccuggagccccauugauauacaucaucucagcuguccgaacaauuugguuguggaggaugaaggauguaccaaccugucagguuucucguacauggaacucaagguaggauacauuucagccaucaaagugaacggguucacuuguacggguguagugacagaagcagagaccuacaccaacuuuguuggcuaugucacuaccacguuuaagagaaagcacuuccgcccaacuccggaugcaugcagagccgcauauaacuggaaaauggcuggugaccccagauaugaagaaucucugcauaauccuuacccugauuaucauuggcucagaacugugaagaccaccaaagaaucucuuguuaucauaucuccaaguguggcagauuuggacccauacgauaaaucccuucacucgagagucuucccuagcggaaaaugcucaggcauaacggugucuucuaccuacugcucuacuaaccacgacuauaccaucuggaugccugagaauccuagacuagggaccucuugugacauuuucaccaauagcagagggaagagggcauccaaagggagcaagaccuguggauuuguagaugaaagaggccuguacaagucucugaaaggagcaugcaaacugaaacugugugggguucugggacuuagacuuauggauggaacaugggccgcgauccagacaucagaugagaccaaauggugcccuccugaucaguuagugaaccuacaugacuuucgcucggaugaaauugaacaucuugucguggaggagcuggucaagaaaagggaagagugucuagaugcacuggaguccaucaugaccaccaagucugugaguuucagacgucucagucacuugaggaaacuugugcccggguuuggaaaagcauauaccauauuuaauaagaccuugauggaggcugaugcucacuacaaaucaguccggacuuggaaugagaucauccccucuaaaggguguuuaagaguaggggggagaugucacccucaugugaacgggguguucuucaaugguaucaucuuaggcccugacggccaugugcuaaucccggagaugcagucgucucuccuccagcagcauauggaguuguuggaauccucagucauccccuuaaugcaucccuuggcagauccaucaacaguuuuuaaagaugaugacgaggcggaagauuuuguugagguucaccuuccagaugugcacaagcaggucucaggggucgaucuaggucucccaagcugggggaaguauguguugaugagcgcaggcgucuuaaccgcgcuaauguugaugauuuucuuaaugacguguuguagaagggccaauagagcagaaucagcacaacacagucuuagagagagggggaggaaagugucgguaaccucccaaagcgggcggguuaucuccucaugggagucauacaaaaguggaggugagaccaagcuguaa

SEQ ID NO: 62669 - RNA, 1575 nt, Artificial Sequence
  derived and/or modified CDS sequence (wt) from glycoprotein__RABV__AB563933.2
augauuccucaggcucuuuuguuuguacccauucuggucuuuucauuguguuucggaaaauuucccaucuacacgauaccggacaaacuuggucccuggagccccauugauauacaucaucucagcuguccgaacaauuugguuguggaggaugaaggauguaccaaccugucagguuucucguacauggaacucaagguaggauacauuucagccaucaaagugaacggguucacuuguacggguguagugacagaagcagagaccuacaccaacuuuguuggcuaugucacuaccacguuuaagagaaagcacuuccgcccaacgccggaugcaugcagagccgcauauaacuggaagauggcuggugaccccagauaugaagaaucucugcauaauccuuacccugauuaucauuggcuccgaacugugaagaccaccaaagaaucucuuguuaucauaucuccaaguguggcagauuuggacccauacgauaaaucccuucacucgagaguuuuuccuagcggaaaaugcucaggcauaacgguguccucuaccuacugcuccacuaaccacgauuauaccauauggaugccugaaaauccuagacuagggaccucuugugacauuuucaccaauagcagagggaagagagcauccaaagggagcaagaccuguggauuuguagaugagagaggccuguacaagucucugaaaggagcaugcaaacugaaacuaugugggguucugggacucagacuuauggauggaacaugggccgcgauccagacaucagaugagaccaaauggugcccuccugaucaguuagugaaccuacaugacuuucgcucggaugaaauugaacaucuuguuguggaggaguuggucaagaaaagggaagagugucuagaugcacuggaguccaucaugaccaccaagucugugaguuucagacgucucagucacuugaggaaacuuguacccggguuuggaaaagcauauaccauauucaauaagaccuugauggaggcugaugcucacuacaaaucaguccggacuuggaacgagaucauccccucuaaaggguguuuaagagucggggggagaugucacccucaugugaacgggguguucuucaaugguaucaucuuaggcccugauggccaugugcuaaucccggagaugcagucgucucuccuccagcagcauauggaguuguuggaauccucagucauccccuuaaugcaucccuuggcagauccaucaacaguuuuuaaagaugaugacgaggcagaagauuuuguugagguucaccuuccagaugugcacaagcaggucucaggggucgaccucggucucccaagcugggggaaguauguguugaugagcgcaggcgucuugaccgcacuaauguugaugauuuucuuaaugacgugcuguagaagggccaauaggguagaaucagcacaacacagucuuggagagagggggaggaaagugucggugaccucccaaagcgggcggguuauauccucaugggagucauacaaaaguggaggugagaccaagcuguaa

SEQ ID NO: 62670 - RNA, 1575 nt, Artificial Sequence
  derived and/or modified CDS sequence (wt) from glycoprotein__RABV__AB563934.1
augauuccucaggcucuuuuguuuguaccccuucuggucuuuucauuguguuucggaaaauuucccaucuacacgauaccggacaaacuuggucccuggagccccauugauauacaucaucucagcuguccgaacaauuugguuguggaggaugaaggauguaccaaccugucagguuucucguacauggaacucaagguaggauacauuucagccaucaaagugaacggguucacuuguacggguguagugacagaagcagagaccuacaccaacuuuguuggcuaugucacuaccacguuuaagagaaagcacuuccgcccaacgccggaugcaugcagagccgcauauaacuggaagauggcuggugaccccagauaugaagaaucucugcauaauccuuacccugauuaucauuggcuccgaacugugaagaccaccaaagaaucucuuguuaucauaucuccuaguguggcagauuuggacccauacgauaaaucccuucacucgagaguuuuuccuagcggaaaaugcucaggcauaacggugucuucuaccuacugcuccacuaaccacgacuauaccaucuggaugccugagaauccuagacuagggaccucuugugacauuuucaccaacagcagagggaagagagcaucaaaagggagcaagaccuguggauuuguagaugagagaggccuguacaagucucugaaaggagcaugcaaacugaaacuaugugggguucugggacucagacuuauggauggaacaugggccgcgauccagacaucagaugagaccaaauggugcccuccugaucaguuagugaaccuacaugacuuucgcucggaugaaaucgaacaucuuguuguggaggagcuggucaagaaaagggaagagugucuagaugcacuggaguccaucaugaccacaaagucugugaguuucagacgucucagucacuugaggaaacuugugcccggguuuggaaaagcauauaccauauucaauaagaccuugauggaggcugaugcucacuacaaaucaguccggacuuggaaugagaucauccccucuaaaggguguuuaagagucggggggagaugucacccucauguaaacgggguguucuucaaugguaucaucuuaggcccugacggccaugugcuaaucccggagaugcagucgucucuccuccagcagcauauggaguuauuggaauccucagucauccccuuaaugcaucccuuggcagauccaucaacaguuuuuaaagaugaugacgaggcggaagauuuuguugagguucaccuuccagaugugcacaagcaggucucaggggucgaucucggucucccaagcugggggaaguauguguugaugagcgcaggcgucuugaccgcauuaauguugaugauuuucuuaaugacguguugucgaagggccaauagagcagaaucagcacaacacagucuuggagagagggggaggaaagugucgguaaccucccaaagcgggcggguuauauccucaugggagucauacaaaaguggaggugagaccaagcuguaa

SEQ ID NO: 62671 - RNA, 1575 nt, Artificial Sequence
  derived and/or modified CDS sequence (wt) from glycoprotein__RABV__AB563937.1
augauuccucaagcucuuuuguuuguaccccuucuggucuuuucauuguguuucgggaaauuucccaucuacacgauaccggacaaacuuggucccuggagccccauugauauacaucaucucagcuguccgaacaauuugguuguggaggaugaaggauguaccaaccugucagguuucucguacauggaacucaagguaggauacauuucagccaucaaagugaacggguucacuuguacggguguagugacagaagcagagaccuacaccaacuuuguuggcuaugucacuaccacguuuaagagaaagcacuuccgcccaacgccggaugcaugcagagccgcauauaacuggaagauggcuggugaccccagauaugaagaaucucugcacaauccuuacccugauuaucauuggcucagaacugugaagaccaccaaagaaucucucguuaucauaucuccaaguguggcagauuuggacccauacgauaaaucccuucacucgagagucuucccuagcggaaaaugcucaggcauaacggugucuucuaccuacugcucuacuaaccacgacuauaccaucuggaugccugagaauccuagacuagggaccucuugugacauuuucaccaauagcagagggaagagggcauccaaagggagcaagaccuguggauuuguagaugaaagaggccuguacaagucucugaaaggagcaugcaaacugaaacugugugggguucuaggacucagacuuauggauggaacaugggccgcgauccagacaucagaugagaccaaauggugcccuccugaucaguuagugaaccuacaugacuuucgcucggaugaaauugaacaucuugucguggaggagcuggucaagaaaagggaagagugucuagaugcacuggaguccaucaugaccaccaagucugugaguuucagacgucucagucacuugaggaaacuugugcccggguuuggaaaagcauauaccauauuuaauaagaccuugauggaggcugaugcucacuacaaaucaguccggacuuggaaugagaucauccccucuaaaggguguuuaagaguaggggggagaugucacccucaugugaacgggguguucuucaaugguaucaucuuaggcccugacggccaugugcuaaucccggagaugcagucgucucuccuccagcagcauauggaguuguuggaauccucagucauccccuugaugcaucccuuggcagauccaucaacaguuuuuaaagaugaugacgaggcggaagauuuuguugagguucaccuuccagaugugcacaagcaggucucaggggucgaucucggccucccaagcugggggaaguauguguugaugagcgcaggcgucuuaaccgcgcuaauguugacgauuuucuuaaugacguguuguagaagggccaauagagcagaaucagcacaacacagucuuggagagagggggaggaaagugucgguaaccucccaaagcgggcggguuauauccucaugggagucauacaaaaguggaggugagaccaagcuguaa

SEQ ID NO: 62672 - RNA, 1575 nt, Artificial Sequence
  derived and/or modified CDS sequence (wt) from glycoprotein__RABV__AB563938.1
augauuccucaagcucuuuuguuuguaccccuucuggucuuuucguuguguuucggaaaauuucccaucuacacgauaccggacaaacuuggucccuggagccccauugauauacaucaucucagcuguccgaacaauuugguuguggaggaugaaggauguaccaaccugucagguuucucguacauggaacucaagguaggauacauuucagccaucaaagugaacggguucacuuguacggguguagugacagaagcagagaccuacaccaacuuuguuggcuaugucacuaccacguuuaagagaaagcacuuccgcccaacgccggaugcaugcagagccgcauauaacuggaagauggcuggugacccccgauaugaagaaucucugcauaauccuuacccugauuaucauuggcucagaacugugaagaccaccaaagaaucucuuguuaucauaucuccaaguguggcagauuuggacccauacgauaaaucccuucacucgagagucuucccuagcggaaaaugcucaggcauaacggugucuucuaccuacugcucuacuaaccacgacuauaccaucuggaugccugagaauccuagacuagggaccucuugugacauuuucaccaauagcagagggaagagggcauccaaagggagcaagaccuguggauuuguagaugaaagaggccuguacaagucucugaaaggagcaugcaaacugaaacugugugggguucuaggacucagacuuauggauggaacaugggccgcgauccagacgucagaugagaccaaauggugcccuccugaucaguuagugaaccuacaugacuuucgcucggaugaaaucgaacaucuugucguggaggagcuggucaagaaaagggaagagugucuagaugcacuggaguccaucaugaccaccaagucugugaguuucagacgucucagucacuugaggaaacuugugcccggguuuggaaaagcauauaccauauuuaauaagacuuugauggaggcugaugcucacuacaaaucaguccggacuuggaaugagaucauccccucuaaaggguguuuaagaguaggggggagaugucacccucaugugaacgggguguucuucaaugguaucaucuuaggcccugacggccaugugcuaaucccggagaugcagucgucucuccuccagcagcauauggaguuguuggaauccucagucauccccuuaaugcaucccuuggcagauccaucaacaguuuuuaaagaugaugacgaggcggaagauuuuguugagguucaccuuccagaugugcacaagcaggucucaggggucgaucucggucucccaagcugggggaaguauguguugaugagcgcaggcgucuuaaccgcgcuaauguugaugauuuucuuaaugacguguuguauaagggccaauagagcagaaucagcacaacacagucuuggagagagggggaggaaagugucgguaaccucccaaagcgggcggguuauauccucaugggagucauacaaaaguggaggugagaccaagcuguaa

SEQ ID NO: 62673 - RNA, 1575 nt, Artificial Sequence
  derived and/or modified CDS sequence (wt) from glycoprotein__RABV__AB563939.1
augauuccucaagcucuuuuguuuguaccccuucuggucuuuucauuguguuucggaaaauuucccaucuacacgauaccggacaaacuuggucccuggagccccauugauauacaucaucucagcuguccgaacaauuugguuguggaggaugaaggauguaccaaccugucagguuucucguacauggaacucaagguaggauacauuucagccaucaaagugaacggguucacuuguacggguguagugacagaagcagagaccuacaccaacuuuguuggcuaugucacuaccacguuuaagagaaagcacuuccgcccaacgccggaugcaugcagagccgcauauaacuggaagauggcuggugaccccagauaugaagaaucucugcacaauccuuacccugauuaucauuggcucagaacugugaagaccaccaaagaaucucuuguuaucauaucuccaaguguggcagauuuggacccauacgauaaaucccuucacucgagagucuucccuagcggaaaaugcucaggcauaacggugucuucuaccuacugcucuacuaaccacgacuauaccaucuggaugccugagaauccuagacuagggaccucuugugacauuuucaccaauagcagagggaagagggcauccaaagggagcaagaccuguggauuuguagaugaaagaggccuguacaagucucugaaaggagcaugcaaacugaaacugugugggguucuaggacucagacuuauggauggaacaugggccgcgauccagacaucagaugagaccaaauggugcccuccugaucaguuagugaaccuacaugacuuucgcucggaugaaauugaacaucuugucguggaggagcuggucaagaaaagggaagagugucuagaugcacuggaguccaucaugaccaccaagucugugaguuucagacgucucagucacuugaggaaacuugugcccggguuuggaaaagcauauaccauauuuaauaagaccuugauggaggcugaugcucacuacaaaucaguccggacuuggaaugagaucauccccucuaaaggguguuuaagaguaggggggagaugucacccucaugugaacgggguguucuucaaugguaucaucuuaggcccugacggccaugugcuaaucccggagaugcagucgucucuccuccagcagcauauggaguuguuggaauccucagucauccccuugaugcaucccuuggcagauccaucaacaguuuuuaaagaugaugacgaggcggaagauuuuguugagguucaccuuccagaugugcacaagcaggucucaggggucgaucucggucucccaagcugggggaaguauguguugaugagcgcaggcgucuuaaccgcgcuaauguugacgauuuucuuaaugacguguuguagaagggccaauagagcagaaucagcacaacacagucuuggagagagggggaggaaagugucgguaaccucccaaagcgggcggguuauauccucaugggagucauacaaaaguggaggugagaccaagcuguaa

SEQ ID NO: 62674 - RNA, 1575 nt, Artificial Sequence
  derived and/or modified CDS sequence (wt) from glycoprotein__RABV__AB563942.1
augauuccucaggcucuuuuguuuguaccccuucuggucuuuucguuguguuucggaaaauuucccaucuacacgauaccggacaaacuuggucccuggagccccauugauauacaucaucucagcuguccgaacaauuugguuguggaggaugaaggauguaccaaccugucagguuucucguacauggaacucaagguaggauacauuucagccaucaaaguaaacggguucacuuguacggguguagugacagaagcagagaccuacaccaacuuuguuggcuaugucacuaccacguuuaagagaaagcacuuccgcccaacgccggaugcaugcagagccgcauauaacuggaagauggcuggugaccccagauaugaagaaucucugcauaauccuuacccugauuaucauuggcuccgaacugugaagaccaccaaagaaucucuuguuaucauaucuccaaguguggcagauuuggacccauaugauaaaucccuucacucgagaguuuuuccuagcggaaaaugcucaggcauaacggugucuucuaccuacugcuccacuaaccacgacuauaccaucuggaugccugagaauccuagacuagggaccucuugugacauuuucaccaauagcagagggaagagagcauccaaagggagcaagaccuguggauuuguggaugagagaggccuguacaagucucugaaaggagcaugcaaacugaaacuaugugggguucugggacucagacuuauggauggaacaugggccgcgauccagacaucagaugagaccaaauggugcccuccugaccaguuagugaaccuacaugacuuucgcucggaugaaauugagcaucuuguuguggaggagcuggucaagaaaagggaagagugucuagaugcacuggaguccaucaugaccaccaagucugugaguuucagacgucucagucacuugaggaaacuugugcccggguuuggaaaagcauauaccauauucaacaagaccuugauggaggcugaugcucacuacaaaucaguccggacuuggaaugagaucauccccuccaaaggguguuuaagagucggggggagaugucacccucaugugaacgggguguucuucaaugguaucaucuuaggcccugacggccaugugcuaaucccggagaugcagucaucucuccuccagcagcauauggaguuauuggaauccucaaucauucccuuaaugcaucccuuggcagauccaucaacaguuuuuaaagaugaugacgaggcggaagauuuuguugagguucaccuuccagaugugcacaagcaggucucaggggucgaucucggucucccaagcugggggaaguauguguugaugagcgcaggcgucuugaccgcauuaauguugaugauuuucuuaaugacguguuguagaaggaccaauagagcagaaucagcacaacacagucuuggagagagggggaggaaagugucgguaaccucccaaagcgggcggguuauauccucaugggagucauacaaaaguggaggugagaccaagcuguaa

SEQ ID NO: 62675 - RNA, 1575 nt, Artificial Sequence
  derived and/or modified CDS sequence (wt) from glycoprotein__RABV__AB563945.1
augauuccucaggcucuuuuguuuguaccccuucuggucuuuucauuguguuucggaaaauuucccaucuacacgauaccggacaaacuuggucccuggagccccauugauauacaucaucucagcuguccgaacaauuugguuguggaggaugaaggauguaccaaccugucagguuucucguacauggaacucaagguaggauacauuucagccaucaaagugaacggguucacuuguacggguguagugacagaagcagagaccuacaccaacuuuguuggcuauguaacuaccacguuuaagagaaagcacuuccgcccaacgccggaugcaugcagagccgcauauaacuggaagauggcuggugaccccagauaugaagaaucucugcauaauccuuacccugauuaucauuggcuccgaacugugaagaccaccaaagaaucucuuguuaucauaucuccaaguguggcagauuuggacccauaugauaaaucccuucacucgagaguuuuuccuagcggaaaaugcucaggcauaacggugucuucuaccuacugcuccacuaaccacgacuauaccaucuggaugccugagaauccuagacuagggaccucuugugacauuuuuaccaauagcagagggaagagagcauccaaagggaguaagaccuguggauuuguggaugagagaggccuguacaagucucugaaaggagcaugcaaacugaaacuaugugggguucugggacucagacuuauggauggaacaugggccgcgauccagacaucagaugagaccaaauggugcccuccugaucaguuagugaaccuacaugacuuucgcucggaugaaauugagcaucuuguuguggaggagcuggucaagaaaagggaagagugucuagaugcacuggaguccaucaugaccaccaagucugugaguuucagacgucucagucacuugaggaaacuugugcccggguuuggaaaagcauauaccauauucaauaagaccuugauggaggcugaugcucacuacaaaucaguccggacuuggaaugagaucauccccucuaaaggguguuuaagagucggagggagaugucacccucaugugaacgggguguucuucaaugguaucaucuuaggcccugacggccaugugcuaaucccggaaaugcagucgucucuccuccagcagcauauggaguuauuggaauccucagucauucccuuaaugcaucccuuggcagauccaucaacaguuuuuaaagaugaugacgaggcggaagauuuuguugagguucaccuuccagaugugcacaagcaggucucaggggucgaucucggucucccaagcugggggaaguauguguugaugagcgcaggcgucuugaccgcauuaauguugaugauauucuuaaugacguguuguagagggaccaauagagcagaaucagcacaacacagucuuggagagagggggaggaaagugucgguaaccucccaaaacgggcggguuauauccucaugggagucauacaaaaguggaggugagaccaagcuguaa

SEQ ID NO: 62676 - RNA, 1575 nt, Artificial Sequence
  derived and/or modified CDS sequence (wt) from glycoprotein__RABV__AB563946.2
augauuccucaggcucuuuuguuuguaccccuucugaucucuucauuguguuucggaaaauuucccaucuacacgauaccggacaaacuuggucccuggagccccauugauauacaucaucucagcuguccgaacaaucuaguugucgaggaugaaggauguaccaaccugucagguuucucguacauggaacucaagguaggauacauuucagccaucaaagugaacggguucacuuguacggguguagugacagaagcagagaccuacaccaacuuuguuggcuaugucacuaccacguuuaagagaaagcacuuccgcccaacgccggaugcaugcagagccgcauauaacuggaagauggccggugaccccagauaugaagaaucucugcauaauccuuacccugauuaucauuggcuccgaacugugaagaccaccaaagagucucuuguuaucauaucuccaaguguggcagauuuggacccauacgauaaaucccuucacucgagaguuuuuccuagcggaaaaugcucaggcauaacggugucuuccaccuacugcucuacuaaccacgacuauaccaucuggaugccugagaauccuagacuagggaccucuugugacauuuucacuaauagcagagggaagagagcauccaaagggaguaagaccuguggauuuguagaugagagaggccuguacaagucucugaaaggagcaugcaaacugaaacuauguggaguucugggacucagacuuauggauggaacaugggccgcgauccagacaucagaugagaccaaauggugcccuccugaucaguuagugaaccuacaugacuuucgcucggaugaaauugaacaucuuguuguggaggagcuggucaagaaaagggaagagugucuagaugcacuggaguccaucaugaccaccaaguccgugaguuucagacgucucagucacuugaggaaacuugugcccggguuuggaaaagcauauaccauauucaauaagaccuugauggaggcugaugcucacuacaaaucaguccggacuuggaaugagaucaucccaucuaaaggguguuuaagagucggggggagaugucacccucaugugaacgggguguucuucaaugguaucaucuuaggcccugacggccaugugcuaauuccggagaugcagucgucucuccuccagcagcauauggaguuguuggaauccucagucauccccuuaaugcaucccuuggcagauccaucaacaguuuuuaaagaugaugacgaggcggaagauuuuguugagguucaccuuccagaugugcacaagcaggucucaggggucgaucucggucucccaagcugggggaaguauguguugaugagcgcaggcgucuugaccgcacuaauguugaugauuuucuuaaugacguguuguagaagggccaauagagcagaaucagcacaacacagucuuggagagagggggaggaaagugucgguaaccucccaaagcgggcggguuauauccucaugggagucauacaaaaguggaggugagaccaagcuguaa

SEQ ID NO: 62677 - RNA, 1575 nt, Artificial Sequence
  derived and/or modified CDS sequence (wt) from glycoprotein__RABV__AB563947.1
augauuccucaggcucuuauguuugugccccuucuggucuuuucauuguguuucgggaaauuccccaucuacacgauaccggacaaacuuggccccuggagccccauugauauacaucaucucagcuguccgaacaauuuaguuguggaggaugaaggauguaccaaccugucagguuucucauacauggaacucaaagugggauauauuucagccaucaaagugaacggguucacuuguacggguguggugacagaagcagaaaccuacaccaacuuuguuggcuaugucacuacuacguuuaagagaaagcacuuccgcccgaugccagaugcaugcagagccgcauauaacuggaagauggcuggugaccccagauaugaggagucucugcauaauccuuaccccgauuaucauuggcuccggacugugaagaccaccaaagaaucucuuguuaucauaucuccaaguguggcagauuuggacccauacgauaaaucccuucacucgagagucuucccuagcggaaaaugcucaggcaugacagugucuucuaccuacugcucuacuaaccacgacuauaccaucuggaugccugagaauccuagacuagggaccucuugugacauuuucaccaauagcagggggaagagagcauccaaagggagcaagaccuguggauuuguagaugagagaggccuauacaaaucucugaaaggagcgugcaaacugaaacuaugugggguucuuggacucagacuuauggauggaacaugggccgcaauccagacaucagaugagaccaaauggugcccuccugaucaguuagugaaccuacaugacuuucguucggaugaaauugaacaccuuguuguggaggagcuggucaagaaaagggaagagugucuagaugcacuggaguccaucaugaccaccaagucugugaguuucagacgucucagucacuugaggaaacuugugccuggguuugggaaagcguauaccauauucaacaagaccuugauggaggcugaugcucacuacaagucaguccggacuuggaaugagaucauccccucuaaaggguguuuaagagucggggggagaugucacccucaugugaacgggguuuucuucaaugguaucaucuuaggcccugacggccaugugcuaaucccggagaugcagucgucucuccuccagcagcauauggaguugcuggaauccucagucauccccuuaaugcaucccuuggcagauccaucaacaguuuuuaaaggugaugacgaggcggaagauuuuguugagguucaccuuccagaugugcacaagcagguuucaggggucgaucucggucucccaagcugggggaaguauguguugaugagcgcaggcgucuugaccgcacuaauguugaugauuuucuuaaugacguguuguaaaagggccaauagagcagaaucagcacaccacagucuuggagagagggggaggaaagugucgguaaccucccaaagcgggcgggucauauccucaugggagucauacaaaaguggaggugagacuaaacuguaa

SEQ ID NO: 62678 - RNA, 1575 nt, Artificial Sequence
  derived and/or modified CDS sequence (wt) from glycoprotein__RABV__AB563948.1
augauuccucaggcucuuauguuugugccccuucuggucuuuucauuguguuucgggaaauuccccaucuacacgauaccggacaaacuuggccccuggagccccauugauauacaccaucucagcuguccgaacaauuuaguuguggaggaugaaggauguaccaaccugucagguuucucauacauggaacucaaagugggauauauuucagccaucaaagugaacggguucacuuguacggguguggugacagaagcagaaaccuacaccaacuuuguuggcuaugucacuacuacguuuaagagaaagcacuuccgcccgaugccagaugcaugcagagccgcauauaacuggaagauggcuggugaccccagauaugaggagucucugcauaauccuuaccccgauuaucauuggcuccggacugugaagaccaccaaagaaucucuuguuaucauaucuccaaguguggcagauuuggacccauacgauaaaucccuucacucgagaguuuucccuggcggaaaaugcucaggcaugacagugucuucuaccuacugcucuacuaaccacgacuauaccaucuggaugccugagaauccuagacuagggaccucuugugacauuuucaccaauagcagggggaagagagcauccaaagggagcaagaccuguggauuuguagaugagagaggccuauacaaaucucugaaaggagcgugcaaacugaaacuaugugggguucuuggacucagacuuauggauggaacaugggccgcaauccagacaucagaugagaccaaauggugcccuccugaucaguuagugaaccuacaugacuuucguucggaugaaauugaacaccucguuguggaggagcuggucaagaaaagggaagagugucuagaugcacuggaguccaucaugaccaccaagucugugaguuucagacgucucagucacuugaggaaacuugugccuggguuugggaaagcguauaccauauucaauaagaccuugauggaggcugaugcucacuacaagucaguccggacuuggaaugagaucauccccucuaaaggguguuuaagagucggggggagaugucacccucaugugaacgggguuuucuucaaugguaucaucuuaggcccugacggccaugugcuaaucccggagaugcagucgucucuccuccagcagcauauggaguugcuggaauccucagucauccccuuaaugcaucccuuggcagauccaucaacaguuuuuaaaggugaugacgaggcggaagauuuuguugagguucaccuuccagaugugcacaagcagguuucaggggucgaucucggucucccaagcugggggaaguauguguugaugagcgcaggcgucuugaccgcacuaauguugaugauuuucuuaaugacguguuguaaaagggccaauagagcagaaucagcacaccacagucuuggagagagggggaggaaagugucgguaaccucccaaagcgggcgggucauauccucaugggagucauacaaaaguggaggugagacuaaacuguaa

SEQ ID NO: 62679 - RNA, 1575 nt, Artificial Sequence
  derived and/or modified CDS sequence (wt) from glycoprotein__RABV__AB563949.1
augauuccucaggcucuuauguuugugccccuucuggucuuuucauuguguuucgggaaauuccccaucuacacgauaccggacaaacuuggccccuggagccccauugauauacaucaucucagcuguccgaacaauuuaguuguggaggaugaaggauguaccaaccugucagguuucucauacauggaacucaaagugggauauauuucagccaucaaagugaacggguucacuuguacggguguggugacagaagcagaaaccuacaccaacuuuguuggcuaugucacuacuacguuuaagagaaagcacuuccgcccgaugccagaugcaugcagagccgcauauaacuggaagauggcuggugaccccagauaugaggagucucugcauaauccuuaccccgauuaucauuggcuccggacugugaagaccaccaaagaaucucuuguuaucauaucuccaaguguggcagauuuggacccauacgauaaaucccuucacucgagaguuuucccuagcggaaaaugcucaggcaugacagugucuucuaccuacugcucuacuaaccacgacuauaccaucuggaugccugagaauccuagacuagggaccucuugugacauuuucaccaauagcagggggaagagagcauccaaagggagcaagaccuguggauuuguagaugagagaggccuauacaaaucucugaaaggagcgugcaaacugaaacuaugugggguucuuggacucagacuuauggauggaacaugggccgcaauccagacaucagaugagaccaaauggugcccuccugaucaguuagugaaccuacaugacuuucguucggaugaaauugaacaccuuguuguggaggagcuggucaagaaaagggaagagugucuagaugcacuggaguccaucaugaccaccaagucugugaguuucagacgucucagucacuugaggaaacuugugccuggguuugggaaagcguauaccauauucaauaagaccuugauggaggcugaugcucacuacaagucaguccggacuuggaaugagaucauccccucuaaaggguguuuaagagucggggggagaugucacccucaugugaacgggguuuucuucaaugguaucaucuuaggcccugacggccaugugcuaaucccggagaugcagucgucucuccuccagcagcauauggaguugcuggaauccucagucauccccuuaaugcaucccuuggcagauccaucaacaguuuuuaaaggugaugacgaggcggaagauuuuguugagguucaccuuccagaugugcacaagcagguuucaggggucgaucucggucucccaagcugggggaaguauguguugaugagcgcaggcgucuugaccgcacuaauguugaugauuuucuuaaugacguguuguaaaagggccaauagagcagaaucagcacaccacaaucuuggagagagggggaggaaagugucgguaaccucccaaagcgggcgggucauauccucaugggagucauacaaaaguggaggugagacuaaacuguaa

SEQ ID NO: 62680 - RNA, 1575 nt, Artificial Sequence
  derived and/or modified CDS sequence (wt) from glycoprotein__RABV__AB563950.1
augauuccucaggcucuuauguuugugccccuucuggucuuuucauuguguuucgggaaauuccccaucuacacgauaccggacaaacuuggccccuggagccccauugauauacaucaucucagcuguccgaacaauuuaguuguggaggaugaaggauguaccaaccugucagguuucucauacauggaacucaaagugggauauauuucagccaucaaagugaacggguucacuuguacggguguggugacagaagcagaaaccuacaccaacuuuguuggcuaugucacuacuacguuuaagagaaagcacuuccgcccgaugccagaugcaugcagagccgcauauaacuggaagauggcuggugaccccagauaugaggagucucugcauaauccuuaccccgauuaucauuggcuccggacugugaagaccaccaaagaaucucuuguuaucauaucuccaaguguggcagauuuggacccauacgauaaaucccuucacucgagaguuuuuccuagcggaaaaugcucaggcauaacagugucuucuaccuacugcucuacuaaccacgacuauaccaucuggaugccugagaauccuagacuagggaccucuugugacauuuucaccaauagcagggggaagagagcauccaaagggagcaagaccuguggauuuguagaugagagaggccuauacaaaucucugaaaggagcgugcaaacugaaacuaugugggguucuuggacucagacuuauggauggaacaugggccgcaauccagacaucagaugagaccaaauggugcccuccugaucaguuagugaaccuacaugacuuucguucggaugaaauugaacaccuuguuguggaggagcuggucaagaaaagggaagagugucuagaugcacuggaguccaucaugaccaccaaguccgugaguuucagacgucucagucacuugaggaaacuugugccuggguuugggaaagcguauaccauauucaauaagaccuugauggaggcugaugcucacuacaagucaguccggacuuggaaugagaucauccccucuaaaggguguuuaagagucggggggagaugucacccucaugugaacgggguuuucuucaaugguaucaucuuaggcccugacggccaugugcuaaucccggagaugcagucgucucuccuccagcagcauauggaguugcuggaauccucagucauccccuuaaugcaucccuuggcagauccaucaacaguuuuuaaaggugaugacgaggcggaagauuuuguugagguucaccuuccagaugugcacaagcagguuucaggggucgaucucggucucccaagcugggggaaguauguguugaugagcgcaggcgucuugaccgcacuaauguugaugaucuucuuaaugacguguuguaaaagggccaauagagcagaaucagcacaccacagucuuggagagagggggaggaaagugucuguaaccucccaaagcgggcgggucauauccucaugggagucauacaaaaguggaggugagacuaaacuguaa

SEQ ID NO: 62681 - RNA, 1575 nt, Artificial Sequence
  derived and/or modified CDS sequence (wt) from glycoprotein__RABV__AB563951.1
augauuccucaggcucuuuuguuuguaccccuucuggucuuuucauuguguuucggaaaauuucccaucuacacgauaccggacaaacuuggucccuggagccccauugauauacaucaucucagcuguccgaacaauuugguuguggaggaugaaggauguaccaaccugucagguuucucguacauggaacucaagguaggauacauuucagccaucaaagugaacggguucacuuguacggguguagugacagaagcagagaccuacaccaacuuuguuggcuaugucacuaccacguuuaagagaaagcacuuccgcccaacgccggaugcaugcagagccgcauauaacuggaagauggcuggugaccccagauaugaagaaucucugcauaauccuuacccugauuaucauuggcuccgaacugugaagaccaccaaagaaucucuuguuaucauaucuccaaguguggcagauuuggacccauaugauaaaucccuucacucgagaguuuuuccuagcggaaaaugcucaggcauaacggugucuucuaccuacugcucuacuaaccacgacuauaccaucuggaugccugagaauccuagacuagggaccucuugugacauuuucaccaauagcagagggaagagagcaucuaaagggagcaagaccuguggauuuguagaugagagaggccuguacaagucucugaaaggagcaugcaaacugaaacuaugugggguucugggacucagacuuauggauggaacaugggccgcgauccagacaucagaugagaccaaauggugcccuccugaucaguuagugaaccugcaugacuuucgcucggaugaaauugaacaucuuguuguggaggagcuggucaagaaaagggaagagugucuagaugcacuggaguccaucaugaccaccaagucugugaguuucagacgucucagucacuugaggaaacuugugcccggguuuggaaaagcauauaccauauucaauaaaaccuugauggaggcugaugcucacuacaaaucaguccggacuuggaaugagaucauccccacuaaaggguguuuaagagucggggggagaugucacccucaugugaacgggguguucuucaaugguaucaucuuaggcccugacggccaugugcuaaucccggagaugcagucgucucuccuccagcagcacauggaguuguuggaauccucagucaucccuuuaaugcaucccuuggcagauccaucaacaguuuuuaaagaugaugacgaggcggaagauuuuguugagguucaccuuccagaugugcacaagcaggucucaggggucgaucucggucuuccaagcugggggaaguauguguugaugagcgcaggcgucuugaccgcauuaauguugaugauuuucuuaacgacguguuguagaagggccgauagagcagaaucagcgcaacacagucuuggagagagggggaggaaagugucgguaaccucucagagcgggcggguuauauccucaugggagucauacaaaaguggaggugagaccaagcuguaa

SEQ ID NO: 62682 - RNA, 1575 nt, Artificial Sequence
  derived and/or modified CDS sequence (wt) from glycoprotein__RABV__AB563952.2
augauuccucaggcucuuuuguuuguaccccuucuggucuuuucauuguguuucggaaaauuuccuaucuacacaauaccggacaaacuuggucccuggagccccauugauauacaucaucucagcuguccgaacaauuugguuguggaggaugaaggauguaccaacuugucagguuucucguacauggaacucaagguaggauacauuucagccaucaaagugaacggguucacuuguacggguguagugacagaagcagagaccuacaccaacuuuguuggcuaugucacuaccacguuuaagagaaagcacuuccgcccaaccccggaugcaugcagagccgcauauaacuggaagauggcuggugaccccagauaugaagaaucucugcauaauccuuacccugauuaucauuggcuccgaacugugaagaccaccaaagaaucucuuguuaucauaucuccaaguguggcagauuuggacccauacgauaaaucccuucacucgagaguuuuuccuagcggaaaaugcucaggcauaacggugucuucuaccuacugcuccacuaaccacgacuauaccaucuggaugccugagaauccuagacuagggaccucuugugacauuuucaccaauagcagagggaagagagcauccaaagggagcaagaccuguggauuuguagaugagagaggccuguacaagucucugaaaggagcaugcaaacugaaacuaugugggguucugggacucagacuuauggauggaacaugggccgcgauccagacaucagaugagaccaaauggugcccuccugaucaguuagugaaccuacaugacuuucgcucggaugaaauugaacaucuuguuguggaggagcuggucaagaaaagagaagagugucuagaugcacuggaguccaucaugaccaccaagucugugaguuucagacgucucagucacuugaggaaacuugugcccggguuuggaaaagcauauaccauauucaauaagaccuugauggaggcugaugcucacuacaaaucaguccggacuuggaaugagaucauccccucuaaaggguguuuaagagucggggggagaugucacccucaugugaacgggguguucuucaaugguaucaucuuaggcccugacggccaugugcuaaucccggagaugcagucgucucuccuccagcagcauauggaguuauuggaauccucagucauccccuuaaugcaucccuuggcagauccaucaacaguuuuuaaagaugaugacgaggcggaagauuuuguugagguucaccuuccagaugugcacaagcaggucucaggggucgaucucggucucccaagcugggggaaguauguguugaugagcgcaggcgucuugaccgccuuaauguugaugauuuucuuaaugacguguugcagaaggaccaauagagcagaaucagcacaacacagucuuggagagagggggaggaaagugucgguaaccucccaaagugggcggguuauauccucaugggagucauacaaaaguggaggugagaccaagcuguaa

SEQ ID NO: 62683 - RNA, 1575 nt, Artificial Sequence
  derived and/or modified CDS sequence (wt) from glycoprotein__RABV__AB563953.2
augauuccucaggcucuuuuguuuguaccccuucuggucuuuucguuguguuucggaaaauuuccuaucuacacaauaccggacaaacuuggucccuggagccccauugauauacaucaucucagcuguccgaacaauuugguuguggaggaugaaggauguaccaacuugucagguuucucguacauggaacucaagguaggauacauuucagccaucaaagugaacggguucacuuguacggguguagugacagaagcagagaccuacaccaacuuuguuggcuaugucacuaccacguuuaagagaaagcacuuccgcccaaccccggaugcaugcagagccgcauauaacuggaagauggcuggugaccccagauaugaagaaucucugcauaauccuuacccugauuaucauuggcuccgaacugugaagaccaccaaagaaucucuuguuaucauaucuccaaguguggcagauuuggacccauacgauaaaucccuucacucgagaguuuuuccuagcggaaaaugcucaggcauaacggugucuucuaccuacugcuccacuaaccacgacuauaccaucuggaugccugagaauccuagacuagggaccucuugugacauuuucaccaauagcagagggaagagagcauccaaagggagcaagaccuguggauuuguagaugagagaggccuguacaagucucugaaaggagcaugcaaacugaaacuaugugggguucugggacucagacuuauggauggaacaugggccgcgauccagacaucagaugagaccaaauggugcccuccugaucaguuagugaaccuacaugacuuucgcucggaugaaauugaacaucuuguuguggaggagcuggucaagaaaagagaagagugucuagaugcacuggaguccaucaugaccaccaagucugugaguuucagacgucucagucacuugaggaaacuugugcccggguuuggaaaagcauauaccauauucaauaagaccuugauggaggcugaugcucacuacaaaucaguccggacuuggaaugagaucauccccucuaaaggguguuuaagagucggggggagaugucacccucaugugaacgggguguucuucaaugguaucaucuuaggcccugacggccaugugcuaaucccggagaugcagucgucucuccuccagcagcauauggaguuauuggaauccucagucauccccuuaaugcaucccuuggcagauccaucaacaguuuuuaaagaugaugacgaggcggaagauuuuguugagguucaccuuccagaugugcacaagcaggucucaggggucgaucucggucucccaagcugggggaaguauguguugaugagcgcaggcgucuugaccgccuuaauguugaugauuuucuuaaugacguguugcagaaggaccaauagagcagaaucagcacaacacagucuuggagagagggggaggaaagugucgguaaccucccaaagugggcggguuauauccucaugggagucauacaaaaguggaggugagaccaagcuguaa

SEQ ID NO: 62684 - RNA, 1575 nt, Artificial Sequence
  derived and/or modified CDS sequence (wt) from glycoprotein__RABV__AB563954.1
augauuccucaggcucuuuuguuuguaccccuucuggucuuuucauuguguuucggaaaauuuccuaucuacacaauaccggacaaacuuggucccuggagccccauugauauacaucaucucagcuguccgaacaauuugguuguggaggaugaaggauguaccaaccugucagguuucucguacauggaacucaagguaggauacauuucagccaucaaagugaacggguucacuuguacggguguagugacagaagcagagaccuacaccaacuuuguuggcuaugucacuacuacguuuaagagaaagcacuuccgcccaacgccggaugcaugcagagccgcauauaacuggaagauggcuggugaccccagauaugaagaaucucugcauaauccuuacccugauuaucauuggcuccgaacugugaagaccaccaaagaaucucuuguuaucauaucuccaaguguggcagauuuggacccauaugauaaaucccuucacucgagaguuuuuccuagcggaaaaugcucaggcauaacagugucuucuaccuacugcucaacuaaccacgacuauaccauuuggaugccugagaauccuagacuagggaccucuugugacauuuucaccaauagcagagggaagagagcauccaaagggagcaagaccuguggauuuguagaugagagaggccuguacaagucucugaaaggagcaugcaaacugaaacuaugugggguucugggacucagacuuauggauggaacaugggccgcgauccagacaucagaugagaccaaauggugcccuccugaucaguuagugaaccuacaugacuuucgcucggaugaaauugaacaucuuguuguggaggagcuggucaagaaaagagaagagugucuagaugcacuggaguccaucaugaccaccaagucugugaguuucagacgucucagucacuugaggaaacuugugcccggguuuggaaaagcauauaccauauucaauaagaccuugauggaggcugaugcucacuacaaaucaguccggacuuggaaugagaucauccccucuaaaggguguuuaagagucggggggagaugucacccucaugugaacgggguguucuucaauggcaucaucuuaggcccugacggccaugugcuaaucccggagaugcagucgucucuccuccagcagcauauggaguuauuggaauccucaguaauccccuuaaugcaccccuuggcagauccaucaacaguuuuuaaagaugaugacgaggcggaagauuuuguugagguucaccuuccagaugugcacaagcaggucucaggggucgaucucggucucccaagcugggggaaguauguguugaugagcgcaggcgucuugaccgccuuaauguugaugauuuucuuaaugacguguuguagaagggccaauagagcagaaucagcacaacacagucuuggagagagggggagaaaagugucgguaaccucccaaagugggcggguuauauccucaugggagucauacaagaguggaggugagaccaagcuguaa

SEQ ID NO: 62685 - RNA, 1575 nt, Artificial Sequence
  derived and/or modified CDS sequence (wt) from glycoprotein__RABV__AB563955.1
augauuccucaggcucuuuuguuuguaccccuucuggucuuuucauuguguuucggaaaauuucccaucuacacgauaccggacaaacuugguccauggagccccauugauauacaucaucucagcuguccgaacaauuugguuguggaggaugaaggauguaccaaccugucagguuucucguacauggaacucaagguaggauacauuucagccaucaaaguaaacggguucacuuguacggguguagugacagaagcagagaccuacaccaacuuuguuggcuaugucacuaccacguuuaagagaaagcacuuccgcccaacgccggaugcgugcagagccgcauauaacuggaagauggcuggugaccccagauaugaagaaucucugcauaauccuuacccugauuaucauuggcuccgaacugugaagaccaccaaagaaucucuuguuaucauaucuccaaguguggcagauuuggacccauaugauaaauccccucacucgagagucccuccuagcggaaaaugcucaggcauaacggugucuucuaccuacugcucuacuaaccacgacuauaccaucuggaugccugagaauccuaggcuagggaccucuugugacauuuucaccaauagcagagggaagagagcauccaaagggagcaagaccuguggauuuguagaugagaggggccuguacaagucucugaaaggagcaugcaaacugaaacuaugugggguccugggacucagacuuauggauggaacaugggccgcgauccagacaucagaugagaccaaauggugcccuccugaucaguuagugaaccugcaugacuuucgcucggaugaaauugaacaucuuguuguggaggagcuggucaagaaaagggaagagugucuagaugcacuggaguccaucaugaccaccaagucugugaguuucagacgucucagucacuugaggaaacuugugcccggguuuggaaaagcauauaccauauucaauaaaaccuugauggaggcugaugcucacuacaaaucaguccggacuuggaaugagaucauccccucuaaaggguguuuaagagucggggggagaugucacccucaugugaacgggguguucuucaaugguaucaucuuaggcccugacggccaugugcuaaucccggagaugcagucgucucuccuccagcagcacauggaguuguuggaauccucagucaucccuuuaaugcaucccuuggcagauccaucaacaguuuuuaaagaugaugacgaggcggaagauuuuguugagguucaccuuccagaugugcacaagcaggucucaggggucgaucucggucuuccaagcugggggaaguauguguugaugagcgcaggcgucuugaccgcauuaauguugaugaucuucuuaacgacguguuguagaagggccaauagagcagaaucggcgcaacacagucuuggagagagggggaggaaagugucgguaaccucccaaagcgggcggguuauauccucaugggagucauacaaaaguggaggugagaccaagcuguaa

SEQ ID NO: 62686 - RNA, 1575 nt, Artificial Sequence
  derived and/or modified CDS sequence (wt) from glycoprotein__RABV__AB563956.1
augauuccucaggcucuuuuguuuguaccccuucuggucuuuucauuguguuucggaaaauuucccaucuacacgauaccggacaaacuuggucccuggagccccauugauauacaucaucucagcuguccgaacaauuugguuguggaggaugaaggauguaccaaccugucagguuucucguacauggaacucaagguaggauacauuucagccaucaaagugaacggguucacuuguacggguguagugacagaagcagagaccuacaccaacuuuguuggcuaugucacuaccacguuuaagagaaagcacuuccgcccaacgccggaugcaugcagagccgcauaugacuggaagauggcuggugaccccagauaugaagaaucucugcauaauccuuacccugauuaucauuggcuccgaacugugaagaccaccaaagaaucuccuguuaucauaucuccaaguguggcagauuuggacccauaugauaaaucccuucacucgagaguccccccuagcggaaaaugcucaggcauaacggugucuucuaccuacugcucuacuaaccacgacuauaccaucuggaugccugagaacccuagacuagggaccucuugugacauuuucaccaauagcagagggaagagagcaucuaaagggagcaagaccuguggauuuguagaugagagaggccuguacaagucucugaaaggagcaugcaaacugaaacuaugugggguucugggacucagacuuauggauggaacaugggccgcgauccagacaucagaugagaccaaauggugcccuccugaucaguuagugaaccugcaugacuuucgcucggaugaaauugaacaucuuguuguggaggagcuggucaagaaaagggaagagugucuagaugcacuggaguccaucaugaccaccaagucugugaguuucagacgucucagucacuugaggaaacuugugcccggguuuggaaaagcauauaccauauucaauaaaaccuugauggaggcugaugcucacuacaaaucaguccggacuuggaaugagaucauccccucuaaaggguguuuaagagucggggggagaugucacccucaugugaacgggguguucuucaaugguaucaucuuaggcccugacggccaugugcuaaucccggagaugcagucgucucuccuccagcagcacauggaguuguuggaauccucagucaucccuuuaaugcaucccuuggcagauccaucaacaguuuuuaaagaugaugacgaggcggaagauuuuguugagguucaccuuccagaugugcacaagcaggucucaggggucgaucucggucuuccaagcugggggaaguauguguugaugagcgcaggcaucuugaccgcauuaauguugaugauuuucuuaacgacguguuguagaagggccgauagagcagaaucagcgcaacacagucuuggagagagggggaggaaagugucgguaaccucccagagcgggcggguuauauccucaugggagucauacaaaaguggaggugagaccaagcuguaa

SEQ ID NO: 62687 - RNA, 1575 nt, Artificial Sequence
  derived and/or modified CDS sequence (wt) from glycoprotein__RABV__AB563957.1
augauuccucaggcucuuuuguuuguaccccuuauggucuuuucauuguguuucggaaaauuuccuaucuacacaauaccggacaaacuuggucccuggagccccauugauauacaucaucucagcuguccgaacaauuugguuguggaggaugaaggauguaccaacuugucagguuucucguacauggaacucaagguaggauacauuucagccaucaaagugaacggguucacuuguacggguguagugacagaagcagagaccuacaccaacuuuguuggcuaugucacuaccacguuuaagagaaagcacuuccgcccaaccccggaugcaugcagagccgcauauaacuggaagauggcuggugaccccagauaugaagaaucucugcauaauccuuacccugauuaucauuggcuccgaacugugaagaccaccaaagaaucucuuguuaucauaucuccaaguguggcagauuuggacccauacgauaaaucccuucacucgagagcuuuuccuagcggaaaaugcucaggcauaacggugucuucuaccuacugcuccacuaaccacgacuauaccaucuggaugccugagaauccuagacuagggaccucuugugacauuuucaccaauagcagagggaagagagcauccaaagggagcaagaccuguggauuuguagaugagagaggccuguacaagucucugaaaggagcaugcaaacugaaacuaugugggguucugggacucagacuuauggauggaacaugggccgcgauccagacaucagaugagaccaaauggugcccuccugaucaguuagugaaccuacaugacuuucgcucggaugaaauugaacaucuuguuguggaggagcuggucaagaaaagagaagagugucuagaugcacuggagucuaucaugaccaccaagucugugaguuucagacgucucagucacuugaggaaacuugugcccggguuuggaaaagcauauaccauauucaauaagaccuugauggaggcugaugcucacuacaaaucaguccggacuuggaaugagaucauccccucuaaaggguguuuaagagucggggggagaugucacccucaugugaacgggguguucuucaaugguaucaucuuaggcccugacggccaugugcuaaucccggagaugcagucgucucuccuccagcagcauauggaguuauuggaauccucagucauccccuuaaugcaucccuuggcagauccaucaacaguuuuuaaagaugaugacgaggcggaagauuuuguugagguucaccuuccagaugugcacaagcaggucucaggggucgaucucggucucccaagcugggggaaguauguguugaugagcgcaggcgucuugaccgccuuaauguugaugauuuucuuaaugacguguugcagaaggaccaauagagcagaaucagcacaacacagucuuggagagagggggaggaaagugucgguaaccucccaaagugggcggguuauauccucaugggagucauacaaaaguggaggugagaccaagcuguaa

SEQ ID NO: 62688 - RNA, 1575 nt, Artificial Sequence
  derived and/or modified CDS sequence (wt) from glycoprotein__RABV__AB563958.1
augauuccucaggcucuuauguuugugccccuucuggucuuuucauuguguuucgggaaauuccccaucuacacgauaccggacaaacuuggccccuggagccccauugauauacaucaucucagcuguccgaacaauuuaguuguggaggaugaaggauguaccaaccugucagguuucucauacauggaacucaaagugggauauauuucagccaucaaagugaacggguucacuuguacggguguggugacagaagcagaaaccuacaccaacuuuguuggcuaugucacuacuacguuuaagagaaagcacuuccgcccgaugccagaugcaugcagagccgcauauaacuggaagauggcuggugaccccagauaugaggagucucugcauaauccuuaccccgauuaucauuggcuccggacugugaagaccaccaaagaaucucuuguuaucauaucucccaguguggcagauuuggacccauacgauaaaucccuucacucgagaguuuucccuagcggaaaaugcucaggcaugacagugucuucuaccuacugcucuacuaaccacgacuauaccaucuggaugccugagaauccuagacuagggaccucuugugacauuuucaccaauagcagggggaagagagcauccaaagggagcaagaccuguggauuuguagaugagagaggccuauacaaaucucugaaaggagcgugcaaacugaaacuaugugggguucuuggacucagacuuauggauggaacaugggccgcaauccagacaucagaugagaccaaauggugcccuccugaucaguuagugaaccuacaugacuuucguucggaugaaauugaacaccuuguuguggaggagcuggucaagaaaagggaagagugucuagaugcacuggaguccaucaugaccaccaagucugugaguuucagacgucucagucacuugaggaaacuugugccuggguuugggaaagcguauaccauauucaacaagaccuugauggaggcugaugcucacuacaagucaguccggacuuggaaugagaucauccccucuaaaggguguuuaagagucggggggagaugucacccucaugugaacgggguuuucuucaaugguaucaucuuaggcccugacggccaugugcuaaucccggagaugcagucgucucuccuccagcagcauauggaguugcuggaauccucagucauccccuuaaugcaucccuuggcagauccaucaacaguuuuuaaaggugaugacgaggcggaagauuuuguugagguucaccuuccagaugugcacaagcagguuucaggggucgaucucggucucccaagcugggggaaguauguguugaugagcgcaggcgucuugaccgcacuaauguugaugauuuucuuaaugacguguuguaaaagggccaauagagcagaaucagcacaccacagucuuggagagagggggaggaaagugucgguaaccucccaaagcgggcgggucauauccucaugggagucauacaaaaguggaggugagacuaaacuguaa

SEQ ID NO: 62689 - RNA, 1575 nt, Artificial Sequence
  derived and/or modified CDS sequence (wt) from glycoprotein__RABV__AB563959.1
augauuccucaggcucuuauguuugugccccuucuggucuuuucauuguguuucgggaaauuccccaucuacacgauaccggacaaacuuggccccuggagccccauugauauacaucaucucagcuguccgaacaauuuaguuguggaggaugaaggauguaccaaccugucagguuucucauacauggaacucaaagugggauauauuucagccaucaaagugaacggguucacuuguacggguguggugacagaagcagaaaccuacaccaacuuuguuggcuaugucacuacuacguuuaagagaaagcacuuccgcccgaugccagaugcaugcagagccgcauauaacuggaagauggcuggugaccccagauaugaggagucucugcauaauccuuaccccgauuaucauuggcuccggacugugaagaccaccaaagaaucucuuguuaucauaucuccaaguguggcagauuuggacccauacgauaaaucccuucacucgagaguuuucccuagcggaaaaugcucaggcacgacagugucuucuaccuacugcucuacuaaccacgacuauaccaucuggaugccugagaauccuagacuagggaccucuugugacauuuucaccaauagcagggggaagagagcauccaaagggagcaagaccuguggauuuguagaugagagaggccuauacaaaucucugaaaggagcgugcaaacugaaacuaugugggguucuuggacucagacuuauggauggaacaugggccgcaauccagacaucagaugagaccaaauggugcccuccugaucaguuagugaaccuacaugacuuucguucggaugaaauugaacaccuuguuguggaggagcuggucaagaaaagggaagagugucuagaugcacuggaguccaucaugaccaccaagucugugaguuucagacgucucagucacuugaggaaacuugugccuggguuugggaaagcguauaccauauucaauaagaccuugauggaggcugaugcucacuacaagucaguccggacuuggaaugagaucauccccucuaaaggguguuuaagagucggggggagaugucacccucaugugaacgggguuuucuucaaugguaucaucuuaggcccugacggccaugugcuaaucccggagaugcagucgucucuccuccagcagcauauggaguugcuggaauccucagucauccccuuaaugcaucccuuggcagauccaucaacaguuuuuaaaggugaugacgaggcggaagauuuuguugagguucaccuuccagaugugcacaagcagguuucaggggucgaucucggucucccaagcugggggaaguauguguugaugagcgcaggcguuuugaccgcacuaauguugaugauuuucuuaaugacguguuguaaaagggccaauagagcagaaucagcacaccacagucuuggagagagggggaggaaagugucgguaaccucccaaagcgggcgggucauauccucaugggagucauacaaaaguggaggugagacuaaacuguaa

SEQ ID NO: 62690 - RNA, 1575 nt, Artificial Sequence
  derived and/or modified CDS sequence (wt) from glycoprotein__RABV__AB563960.1
augauuccucaggcucuuuuguuuguacccuuucuggucuuuucauuguguuucgggaaauuccccaucuacacaauaccugacaaacuuggucccuggagccccauugauauacaucaucucagcuguccgaacaauuugguuguagaggaugaaggauguaccaaccugucagguuucucauacauggaacucaaaguaggauacauuucagccaucaaagugaacggguucacuuguacggguguggugacggaggcagaaaccuacaccaacuuuguuggcuauguuacuaccacguuuaagagaaagcacuuccgcccgaugccagaugcgugcagagccgcauauaacuggaagauggcuggugaccccagauaugaagagucucugcauaauccuuacccugauuaucauuggcuccggacugugaagaccaccaaagaaucucuuguuaucauaucuccaaguguggcagauuuggacccauacgacaaaucccuucacucgagaguuuuuccuagcggaaaaugcucaggcauaacagugucuucuaccuacugcucuacuaaccaugacuauaccaucuggaugccugagaauccuagauuagggaccucuugugacauuuucaccaauagcagggggaagagagcauccaaagggagcaagaccuguggauuuguagaugagagaggccuauacaaaucucugaaaggagcgugcaaacugaaacuaugugggguucuuggacucagacuuauggauggaacaugggcagcaauccagacaucagaugagaccaaauggugcccuccugaucaguuggugaaccugcaugacuuucguucggaugaaauugaacaucuuguuguggaggagcuggucaagaaaagggaagagugucuagaugcacuggaguccaucaugaccaccaaguccgugaguuucagacgucucagucacuugaggaaacuugugccuggguuuggaaaagcguauaccauauucaauaagaccuugauggaggcugaugcucauuacaaaucaguccggacuuggaaugagaucaucccaucuaaaggauguuuaagagucggggggagaugucacccucaugugaacgggguuuucuucaaugguaucaucuuaggcccugacggccaugugcuaaucccggagaugcagucgucucuccuccagcagcauauggaguuguuggaauccucaguuauccccuuaaugcaucccuuggcagauccaucaacaguuuucaaagaugaugacgaggcggaggauuuuguugagguucaccuuccagaugugcacaagcaggucucaggggucgaucucggucucccaagcugggggaaguaugugcugaugagcgcaggcgucuugaccguacuaauguugaugauuuucuucaugacguguuguagaagggccaauagaguggaaucagcacaacacagucuuggagagagggggaggaaagugucgguaaccucccaaagcgggcgggucauauccucaugggagucauacaaaaguggaggugagaccaaacuguaa

SEQ ID NO: 62691 - RNA, 1575 nt, Artificial Sequence
  derived and/or modified CDS sequence (wt) from glycoprotein__RABV__AB563961.1
augauuccucaggcucuuuuguuuguaccccuucuggucuuuucauuguguuucgggaaauuccccaucuacacgauaccugacaaacuuggucccuggagccccauugauauacaucaucucagcuguccgaacaauuugguuguagaggaugaaggauguaccaaccugucagguuucucauacauggaacucaaaguaggauacauuucagccaucaaagugaacggguucaccuguacggguguggugacagaggcagaaaccuacaccaacuuuguuggcuauguuacuaccacguuuaagagaaagcacuuccgcccgaugccggaugcgugcagagccgcauauaacuggaagauggcuggugaccccagauaugaagagucucugcauaauccuuacccugauuaucauuggcuccggacugugaagaccaccaaagaaucucuuguuaucauaucuccaaguguggcagauuuggacccauacgacaaaucccuucacucgagaguuuuuccuagcggaaaaugcucaggcauaacagugucuucuaccuacugcucuacuaaccaugacuauaccaucuggaugccugagaauccuagacuagggaccucuugugacauuuucaccaauagcagggggaagagagcauccaaagggagcaagaccuguggauuuguagaugagagaggccuauacaaaucucugaaaggagcuugcaaacugaaacuaugugggguucuuggacucagacuuauggauggaacaugggcagcaauccagacaucagaugagaccaaauggugcccuccugaucaguuggugaaccuacaugacuuucguucggaugaaauugaacaucuuguuguggaggagcuggucaagaaaagggaagagugucuagaugcacuggaguccaucaugaccaccaaguccgugaguuucagacgucucagucacuugaggaaacuugugccuggguuuggaaaagcguauaccauauucaauaagaccuugauggaagcugaugcucauuacaaaucaguccggacuuggaaugagaucaucccaucuaaaggguguuuaagagucggggggagaugucacccucaugugaacgggguuuucuucaaugguaucaucuuaggcccugacggccaugugcuaaucccggagaugcagucgucucuccuccagcagcauauggaguuguuggaauccucaguuauccccuugaugcaucccuuggcagauccaucaacaguuuucaaagaugaugacgaggcggaagauuuuguugagguucaccuuccagaugugcacaagcaggucucaggggucgaucucggucucccaagcugggggaaguaugugcugaugagcgcaggcgucuugaccguacuaauguugaugauuuucuucaugacguguuguagaagggccaauagaguggaaucagcacaacacagucuuggagagagggggaggaaagugucgguaaccucccaaagcgggcgggucauauccucaugggagucauacaaaaguggaggugagaccaaacuguaa

SEQ ID NO: 62692 - RNA, 1575 nt, Artificial Sequence
  derived and/or modified CDS sequence (wt) from glycoprotein__RABV__AB563962.1
augauuccucaggcucuuuuguuuguaccccuucuggucuuuucauuguguuucgggaaauuccccaucuacacgauaccugacaaacuuggucccuggagccccauugauauacaucaucucagcuguccgaacaauuugguuguagaggaugaaggauguaccaaccugucagguuucucauacauggaacucaaaguaggauacauuucagccaucaaagugaacggguucacuuguacggguguggugacggaggcagaaaccuacaccaacuuuguuggcuauguuacuaccacguuuaagagaaagcacuuccgcccgaugccggaugcgugcagagccgcauauaacuggaagauggcuggugaccccagauaugaagagucucugcauaauccuuacccugauuaucauuggcuccggacugugaagaccaccaaagaaucucuuguuaucauaucuccaaguguggcagauuuggacccauacgacaaaucccuucacucgagaguuuuuccuagcgggaaaugcucaggcauaacagugucuucuaccuacugcucuacuaaccaugacuauaccaucuggaugccugagaauccuagacuagggaccucuugugacauuuucaccaauagcagggggaagagagcauccaaagggagcaagaccuguggauuuguagaugagagaggccuauacaaaucucugaaaggagcgugcaaacugaaacuaugugggguucuuggacucagacuuauggauggaacaugggcagccauccagacaucagaugagaccaaauggugcccuccugaucaguuggugaaccugcaugacuuucguucggaugaaauugaacaucuuguuguggaggagcuggucaagaaaagggaagagugucuagaugcacuggaguccaucaugaccaccaagucugugaguuucagacgucucagucacuugaggaaacuugugccuggguuuggaaaagcguauaccauauucaauaagaccuugauggaggcugaugcucauuacaaaucaguccggacuuggaaugagaucaucccaucuaaaggguguuuaagagucggggggagaugucacccucaugugaacgggguuuucuucaaugguaucaucuuaggcccugacggccaugugcuaaucccggagaugcagucgucucuccuccagcagcauauggaguuguuggaauccucaguuauccccuuaaugcaccccuuggcagauccaucaacaguuuucaaagaugaugacgaggcggaggauuuuguugagguucaccuuccagaugugcacaagcaggucucaggggucgaucucggucucccaagcugggggaaguaugugcugaugagcgcaggcgucuugaccguacuaauguugaugauuuucuucaugacguguuguagaagggccaauagaguggaaucagcacaacacagucuuggagagagggggaggaaagugucgguaaccucccaaagcgggcgggucauauccucaugggagucauacaaaaguggaggugagaccaaacuguaa

SEQ ID NO: 62693 - RNA, 1575 nt, Artificial Sequence
  derived and/or modified CDS sequence (wt) from glycoprotein__RABV__AB563963.1
augauuccucaggcucuuuuguuuguaccccuucuggucuuuucauuguguuucgggaaauuccccaucuacacgauaccugacaaacuuggucccuggagccccauugacauacaucaucucagcuguccgaacaauuugguuguagaggaugaaggauguaccaaccugucagguuucucauacauggaacucaaaguaggauacauuucagccaucaaagugaacggguucacuuguacggguguggugacagaggcagaaaccuacaccaacuuuguuggcuauguuacuaccacguuuaagagaaagcacuuccgcccgacgccggaugcgugcagagccgcauauaacuggaagauggcuggugaccccagauaugaagagucucugcauaauccuuacccugauuaucauuggcuccggacugugaagaccaccaaagaaucucuuguuaucauaucuccaaguguggcagauuuggacccauacgacaaaucccuucacucgagaguuuuuccuagcggaaaaugcucaggcauaacagugucuucuaccuacugcucuacuaaccaugacuauaccaucuggaugccugagaauccuagacuagggaccucuugugacauuuucaccaauagcagggggaagagagcauccaaagggagcaagaccuguggauuuguagaugagagaggccuauacaaaucucugaaaggagcuugcaaacugaaacuaugugggguucuuggacucagacuuauggauggaacaugggcagcaauccagacaucagaugagaccaaauggugcccuccugaucaguuggugaaccuacaugacuuucguucggaugaaauugaacaucuuguuguggaggagcuggucaagaaaagggaagagugucuagaugcacuggaguccaucaugaccaccaaguccgugaguuucagacgucucagucacuugaggaaacuugugccuggguuuggaaaagcguauaccauauucaauaagaccuugauggaggcugaugcucauuacaaaucaguccggacuuggaaugagaucaucccaucuaaaggguguuuaagagucggggggagaugucacccucaugugaacgggguuuucuucaaugguaucaucuuaggcccugacggccaugugcuaaucccggagaugcagucgucucuccuccagcagcauauggaguuguuggaauccucaguuauccccuuaaugcaucccuuggcagauccaucaacaauuuucaaagaugaugacgaggcggaagauuuuguugagguucaccuuccagaugugcacaagcaggucucaggggucgaucucggucucccaagcugggggaaguaugugcugaugagcgcaggcgucuugaccguacuaauguugaugauuuucuucaugacguguuguagaagggccaauagaguggaaucagcacaacacagucuuggagagagggggaggaaagugucgguaaccucccaaagcgggcgggucauauccucaugggagucauacaaaaguggaggugagaccaaacuguaa

SEQ ID NO: 62694 - RNA, 1575 nt, Artificial Sequence
  derived and/or modified CDS sequence (wt) from glycoprotein__RABV__AB563964.1
augauuccucaggcucuuuuguuuguaccccuucuggucuuuucauuguguuucgggaaauuccccaucuacacgauaccugacaaacuuggucccuggagccccauugauauacaucaucucagcuguccgaacaauuugguuguagaggaugaaggauguaccaaccugucagguuucucauacauggaacucaaaguaggauacauuucagccaucaaagugaacggguucaccuguacggguguggugacagaggcagaaaccuacaccaacuuuguuggcuauguuacuaccacguuuaagagaaagcacuuccgcccgaugccggaugcgugcagagccgcauauaacuggaagauggcuggugaccccagauaugaagagucucugcauaauccuuacccugauuaucauuggcuccggacugugaagaccaccaaagaaucucuuguuaucauaucuccaaguguggcagauuuggacccauacgacaaaucccuucacucgagaguuuuuccuagcggaaaaugcucaggcauaacagugucuucuaccuacugcucuacuaaccaugacuauaccaucuggaugccugagaauccuagacuagggaccucuugugacauuuucaccaauagcagggggaagagagcauccaaagggagcaagaccuguggauuuguagaugagagaggccuauacaaaucucugaaaggagcuugcaaacugaaacuaugugggguucuuggacucagacuuauggauggaacaugggcagcaauccagacaucagaugagaccaaauggugcccuccugaucaguuggugaaccuacaugacuuucguucggaugaaauugaacaucuuguuguggaggagcuggucaagaaaagggaagagugucuagaugcacuggaguccaucaugaccaccaaguccgugaguuucagacgucucagucacuugaggaaacuugugccuggguuuggaaaagcguauaccauauucaauaagaccuugauggaggcugaugcucauuacaaaucaguccggacuuggaaugagaucaucccaucuaaaggguguuuaagagucggggggagaugucacccucaugugaacgggguuuucuucaaugguaucaucuuaggcccugacggccaugugcuaaucccggagaugcagucgucucuccuccagcagcauauggaguuguuggaauccucaguuauccccuugaugcaucccuuggcagauccaucaacaguuuucaaagaugaugacgaggcggaagauuuuguugagguucaccuuccagaugugcacaagcaggucucaggggucgaucucggucucccaagcugggggaaguaugugcugaugagcgcaggcgucuugaccguacuaauguugaugauuuucuucaugacguguuguagaagggccaauagaguggaaucagcacaacacagucuuggagagagggggaggaaagugucgguaaccucccaaagcgggcgggucauauccucaugggagucauacaaaaguggaggugagaccaaacuguaa

SEQ ID NO: 62695 - RNA, 1575 nt, Artificial Sequence
  derived and/or modified CDS sequence (wt) from glycoprotein__RABV__AB563966.1
augauuccucaggcucuuuuguuuguaccccuucuggucuuuucauuguguuucgggaaauuccccaucuacacaauaccugacaaacuuggucccuggagccccauugauauacaucaucucagcuguccgaacaauuugguuguagaggaugaaggauguaccaaccugucagguuucucauacauggaacucaaaguaggauacauuucagccaucaaagugaacggguucacuuguacggguguggugacggaggcagaaaccuacaccaacuuuguuggcuauguuacuaccacguuuaagagaaagcacuuccgcccgaugccagaugcgugcagagccgcauauaacuggaagauggcuggugaccccagauaugaagagucucugcauaauccuuacccugauuaucauuggcuccggacugugaagaccaccaaagaaucucuuguuaucauaucuccaaguguggcagauuuggacccauacgacaaaucccuucacucgagaguuuuuccuagcggaaaaugcucaggcauaacagugucuucuaccuacugcucuacuaaccaugacuauaccaucuggaugccugagaauccuagacuagggaccucuugugacauuuucaccaauagcagggggaagagagcauccaaagggagcaagaccuguggauuuguagaugagagaggccuauacaaaucucugaaaggagcgugcaaacugaaacuaugugggguucuuggacucagacuuauggauggaacaugggcagcaauccagacaucagaugagaccaaauggugcccuccugaucaguuggugaaccugcaugacuuucguucggaugaaauugaacaucuuguuguggaggagcuggucaagaaaagggaagagugucuagaugcacuggaguccaucaugaccaccaaguccgugaguuucagacgucucagucacuugaggaaacuugugccuggguuuggaaaagcguauaccauauucaauaagaccuugauggaggcugaugcucauuacaaaucaguccggacuuggaaugagaucaucccaucuaaaggauguuuaagagucggggggagaugucacccucaugugaacgggguuuucuucaaugguaucaucuuaggcccugacggccaugugcuaaucccggagaugcagucgucucuccuccagcagcauauggaguuguuggaauccucaguuauccccuuaaugcaucccuuggcagauccaucaacaguuuucaaagaugaugacgaggcggaggauuuuguugagguucaccuuccagaugugcacaagcaggucucaggggucgaucucggucucccaagcugggggaaguacgugcugaugagcgcaggcgucuugaccguacuaauguugaugauuuucuucaugacguguuguagaagggccaauagaguggaaucagcacaacauagucuuggagagagggggaggaaagugucgguaaccucccaaagcgggcgggucauauccucaugggagucauacaaaaguggaggugagaccaaacuguaa

SEQ ID NO: 62696 - RNA, 1575 nt, Artificial Sequence
  derived and/or modified CDS sequence (wt) from glycoprotein__RABV__AB563969.1
augauuccucaggcucuuuuguuuguaccccuucuggucuuuucauuguguuucggaaaauuucccaucuacacgauaccggacaaacuuggucccuggagccccauugauauacaucaucucagcuguccgaacaauuugguuguggaggaugaaggauguaccaaccugucagguuucucguacauggaacucaagguaggauacauuucagccaucaaagugaacggguucacuuguacggguguagugacagaagcagagaccuacaccaacuuuguuggcuaugucacuaccacguuuaagagaaagcacuuccgcccaacgccggaugcaugcagagccgcauauaacuggaagauggcuggugaccccagauaugaagaaucucugcauaauccuuacccugauuaucauuggcuccgaacugugaagaccaccaaagaaucucuuguuaucauaucuccaaguguggcagauuuggacccauacgauaaaucccuucacucgagaguuuuuccuagcggaaaaugcucaggcauaacggugucuucuaccuacugcuccacuaaccacgacuauaccaucuggaugccugagaauccuagacuagggaccucuugugacauuuucaccaauagcagagggaagagagcguccaaagggagcaagaccuguggauuuguagaugagagaggccuguacaagucucugaaaggagcaugcaaacugaaacuaugugggguucugggacucagacuuauggaugggacaugggccgcgauccagacaucagaugagaccaaauggugcccuccugaucaguuagugaaccuacaugacuuucgcucggaugaaauugaacaucuuguuguggaggagcuggucaagaaaagggaagagugucuagaugcacuggaguccaucaugaccaccaagucugugaguuucagacgucucagucacuugaggaaacuugugcccggguuuggaaaagcauauaccauauucaauaagaccuugauggaggcugaugcucacuacaaaucaguccggacuuggaaugagaucauccccucuaaaggguguuuaagagucggggggaggugucacccucaugugaacgggguguucuucaaugguaucaucuuaggcccugacggccaugugcuaaucccggagaugcagucgucucuccuccagcagcauauggaguuauuggaauccucagucauccccuuaaugcaucccuuggcagauccaucaacaguuuuuaaagaugaugacgaggcggaagauuuuguugagguucaccuuccagaugugcacaagcaggucucagggguugaucucggucucccaagcugggggaaguauguguugaugagcgcaggcgucuugaccgcauuaauguugaugauuuucuuaaugacguguuguagaagggccaauagaguagaaucagcacaacacagucuuggagagagggggaggaaagugucgguaaccucccaaagcgggcggguuauauccucaugggagucauacaaaaguggaggugagaccaagcuguaa

SEQ ID NO: 62697 - RNA, 1575 nt, Artificial Sequence
  derived and/or modified CDS sequence (wt) from glycoprotein__RABV__AB563970.2
augaauccucaggcucuuauguuuguaccucuucuggucuuuucauuguguuuugggaaauuccccaucuacacgauaccagacaaacuuggucccuggagccccauugauauacaucaucucagcuguccgaacaauuugguuguugaggacgaaggauguaccaaccugucagguuucucauacauggaacucaaaguaggauacauuucagccaucaaagugaacggguucacuuguacggguguggugacagaagcagaaacuuacaccaacuuuguuggcuaugucacuaccacguuuaagagaaagcacuuccgcccgacgccggaugcaugcagagccgcauauaacuggaagauggcuggugacccuagauaugaagaaucucugcauaauccuuacccugauuaucauuggcuccggacugugaagaccaccaaagaaucucuuguuaucauaucuccaagcguggcagaucuagacccauaugacaaaucccuucacucgagaguuuuuccuagcggaaaaugcucaggcauaacagugucuucuaccuacugcucuacuaaccacgacuauaccaucuggaugccugagaauccuagacuagggaccucuugugacauuuucaccaauagcagagggaagagagcauccaaagggagcaugaccuguggauuuguagaugagagaggccuauacaagucucugaaaggagcaugcaaauugaagcuaugugggguucugggacucagacuuauggauggaacaugggccgcgauccagacaucagaugagaccaaauggugcccuccugaucaguuagugaaccuacaugacuuucacucggaugaaauugagcaucuuguuguggaggagcuagucaagaaaagggaagagugucuagaugcacuggaguccaucaugaccaccaaguccgugaguuucagacgucucagucacuugaggaaacuugugccuggguucggaaaagcauauaccauauucaauaagaccuugauggaggcugaugcucacuacaaaucaguccggacuuggaaugagaucauccccucuaaaggguguuugagagucggggggagaugucacccccaugugaacgggguguucuucaaugguaucauauuaggcccugacggccaugugcuaaucccggagaugcagucgucucuccuccagcagcauauggaguuguuggaauccucagucauccccuuaaugcaucccuuggcagauccaucaacgguuuuuaaagaugaugacgaggcggaagauuuuguugagguucaccuuccagaugugcacaagcaggucucagggguugaucucggucucccaagcugggggaaguauguguugaugagcgcaggaguccugaccgcacuaauguugaugauuuucuuaaugacguguugcagaagggccaauagagcagaaucagcacaacacagucuuggagagaggggaaggaaagugucgguaaccucccaaagcgggcggguuauauccucaugggagucauacaaaaguggaggugagaccaagcuguag

SEQ ID NO: 62698 - RNA, 1575 nt, Artificial Sequence
  derived and/or modified CDS sequence (wt) from glycoprotein__RABV__AB563971.1
augaauccucaggcucuuauguuuguaccucuucuggucuucucauuguguuucgggaaauuccccaucuacacgauaccggacaaacuuggucccuggagccccauugauauacaucaucucagcuguccgaacaauuugguuguggaggacgaaggauguaccaaccugucagguuucucauacauggaacucaaagugggauacauuucagccaucaaagugaacggguucacuuguacggguguggugacagaagcagaaacuuacaccaacuuuguuggcuaugucacuaccacguuuaagagaaagcacuuccgcccgacgccggaugcaugcagagccgcauauaacuggaagauggcuggugacccuagauaugaagaaucucugcauaauccuuacccugauuaucauuggcuccggacugugaagaccaccaaagaaucucuuguuaucauaucuccaaguguggcagaucuggacccauacgacaaaucccuucacucgagaguuuuuccuagcggaaaaugcucaggcauaacaguguuuucuaccuacugcucuacuaaccacgacuauaccaucuggaugccugagaauccuagacuagggaccucuugugacauuuucaccaauagcagagggaagagagcauccaaagggagcaagaccuguggauuuguagaugagagaggccuauacaagucucugaaaggagcaugcaaauugaaacuaugugggguucuaggacucagacuuauggauggaacaugggccgcgauccagacaucagaugagaccaaauggugcccuccugaucaguuagugaaccuacaugacuuucgcucggaugaaauugagcaucuuguuguggaggagcuggucaagaaaagggaagagugucuagaugcacuggaguccaucaugaccaccaaguccgugaguuucagacgucucagucacuugaggaaacuggugccuggguucggaaaagcauauaccauauucaauaagaccuugauggaggcugaugcucacuacaaaucaguccggacuuggaaugagaucauccccucuaaaggguguuugagagucggggggagaugucacccccaugugaacgggguguucuucaaugguaucauauuaggcccugacggccaugugcugaucccggagaugcagucgucucuccuccagcagcauauggaguuguuggaauccucagucauccccuuaaugcaucccuuggcagauccaucaacaguuuuuaaagaugaugacgaggcggaagauuuuguugagguucaccuuccagaugugcacaagcaggucucagggguugaucucggucucccaagcugggggaaguauguguugaugagugcaggaguccugaccgcacuaauguugaugauuuucuuaaugacguguugcagaagggccaauagagcagaaucagcacaacacagucuuggagagaggggaaggaaagugucgguaaccucccaaagcgggcggguuauauccucaugggagucauacaaaaguggaggugagaccaagcuguag

SEQ ID NO: 62699 - RNA, 1575 nt, Artificial Sequence
  derived and/or modified CDS sequence (wt) from glycoprotein__RABV__AB563973.2
augauuccucaggcucuuuuguuuguaccccuucuggucucuucauuguguuucggaaaauuucccaucuacacgauaccggacaaacuuggucccuggagccccauugauauacaucaucucagcuguccgaacaauuuaguuguggaggaugaaggauguaccaaccugucagguuucucguacauggaacucaagguaggauacauuucagccaucaaagugaacggguucacuuguacggguguagugacagaagcagagaccuacaccaacuuuguuggcuaugucacuaccacguuuaagagaaagcacuuccguccaacgccagaugcaugcagagccgcauauaacuggaagauggcuggugaccccagauaugaagaaucucugcacaauccuuacccugauuaucauuggcuccgaacugugaagaccaccaaagaaucucuuguuaucauaucuccaaguguggcagauuuggacccauacgauaaaucccuucacucgagaguuuuuccuagcggaaaaugcucgggcauaacggugucuucuaccuacugcucuaccaaccacgacuauaccauuuggaugccugagaauccuagacuagggaccucuugugacauuuucacuaauagcagagggaagagagcauccaaagggagcaagaccugcggauuuguagaugagagaggccuguacaagucucuaaaaggagcaugcaaacugaaacuaugugggguucugggacucagacuuauggauggaacaugggccgcgauccagacaucagaugagaccaaauggugcccuccugaucaguuagugaaccuacaugacuuccgcucggaugaaauugaacaucuuguuguggaggagcuggucaagaaaagggaagagugucuagaugcacuggaguccaucaugaccaccaagucugugaguuucagacgucucagucacuugaggaaacuugugcccggguuuggaaaagcauauaccauauucaauaagaccuugauggaggcugaugcucacuacaaaucaguccggacuuggaaugagaucaucccaucuaaaggguguuuaagagucggggggagaugucacccucaugugaacgggguguucuucaaugguaucaucuuaggcccugacggccaugugcuaaucccggagaugcagucgucucuccuccagcagcauauggaguuguuggaauccucagucauccccuuaaugcaucccuuggcagauccaucaacaguuuucaaagaugaugacgaggcggaagauuuuguugagguucaucuuccagaugugcauaagcaggucucaggggucgaucucggucucccaagcugggggaaguauguguugacgagcgcaagcgucuugaccgcacuaauguugaugauuuucuuaaugacguguuguagaagggccaauagagccgaaucugcacaacacagucuuggagagagggggaggaaagugucaguaaccucucaaagcgggcggguuauauccucaugggagucauacaaaaguggaggugagaccaagcuguaa

SEQ ID NO: 62700 - RNA, 1575 nt, Artificial Sequence
  derived and/or modified CDS sequence (wt) from glycoprotein__RABV__AB563974.1
augauuccucaggcucuuuuguuuguaccccuucuggucucuucauuguguuucggaaaauuucccaucuacacgauaccggacaaacuugguccguggagccccauugauauacaucaucucagcuguccgaacaauuuaguuguggaggaugaaggauguaccaaccugucagguuucucguacauggaacucaagguaggauacauuucagccaucaaagugaacggguucacuuguacggguguagugacagaagcagagaccuacaccaacuuuguuggcuaugucacuaccacguuuaagagaaagcacuuccguccaacgccagaugcaugcagagccgcauauaacuggaagauggcuggugaccccagauaugaagaaucucugcacaauccuuacccugauuaucauuggcuccgaacugugaagaccaccaaagaaucucuuguuaucauaucuccaaguguggcagauuuggacccauacgauaaaucccuucacucgagaguuuuuccuagcggaaaaugcucgggcauaacggugucuucuaccuacugcucuaccaaccacgacuauaccauuuggaugccugagaauccuagacuagggaccucuugugacauuuucacuaauagcagagggaagagagcauccaaagggagcaagaccugcggauuuguagaugagagaggccuguacaagucucugaaaggagcaugcaaacugaaacuaugugggguucugggacucagacuuauggauggaacaugggccgcgauccagacaucagaugagaccaaauggugcccuccugaucaauuagugaaccuacaugacuuccgcucggaugaaauugaacaucuuguuguggaggagcuggucaagaaaagggaagagugucuagaugcacuggaguccaucaugaccaccaagucugugaguuucagacgucucagucacuugaggaaacuugugcccggguuuggaaaagcauauaccauauucaauaagaccuugauggaggcugaugcucacuacaaaucaguccggacuuggaaugagaucaucccaucuaaaggguguuuaagagucggggggagaugucacccucaugugaacgggguguucuucaaugguaucaucuuaggcccugacggccaugugcuaaucccggagaugcagucgucucuccuccagcagcauauggaguuguuggaauccucagucauccccuuaaugcaucccuuggcagauccaucaacaguuuucaaagaugaugacgaggcggaagauuuuguugagguucaucuuccagaugugcauaagcaggucucaggggucgaucucggucucccaagcugggggaaguauguguugacgagcgcaggcgucuugaccgcacuaauguugaugauuuucuuaaugacguguuguagaagggccaauagagccgaaucugcacaacacagucuuggagagagggggaggaaagugucaguaaccucucaaagcgggcggguuauauccucaugggagucauacaaaaguggaggugagaccaagcuguaa

SEQ ID NO: 62701 - RNA, 1575 nt, Artificial Sequence
  derived and/or modified CDS sequence (wt) from glycoprotein__RABV__AB563975.2
augauuccucaggcucuuuuguuuguaccccuucuggucucuucauuguguuucggaaaauuucccaucuacacgauaccggacaaacuugguccguggagccccauugauauacaucaucucagcuguccgaacaauuuaguuguggaggaugaaggauguaccaaccugucagguuucucguacauggaacucaagguaggauacauuucagccaucaaagugaacggguucacuuguacggguguagugacagaagcagagaccuacaccaacuuuguuggcuaugucacuaccacguuuaagagaaagcacuuccguccaacgccagaugcaugcagagccgcauauaacuggaagauggcuggugaccccagauaugaagaaucucugcacaauccuuacccugauuaucauuggcuccgaacugugaagaccaccaaagaaucucuuguuaucauaucuccaaguguggcagauuuggacccauacgauaaaucccuucacucgagaguuuuuccuagcggaaaaugcucgggcauaacggugucuucuaccuacugcucuaccaaccacgacuauaccauuuggaugccugagaauccuagacuagggaccucuugugacauuuucacuaauagcagagggaagagagcauccaaagggagcaagaccugcggauuuguagaugagagaggccuguacaagucucugaaaggagcaugcaaacugaaacuaugugggguucugggacucagacuuauggauggaacaugggccgcgauccagacaucagaugagaccaaauggugcccuccugaucaguuagugaaccuacaugacuuccgcucggaugaaauugaacaucuuguuguggaggagcuggucaagaaaagggaagagugucuagaugcacuggaguccaucaugaccaccaagucugugaguuucagacgucucagucacuugaggaaacuugugcccggguuuggaaaagcauauaccauauucaauaagaccuugauggaggcugaugcucacuacaaaucaguccggacuuggaaugagaucaucccaucuaaaggguguuuaagagucggggggagaugucacccucaugugaacgggguguucuucaaugguaucaucuuaggcccugacggccaugugcuaaucccggagaugcagucgucucuccuccagcagcauauggaguuguuggaauccucagucauccccuuaaugcaucccuuggcagauccaucaacaguuuucaaagaugaugacgaggcggaagauuuuguugagguucaucuuccagaugugcauaagcaggucucaggggucgaucucggucucccaagcugggggaaguauguguugacgagcgcaggcgucuugaccgcacuaauguugaugauuuucuuaaugacguguuguagaagggccaauagagccgaaucugcacaacacagucuuggagagagggggaggaaagugucaguaaccucucaaagcgggcggguuauauccucaugggagucauacaaaaguggaggugagaccaagcuguaa

SEQ ID NO: 62702 - RNA, 1575 nt, Artificial Sequence
  derived and/or modified CDS sequence (wt) from glycoprotein__RABV__AB563976.1
augauuccucaggcucuuuuguuuguaccccuucuggucuuuucauuguguuucggaaaauuucccaucuacacgauaccggacaaacuuggucccuggagccccauugauauacaucaucucagcuguccgaacaauuugguuguggaggaugaaggauguaccaaccugucagguuucucguacauggaacucaagguaggauacauuucagccaucaaagugaacggguucacuugcacggguguagugacagaagcagagaccuacaccaacuuuguuggcuauguaacuaccacguuuaagagaaagcacuuccgcccaacgccggaugcaugcagagccgcauauaacuggaagauggcuggugaccccagauaugaagaaucucugcauaauccuuacccugauuaucauuggcuccgaacugugaagaccaccaaagaaucucuuguuaucauaucuccaaguguggcagauuuggacccauaugauaaaucccuucacucgagaguuuuuccuagcggaaaaugcucaggcauaacggugucuucuaccuacugcuccacuaaccacgacuauaccaucuggaugccugagaauccuagacuagggaccucuugugacauuuucaccaauagcagagggaagagagcauccaaagggaguaagaccuguggauuuguggaugagagaggccuguacaagucucugaaaggagcaugcaaacugaaacuaugugggguucugggacucagacuuauggauggaacaugggccgcgauccagacaucagaugagaccaaauggugcccuccugaucaguuagugaaccuacaugacuuucgcucggaugaaauugagcaucuuguuguggaggagcuggucaagaaaagggaagagugucuagaugcacuggaguccaucaugaccaccaagucugugaguuucagacgucucagucacuugaggaaacuugugcccggguuuggaaaagcauauaccauauucaauaagaccuugauggaggcugaugcucacuacaaaucaguccggacuuggaaugagaucauccccucuaaaggguguuuaagagucggagggagaugucacccucaugugaacgggguguucuucaaugguaucaucuuaggcccugacggccaugugcuaaucccggaaaugcagucgucucuccuccagcagcauauggaguuauuggaauccucagucauucccuuaaugcaucccuuggcagauccaucaacaguuuuuaaagaugaugacgaggcggaagauuuuguugagguucaccuuccagaugugcacaagcaggucucaggggucgaucucggucucccaagcugggggaaguauguguugaugagcgcaggcgucuugaccgcauuaauguugaugauauucuuaaugacguguuguagagggaccaauagagcagaaucagcacaacacagucuuggagagagggggaggaaagugucgguaaccucccaaagcgggcggguuauauccucaugggagucauacaaaaguggaggugagaccaagcuguaa

SEQ ID NO: 62703 - RNA, 1575 nt, Artificial Sequence
  derived and/or modified CDS sequence (wt) from glycoprotein__RABV__AB563977.1
augauuccccaggcucuuuuguuuguaccccuucuggucuuuucauuguguuucggaaaauuucccaucuacacgauaccggacaaacuuggucccuggagccccauugauauacaucaucucagcuguccgaacaauuugguuguggaggaugaaggauguaccaaccugucagguuucucguacauggaacucaagguaggauacauuucagccaucaaagugaacggguucacuuguacggguguagugacagaagcagagaccuacaccaacuuuguuggcuaugucacuaccacguuuaagagaaagcacuuccgcccaacgccggaugcaugcagagccgcauauaacuggaagauggcuggugaccccagauaugaagaaucucugcauaauccuuacccugauuaucauuggcuccgaacugugaagaccaccaaagaaucucuuguuaucauaucuccaaguguggcagauuuggacccauaugauaaaucccuucacucgagaguuuuuccuagcggaaaaugcucaggcauaacggugucuucuaccuacugcucuacuaaccacgacuauaccaucuggaugccugagaauccuaggcuagggacuucuugugacauuuucaccaauagcagagggaagagagcauccaaagggagcaagaccuguggauuuguagaugagaggggccuguacaagucucugaaaggagcaugcaaacugaaacuaugugggguucugggacucagacuuauggauggaacaugggccgcgauccagacaucagaugagaccaaauggugcccuccugaucaguuagugaaccugcaugacuuucguucggaugaaauugaacaucuuguuguggaggagcuggucaagaaaagggaagagugucuagaugcacuggaguccaucaugaccaccaagucugugaguuucagacgucucagucacuugaggaaacuugugcccggguuuggaaaagcauauaccauauucaauaaaaccuugauggaggcugaugcucacuacaaaucaguccggacuuggaaugagaucauccccucuaaaggguguuuaagagucggggggagaugucacccucaugugaacgggguguucuucaaugguaucaucuuaggcccugacggccaugugcuaaucccggagaugcagucgucucuccuccagcagcacauggaguuguuggaauccucagucaucccuuuaaugcaucccuuggcagauccaucaacaguuuuuaaagaugaugacgaggcggaagauuuuguugagguucaccuuccagaugugcacaagcaggucucaggggucgaucucggucuuccaagcugggggagguauguguugaugagcgcaggcgucuugaccgcauuaauguugaugaucuucuuaacgacguguuguagaagggccaauagagcagaaucagcgcaacacagucuuggagagagggggaggaaagugucgguaaccucccaaagcgggcggguuauauccucaugggagucauacaaaaguggaggugagaccaagcuguaa

SEQ ID NO: 62704 - RNA, 1575 nt, Artificial Sequence
  derived and/or modified CDS sequence (wt) from glycoprotein__RABV__AB563979.1
augauuccucaggcucuuuuguuuguaccccuucuggucuuuucauuguguuucggaaaauuuccuaucuacacaauaccggacaaacuuggucccuggagccccauugacauacaucaucucagcuguccgaacaauuugguuguggaggaugaaggauguaccaaccugucagguuucucguacauggaacucaagguaggauacauuucugccaucaaagugaacggguucacuuguacggguguagugacggaagcagagaccuacaccaacuuuguuggcuaugucacuaccacguuuaagagaaagcacuuccgcccaacgccggaugcaugcagagccgcauauaacuggaagauggcuggugaccccagauaugaagaaucucugcauaauccuuacccugauuaucauuggcuccgaacugugaagaccaccaaagagucucuuguuaucauaucuccaaguguggcagauuuggacccauacgauaaaucccuucacucgagaguuuuuccuagcggaaaaugcucaggcauaacggugucuucuaccuacugcuccacuaaccacgacuauaccaucuggaugccugagaauccuagacuagggaccucuugugacauuuucaccaauagcagagggaagagagcauccaaagggagcaaaaccuguggauuuguagaugagagaggccuguacaagucucugaaaggagcaugcaaacugaaacuaugugggguucugggacucagacuuauggauggaacaugggccgcgauccagacaucagaugagaccaaauggugcccuccugaucaguuagugaaccuacaugacuuucgcucggaugaaauugaacaucuuguuguggaggagcuggucaagaaaagggaagagugucuagaugcacuggaguccaucaugaccaccaagucugugaguuucagacgucucagucacuugaggaaacuugugcccggguuuggaaaagcauauaccauauucaauaagaccuugauggaggcugaugcucacuacaaaucaguccggacuuggaaugagaucauccccucuaaaggguguuuaagagucggggggagaugucacccucaugugaacgggguguucuucaaugguaucaucuuaggcccugacggccaugugcuaaucccggagaugcagucgucucuccuccagcagcauauggaguuauuggaauccucagucauccccuuaaugcaucccuuggcagauccaucaacaguuuuuaaagaugaugacgaggcggaagauuuuguugagguucaccuuccagaugugcacaagcaggucucaggggucgaucucggucucccaagcugggggaaguauguguugaugagcgcaggcgucuugaccgcauuaauguugaugauuuucuuaaugacguguuguagaagggccaauagagcagaaucagcacaacacagucuuggagagggggagaggaaagugucgguaaccucccaaagugggcggguuauauccucaugggagucauacaaaaguggaggugagaccaagcuguaa

SEQ ID NO: 62705 - RNA, 1575 nt, Artificial Sequence
  derived and/or modified CDS sequence (wt) from glycoprotein__RABV__AB563981.1
augauuccucaggcucuuuuguuuguaccccuuauggucuuuucauuguguuucggaaaauuuccuaucuacacaauaccggacaaacuuggucccuggagccccauugauauacaucaucucagcuguccgaacaauuugguuguggaggaugaaggauguaccaacuugucagguuucucguacauggaacucaagguaggauacauuucagccaucaaagugaacggguucacuuguacggguguagugacagaggcagagaccuacaccaacuuuguuggcuaugucacuaccacguuuaagagaaagcacuuccgcccaaccccggaugcaugcagagccgcauauaacuggaagauggcuggugaccccagauaugaagaaucucugcauaauccuuacccugauuaucauuggcuccgaacugugaagaccaccaaagaaucucuuguuaucauaucuccaaguguggcagauuuggacccauacgauaaaucccuucacucgagaguuuuuccuagcggaaaaugcucaggcauaacggugucuucuaccuacugcuccacuaaccacgacuauaccaucuggaugccugagaauccuagacuagggaccucuugugacauuuucaccaauagcagagggaagagagcauccaaagggagcaagaccuguggauuuguagaugagagaggccuguacaagucucugaaaggagcaugcaaacugaaacuaugugggguucugggacucagacuuauggauggaacaugggccgcgauccagacaucagaugagaccaaauggugcccuccugaucaguuagugaaccuacaugacuuucgcucggaugaaauugaacaucuuguuguggaggagcuggucaagaaaagagaagagugucuagaugcacuggaguccaucaugaccaccaagucugugaguuucagacgucucagucacuugaggaaacuugugcccggguuuggaaaagcauauaccauauucaauaagaccuugauggaggcugaugcucacuacaaaucaguccggacuuggaaugagaucauccccucuaaaggguguuuaagagucggggggagaugucacccucaugugaacgggguguucuucaaugguaucaucuuaggcccugacggccaugugcuaaucccggagaugcagucgucucuccuccagcagcauauggaguuauuggaauccucagucauccccuuaaugcaucccuuggcagauccaucaacaguuuuuaaagaugaugacgaggcggaagauuuuguugagguucaccuuccagaugugcacaagcaggucucaggggucgaucucggucucccaagcugggggaaguauguguugaugagcgcaggcgucuugaccgccuuaauguugaugauuuucuuaaugacguguugcagaaggaccaauagagcagaaucagcacaacacagucuuggagagagggggaggaaagugucgguaaccucccaaagugggcggauuauauccucaugggagucauacaaaaguggaggugagaccaagcuguaa

SEQ ID NO: 62706 - RNA, 1575 nt, Artificial Sequence
  derived and/or modified CDS sequence (wt) from glycoprotein__RABV__AB563983.1
augauuccucaggcucuuuuguuuguaccccuucuggucuuuucauuguguuucggaaaauuucccaucuacacgauaccggacaaacuuggucccuggagccccauugauauacaucaucucagcuguccgaacaauuugguuguggaggaugaaggauguaccaaccugucagguuucucguacauggaacucaagguaggauacauuucagccaucaaagugaacggguucacuuguacggguguagugacagaagcagagaccuacaccaacuuuguuggcuaugucacuaccacguuuaagagaaagcacuuccgcccaacgccggaugcaugcagagccgcauauaacuggaagauggcuggugaccccagauaugaagaaucucugcauaauccuuacccugauuaucauuggcuccgaacugugaagaccaccaaagaaucucuuguuaucauaucuccaaguguggcagauuuggacccauaugauaaaucccuucacucgagaguuuuuccuagcggaaaaugcucaggcauaacggugucuucuaccuacugcucuacuaaccacgacuauaccaucuggaugccugagaauccuagacuagggaccucuugugacauuuucaccaauagcagagggaagagagcaucuaaagggagcaagaccuguggauuuguagaugagagaggccuguacaagucucugaaaggagcaugcaaacugaaacuaugugggguucugggacucagacuuauggauggaacaugggccgcgauccagacaucagaugagaccaaauggugcccuccugaucaguuagugaaccugcaugacuuucgcucggaugaaauggaacaucuuguuguggaggagcuggucaagaaaagggaagagugucuagaugcacuggaguccaucaugaccaccaagucugugaguuucagacgucucagucacuugaggaaacuugugcccggguuuggaaaagcauauaccauauucaauaaaaccuugauggaggcugaugcucacuacaaaucaguccggacuuggaaugagaucauccccacuaaaggguguuuaagagucggggggagaugucacccucaugugaacgggguguucuucaaugguaucaucuuaggcccugacggccaugugcuaaucccagagaugcagucgucucuccuccagcagcacauggaguuguuggaauccucagucaucccuuuaaugcaucccuuggcagauccaucaacaguuuuuaaagaugaugacgaggcggaagauuuuguugagguucaccuuccagaugugcacaagcaggucucaggggucgaucucggucuuccaagcugggggaaguauguguugaugagcgcaggcgucuugaccgcauuaauguugaugauuuucuuaacgacguguuguagaagggccgauagagcagaaucagcgcaacacagucuuggagagagggggaggaaagugucgguaaccucucagagcgggcggguuauauccucaugggagucauacaaaaguggaggugagaccaagcuguaa

SEQ ID NO: 62707 - RNA, 1575 nt, Artificial Sequence
  derived and/or modified CDS sequence (wt) from glycoprotein__RABV__AB563985.1
augauuccucaggcucuuuuguuuguaccccuucuggucuuuucauuguguuucggaaaauuucccaucuacacgauaccggacaaacuuggucccuggagccccauugauauacaucaucucagcuguccgaacaauuugguuguggaggaugaaggauguaccaaccugucagguuucucguacauggaacucaagguaggauacauuucagccaucaaaguaaacggguucacuuguacggguguagugacagaagcagagaccuacaccaacuuuguuggcuaugucacuaccacguuuaagagaaagcacuuccgcccaacgccggaugcaugcagagccgcauauaacuggaagauggcuggugaccccagauaugaagaaucucugcauaauccuuacccugauuaucauuggcuccgaacugugaagaccaccaaagaaucucuuguuaucauaucuccaaguguggcagauuuggacccauaugauaaaucccuucacucgagaguuuuuccuagcggaaaaugcucaggcauaacggugucuucuaccuacugcucuacuaaccacgacuauaccaucuggaugccugagaauccuaggcuagggaccucuugugacauuuucaccaauagcagagggaagagagcauccaaagggagcaagaccuguggauuuguagaugagaggggccuguacaagucucugaaaggagcaugcaaacugaaacuaugugggguucugggacucagacuuauggauggaacaugggccgcgauccagacaucagaugagaccaaauggugcccuccugaucaguuagugaaccugcaugacuuucgcucggaugaaauugaacaucuuguuguggaggagcuggucaagaaaagggaagagugucuagaugcacuggaguccaucaugaccaccaagucugugaguuucagacgucucagucacuugaggaaacuugugcccggguuuggaaaagcauauaccauauucaauaaaaccuugauggaggcugaugcucacuacaaaucaguccggacuuggaaugagaucauccccucuaaaggguguuuaagagucggggggagaugucacccucaugugaacgggguguucuucaaugguaucaucuuaggcccugacggccaugugcuaaucccggagaugcagucgucucuccuccagcagcacauggaguuguuggaauccucagucaucccuuuaaugcaucccuuggcagauccaucaacaguuuuuaaagaugaugacgaggcggaagauuuuguugagguucaccuuccagaugugcacaagcaggucucaggggucgaucucggucuuccaagcugggggaaguauguguugaugagcgcaggcgucuugaccgcauuaauguugaugaucuucuuaacgacguguuguagaagggccaauagagcagaaucggcucaacacagucuuggagagagggggaggaaagugucgguaaccucccaaagcgggcggguuauauccucaugggagucauacaaaaguggaggugagaccaagcuguaa

SEQ ID NO: 62708 - RNA, 1575 nt, Artificial Sequence
  derived and/or modified CDS sequence (wt) from glycoprotein__RABV__AB563986.1
augauuccucaggcucuuuuguuuguaccccuucuggucuuuucauuguguuucggaaaauuuccuaucuacacaauaccggacaaacuuggucccuggagccccauugauauacaucaucucagcuguccgaacaauuugguuguggaggaugaaggauguaccaacuugucagguuucucguacauggaacucaagguaggauacauuucagccaucaaagugaacggguucacuuguacggguguagugacagaagcagagaccuacaccaacuuuguuggcuaugucacuaccacguuuaagagaaagcacuuccgcccaaccccggaugcaugcagagccgcauauaacuggaagauggcuggugaccccagauaugaagaaucucugcauaauccuuacccugauuaucauuggcuccgaacugugaagaccaccaaagaaucucuuguuaucauaucuccaagugugccagauuuggacccauacgauaaaucccuucacucgagaguuuuuccuagcggaaaaugcucaggcauaacggugucuucuaccuacugcuccacuaaccacgacuauaccaucuggaugccugagaauccuagacuagggaccucuugugacauuuucaccaauagcagagggaagagagcauccaaagggagcaagaccuguggauuuguagaugagagaggccuguacaagucucugaaaggagcaugcaaacugaaacuaugugggguucugggacucagacuuauggauggaacaugggccgcgauccagacaucagaugagaccaaauggugcccuccugaucaguuagugaaccuacaugacuuucgcucggaugaaauugaacaucuuguuguggaggagcuggucaagaaaagagaagagugucuagaugcacuggaguccaucaugaccaccaagucugugaguuucagacgucucagucacuugaggaaacuugugcccggguuuggaaaagcauauaccauauucaauaagaccuugauggaggcugaugcucacuacaaaucaguccggacuuggaaugagaucauccccucuaaaggguguuuaagagucggggggagaugucacccucaugugaacgggguguucuucaaugguaucaucuuaggcccugacggccaugugcuaaucccggagaugcagucgucucuccuccagcagcauauggaguuauuggaauccucagucauccccuuaaugcaucccuuggcagauccaucaacaguuuuuaaagaugaugacgaggcggaagauuuuguugagguucaccuuccagaugugcacaagcaggucucaggggucgaucucggucucccaagcugggggaaguauguguugaugagcgcaggcgucuugaccgccuuaauguugaugauuuucuuaaugacguguugcagaaggaccaauagagcagaaucagcacaacacagucuuggagagagggggaggaaagugucgguaaccucccaaagugggcggguuauauccucaugggagucauacaaaaguggaggugagaccaagcuguaa

SEQ ID NO: 62709 - RNA, 1575 nt, Artificial Sequence
  derived and/or modified CDS sequence (wt) from glycoprotein__RABV__AB563987.1
augauuccucaggcucuuuuguuuguaccccuucuggucuuuucauuguguuucggaaaauuucccaucuacacgauaccggacaaacuuggucccuggagccccauugauauacaucaucucagcuguccgaacaacuugguuguggaggaugaaggauguaccaaccugucagguuucucguacauggaacucaagguaggauacaucucagccaucaaagugaacggguucacuuguacggguguagugacagaagcagagaccuacaccaacuuuguuggcuaugucacuaccacguuuaagagaaagcacuuccgcccaacgccggaugcaugcagagccgcauauaacuggaagauggcuggugaccccagauaugaagaaucucugcauaauccuuacccugauuaucauuggcuccgaacugugaagaccaccaaagaaucucuuguuaucauaucuccaaguguggcagauuuggacccauaugauaaaucccuucacucgagaguuuuuccuagcggaaaaugcucaggcauaacggugucuucuaccuacugcucuacuaaccacgacuauaccaucuggaugccugagaauccuagacuagggaccucuugugacauuuucaccaauagcagagggaagagagcauccaaagggagcaagaccuguggauuuguagaugagagaggccuauacaagucucugaaaggagcaugcaaacugaaacuaugugggguucugggacucagacuuauggauggaacaugggccgcgauccagacaucagaugagaccaaauggugcccuccugaucaguuagugaaccugcaugacuuucgcucggaugaaauugagcaucuuguuguggaggagcuggucaagaaaagggaagagugucuagaugcacuggaguccaucaugaccaccaagucugugaguuucagacgucucagucacuugaggaaacuugugcccggguuuggaaaagcauauaccauauucaauaagaccuugauggaggcugaugcucacuacaaaucaguccggacuuggaaugagaucauccccucuaaaggguguuuaagagucggggggagaugucacccucaugugaacgggguguucuucaaugguaucaucuugggcccugacggccaugugcuaaucccggagaugcagucgucucuccuccagcagcacauggaguuguuggaauccucagucaucccuuuaaugcaucccuuggcagauccaucaacaguuuuuaaagaugaugacgaggcggaagauuuuguugagguucaccuuccagaugugcacaagcaggucucaggggucgaucucggucuuccaagcugggggaaguauguguugaugagcgcaggcguauugaccgcauuaauguugaugauuuucuuaacgacguguuguagaagggccaauaaagcagaaucagcacaacacagucuuggagagagggggaggaaagugucgguaaccucccaaagcgggcggguuauauccucaugggagucauacaaaaguggaggugagaccaagcuguaa

SEQ ID NO: 62710 - RNA, 1575 nt, Artificial Sequence
  derived and/or modified CDS sequence (wt) from glycoprotein__RABV__AB563988.1
augauuccucaggcucuuuuguuuguaccccuucuggucucuucauuguguuucggaaaauuucccaucuacacgauaccggacaaacuuggucccuggagccccauugauauacaucaucucagcuguccgaacaauuugguuguggaggaugaaggauguaccaaccugucagguuucucguacauggaacucaagguaggauacauuucagccaucaaagugaacggguucacuuguacggguguagugacagaagcagagaccuacaccaacuuuguuggcuaugucacuaccacauuuaagagaaagcacuuccgcccaacgccagaugcaugcagagccgcauauaacuggaagauggcuggugaccccagauaugaagaaucucugcauaauccuuacccugauuaucauuggcuccgaacugugaagaccaccaaagaaucucuuguuaucauaucuccaaguguggcagauuuggacccauacgauaaaucccuucacucgagaguuuuuccuagcggaaaaugcucgggcauaacggugucuucuaccuacugcucuacuaaucacgacuauaccauuuggaugccugagaauccuagacuggggaccucuugugacauuuucacuaauagcagagggaagagagcauccaaagggagcaagaccugcggauuuguagaugagagaggccuguacaagucucugaaaggagcaugcaaacugaaacuaugugggguucugggacucagacuuauggauggaacaugggccgcgauccagacaucagacgagaccaaaugguguccuccugaucaguuagugaaccuacaugacuuucguucggaugaaauugaacaucuuguuguggaggagcuggucaagaaaagggaagagugucuagaugcacuggaguccaucaugaccaccaagucugugaguuucagacgucucagucacuugaggaaacuugugcccggguuuggaaaagcauauaccauauucaauaagaccuugauggaggcugaugcucacuacaaaucaguccggacuuggaaugagaucaucccaucuaaaggguguuuaagagucggggggagaugucacccucaugugaacgggguguucuucaaugguaucaucuuaggcccugacggccaugugcuaaucccggagaugcagucgucucuccuccagcagcauauggaguuguuggaauccucagucauccccuuaaugcaucccuuggcagauccaucaacaguuuucaaagaugaugacgaggcggaagauuuuguugagguucaccuuccagaugugcacaagcaggucucaggggucgaucucggucucccaagcugggggaaguauguguugacgagcgcaggggucuugaccgcacuaauguugaugauuuucuuaaugacguguuguagaagggccaauagagccgaaucugcacaacacagucuuggagagagggggaggaaagugucgguaaccucccaaagcggacggguuauauccucaugggagucauacaaaaguggaggugagaccaagcuguaa

SEQ ID NO: 62711 - RNA, 1575 nt, Artificial Sequence
  derived and/or modified CDS sequence (wt) from glycoprotein__RABV__AB563989.1
augauuccucaggcucuuuuguuuguaccccuucuggucuuuucauuguguuucggaaaauuuccuaucuacacaauaccggacaaacuuggucccuggagccccauugauauacaucaucucagcuguccgaacaauuugguuguggaggaugaaggauguaccaacuugucagguuucucguacauggaacucaagguaggauacauuucagccaucaaagugaacggguucacuuguacggguguagugacagaagcagagaccuacaccaacuuuguuggcuaugucacuaccacguuuaagagaaagcacuuccgcccaaccccggaugcaugcagagccgcauauaacuggaagauggcuggugaccccagauaugaagaaucucugcauaauccuuacccugauuaucauuggcuccgaacugugaagaccaccaaagaaucucuuguuaucauaucuccaaguguggcagauuuggacccauacgauaaaucccuucacucgagagucuuuccuagcggaaaaugcucaggcauaacggugucuucuaccuacugcuccacuaaccacgacuauaccaucuggaugccugagaauccuagacuagggaccucuugugacauuuucaccaauagcagagggaagagagcauccaaagggagcaagaccuguggauuuguagaugagagaggccuguacaagucucugaaaggagcaugcaaacugaaacuaugugggguucugggacucagacuuauggauggaacaugggccgcgauccagacaucagaugagaccaaauggugcccuccugaucaguuagugaaccuacaugacuuucgcucggaugaaauugaacaucuuguuguggaggagcuggucaagaaaagagaagaguguauagaugcacuggaguccaucaugaccaccaagucugugaguuucagacgucucagucacuugaggaaacuugugcccggguuuggaaaagcauauaccauauucaauaagaccuugauggaggcugaugcucacuacaaaucaguccggacuuggaaugagaucauccccucuaaaggguguuuaagagucggggggagaugucauccucaugugaacgggguguucuucaaugguaucaucuuaggcccugacggccaugugcuaaucccggagaugcagucgucucuccuccagcagcauauggaguuauuggaauccucagucauccccuuaaugcaucccuuggcagauccaucaacaguuuuuaaagaugaugacgaggcggaagauuuuguugagguucaccuuccagaugugcacaagcaggucucaggggucgaucucggucucccaagcugggggaaguauguguugaugagcgcaggcgucuugaccgccuuaauguugaugauuuucuuaaugacguguugcagaaggaccaauagagcagaaucagcacaacacagucuuggagagagggggaggaaagugucgguaaccucccaaagugggcggguuauauccucaugggagucauacaaaaguggaggugagaccaagcuguaa

SEQ ID NO: 62712 - RNA, 1575 nt, Artificial Sequence
  derived and/or modified CDS sequence (wt) from glycoprotein__RABV__AB563990.1
augauuccucaggcucuuuuguuuguaccccuucuggucuuuucauuguguuucggaaaauuuccuaucuacacaauaccggacaaacuuggucccuggagccccauugauauacaucaucucagcuguccgaacaauuugguuguggaggaugaaggauguaccaaccugucagguuucucguacauggaacucaagguaggauacauuucagccaucaaagugaacggguucacuuguacggguguagugacagaagcagagaccuacaccaacuuuguuggcuaugucacuacuacguuuaagagaaagcacuuccgcccaacgccggaugcaugcagagccgcauauaacuggaagauggcuggugaccccagauaugaagaaucucugcauaauccuuacccggauuaucauuggcuccgaacugugaagaccaccaaagaaucucuuguuaucauaucuccaaguguggcagauuuggacccauaugauaaaucccuucacucgagaguuuuuccuagcggaaaaugcucaggcauaacagugucuucuaccuacugcucaacuaaccacgacuauaccauuuggaugccugagaauccuagacuagggaccucuugugacauuuucaccaauagcagagggaagagagcauccaaagggagcaagaccuguggauuuguagaugagagaggccuguacaagucucugaaaggagcaugcaaacugaaacuaugugggauucugggacucagacuuauggauggaacaugggccgcgauccagacaucagaugagaccaaauggugcccuccugaucaguuagugaaccuacaugacuuucgcucggaugaaauugaacaucuuguuguggaggagcuggucaagaaaagagaagagugucuagaugcacuggaguccaucaugaccaccaagucugugaguuucagacgucucagucacuugaggaaacuugugcccggguuuggaaaagcauauaccauauucaauaagaccuugauggaggcugaugcucacuacaaaucaguccggacuuggaaugagaucauccccucuaaaggguguuuaagagucggggggagaugucacccucaugugaacgggguguucuucaauggcaucaucuuaggcccugacggccaugugcuaaucccggagaugcagucgucucuccuccagcagcauauggaguuauuggaauccucaguaauccccuuaaugcaccccuuggcagauccaucaacaguuuuuaaagaugaugacgaggcggaagauuuuguugagguucaccuuccagaugugcacaagcaggucucaggggucgaucucggucucccaagcugggggaaguauguguugaugagcgcaggcgucuugaccgccuuaauguugaugauuuucuuaaugacguguuguagaagggccaauagagcagaaucagcacaacacagucuuggagagagggggagaaaagugucgguaaccucccaaagugggcggguuauauccucaugggagucauacaagaguggaggugagaccaagcuguaa

SEQ ID NO: 62713 - RNA, 1575 nt, Artificial Sequence
  derived and/or modified CDS sequence (wt) from glycoprotein__RABV__AB563991.1
augauuccucaggcucuuuuguuuguaccccuucuggucuuuucauuguguuucggaaaauuuccuaucuacacaauaccggacaaacuuggucccuggagccccauugauauacaucaucucagcuguccgaacaauuugguuguggaggaugaaggauguaccaacuugucagguuucucguacauggaacucaagguaggauacauuucagccaucaaagugaacggguucacuuguacggguguagugacagaagcagagaccuacaccaacuuuguuggcuaugucacuaccacguuuaagagaaagcacuuccgcccaaccccggaugcaugcagagccgcauauaacuggaagauggcuggugaccccagauaugaagaaucucugcauaauccuuacccugauuaucauuggcuccgaacugugaagaccaccaaagaaucucuuguuaucauaucuccaaguguggcagauuuggacccauacgauaaaucccuucacucgagaguuuuuccuagcggaaaaugcucaggcauaacggugucuucuaccuacugcuccacuaaccacgacuauaccaucuggaugccugagaauccuagacuagggaccucuugugacauuuucaccaauagcagagggaagagagcauccaaagggagcaagaccuguggauuuguagaugagagaggccuguacaagucucugaaaggagcaugcaaacugaaacuaugugggguucugggacucagacuuauggauggaacaugggccgcgauccagacaucagaugagaccaaauggugcccuccugaucaguuagugaaccuacaugacuuucgcucggaugaaauugaacaucuuguuguggaggagcuggucagaaagagagaagagugucuagaugcacuggaguccaucaugaccaccaagucugugaguuucagacgucucagucacuugaggaaacuugugcccggguuuggaaaagcauauaccauauucaauaagaccuugauggaggcugaugcucacuacaaaucaguccggacuuggaaugagaucauccccucuaaaggguguuuaagagucggggggagaugucauccucaugugaacgggguguucuucaaugguaucaucuuaggcccugacggccaugugcuaaucccggagaugcagucgucucuccuccagcagcauauggaguuauuggaauccucagucauccccuuaaugcaucccuuggcagauccaucaacaguuuuuaaagaugaugacgaggcggaagauuuuguugagguucaccuuccagaugugcacaagcaggucucaggggucgaucucggucucccaagcugggggaaguauguguugaugagcgcaggcgucuugaccgccuuaauguugaugauuuucuuaaugacguguugcagaaggaccaauagagcagaaucagcacaacacagucuuggagagagggggaggaaagugucgguaaccucccaaagugggcggguuauauccucaugggagucauacaaaaguggaggugagaccaagcuguaa

SEQ ID NO: 62714 - RNA, 1575 nt, Artificial Sequence
  derived and/or modified CDS sequence (wt) from glycoprotein__RABV__AB563992.1
augauuccucaggcucuuuuguuuguaccccuucuggucucuucauuguguuucggaaaauuucccaucuacacgauaccggacaaacuuggucccuggagccccauugauauacaucaucucagcuguccgaacaauuuaguuguggaggaugaaggauguaccaaccugucagguuucucguacauggaacucaagguaggauacauuucagccaucaaagugaacggguucacuuguacggguguagugacagaagcagagaccuacaccaacuuuguuggcuaugucacuaccacguuuaagagaaagcacuuccguccaacgccagaugcaugcagagccgcauauaacuggaagauggcuggugaccccagauaugaagaaucucugcacaauccuuacccugauuaucauuggcuccgaacugugaagaccaccaaagaaucucuuguuaucauaucuccaaguguggcagauuuggacccauacgauaaaucccuucacucgagaguuuuuccuagcggaaaaugcucgggcauaacggugucuucuaccuacugcucuaccaaccacgacuauaccauuuggaugccugagaauccuagacuagggaccucuugugacauuuucacuaauagcagagggaagagagcauccaaagggagcaagaccugcggauuuguagaugagagaggccuguacaagucucugaaaggagcaugcaaacugaaacuaugugggguucugggacucagacuuauggauggaacaugggccgcgauccagacaucagaugagaccaaauggugcccuccugaucaguuagugaaccuacaugacuuccgcucggaugaaauugaacaucuuguuguggaggagcuggucaagaaaagggaagagugucuagaugcacuggaguccaucaugaccaccaagucugugaguuucagacgucucagucacuugaggaaacuugugcccggguuuggaaaagcauauaccauauucaauaagaccuugauggaggcugaugcucacuacaaaucaguccggacuuggaaugagaucaucccaucuaaaggguguuuaagagucggggggagaugucacccucaugugaacgggguguucuucaaugguaucaucuuaggcccugacggccaugugcuaaucccggagaugcagucgucucuccuccagcagcauauggaguuguuggaauccucagucauccccuuaaugcaucccuuggcagauccaucaacaguuuucaaagaugaugacgaggcggaagauuuuguugagguucaucuuccagaugugcauaagcaggucucaggggucgaucucggucucccaagcugggggaaguauguguugacgagcgcaggcgucuugaccgcacuaauguugaugauuuucuuaaugacguguuguagaagggccaauagagccgaaucugcacaacacagucuuggagagagggggaggaaagugucaguaaccucucaaagcgggcggguuauauccucaugggagucauacaaaaguggaggugagaccaagcuguaa

SEQ ID NO: 62715 - RNA, 1575 nt, Artificial Sequence
  derived and/or modified CDS sequence (wt) from glycoprotein__RABV__AB563993.1
augauuccucaggcucuuuuguuuguaccccuucuggucucuucauuguguuucggaaaauuucccaucuacacgauaccggacaaacuuggucccuggagccccauugauauacaucaucucagcuguccgaacaauuuaguuguggaggaugaaggauguaccaaccugucagguuucucguacauggaacucaagguaggauacauuucagccaucaaagugaacggguucacuuguacggguguagugacagaagcagagaccuacaccaacuuuguuggcuaugucacuaccacguuuaagagaaagcacuuccguccaacgccagaugcaugcagagccgcauauaacuggaagauggcuggugaccccagauaugaagaaucucugcacaauccuuacccugauuaucauuggcuccgaacugugaagaccaccaaagaaucucuuguuaucauaucuccaaguguggcagauuuggacccauacgauaaaucccuucacucgagaguuuuuccuagcggaaaaugcucgggcauaacggugucuucuaccuacugcucuaccaaccacgacuauaccauuuggaugccugagaauccuagacuagggaccucgugugacauuuucacuaauagcagagggaagagagcauccaaagggagcaagaccugcggauuuguagaugagagaggccuguacaagucucugaaaggagcaugcaaacugaaacuaugugggguucugggacucagacuuauggauggaacaugggccgcgauccagacaucagaugagaccaaauggugcccuccugaucaguuagugaaccuacaugacuuccgcucggaugaaauugaacaucuuguuguggaggagcuggucaagaaaagggaagagugucuagaugcacuggaguccaucaugaccaccaagucugugaguuucagacgucucagucacuugaggaaacuugugcccggguuuggaaaagcauauaccauauucaauaagaccuugauggaggcugaugcucacuacaaaucaguccggacuuggaaugagaucaucccaucuaaaggguguuuaagagucggggggagaugucacccucaugugaacgggguguucuucaaugguaucaucuuaggcccugacggccaugugcuaaucccggagaugcagucgucucuccuccagcagcauauggaguuguuggaauccucagucauccccuuaaugcaucccuuggcagauccaucaacaguuuucaaagaugaugacgaggcggaagauuuuguugagguucaucuuccagaugugcauaagcaggucucaggggucgaucucggucucccaagcugggggaaguauguguugacgagcgcaggcgucuugaccgcacuaauguugaugauuuucuuaaugacguguuguagaagggccaauagagccgaaucugcacaacacagucuuggagagagggggaggaaagugucaguaaccucucaaagcgggcggguuauauccucaugggagucauacaaaaguggaggugagaccaagcuguaa

SEQ ID NO: 62716 - RNA, 1575 nt, Artificial Sequence
  derived and/or modified CDS sequence (wt) from glycoprotein__RABV__AB563994.1
augauuccucaggcucuuuuguuuguaccccuucuggucuuuucauuguguuucggaaaauuucccaucuacacgauaccggacaaacuuggucccuggagccccauugauauacaucaucucagcuguccgaacaauuugguuguggaggaugaaggauguaccaaccugucagguuucucguacauggaacucaagguaggauacauuucagccaucaaagugaacggguucacuuguacggguguagugacagaagcagagaccuacaccaacuuuguuggcuaugucacuaccacguuuaagagaaagcacuuccgcccaacgccggaugcaugcagagccgcauauaacuggaagauggcuggugaccccagauaugaagaaucucugcauaauccuuacccugauuaucauuggcuccgaacugugaagaccaccaaagaaucucuuguuaucauaucuccaaguguggcagauuuggacccauacgauaaaucccuucacucgagaguuuuuccuagcggaaaaugcucaggcauaacggugucuucuaccuacugcuccacuaaccacgacuauaccaucuggaugccugagaauccuagacuagggaccucuugugacauuuucaccaauagcagagggaagagagcguccaaagggagcaagaccuguggauuuguagaugagagaggccuguacaagucucugaaaggagcaugcaaacugaaacuaugugggguucugggacucagacuuauggaugggacaugggccgcgauccagacaucagaugagaccaaauggugcccuccugaucaguuagugaaccuacaugacuuucgcucggaugaaauugaacaucuuguuguggaggagcuggucaagaaaagggaagagugucuagaugcacuggaguccaucaugaccaccaagucugugaguuucagacgucucagucacuugaggaaacuugugcccggguuuggaaaagcauauaccauauucaauaagaccuugauggaggcugaugcucacuacaaaucaguccggacuuggaaugagaucauccccucuaaaggguguuuaagagucggggggagaugucacccucaugugaacgggguguucuucaaugguaucaucuuaggcccugacggccaugugcuaaucccggagaugcagucgucucuccuccagcagcauauggaguuauuggaauccucagucauccccuuaaugcaucccuuggcagauccaucaacaguuuuuaaagaugaugacgaggcggaagauuuuguugagguucaccuuccagaugugcacaagcaggucucagggguugaucucggucucccaagcugggggaaguauguguugaugagcgcaggcgucuugaccgcauuaauguugaugauuuucuuaaugacguguuguagaagggccaauagaguagaaucagcacaacacagucuuggagagagggggaggaaagugucuguaaccucccaaagcgggcggguuauauccucaugggagucauacaaaaguggaggugagaccaagcuguaa

SEQ ID NO: 62717 - RNA, 1575 nt, Artificial Sequence
  derived and/or modified CDS sequence (wt) from glycoprotein__RABV__AB563996.1
augauuccucaggcucuuuuguuuguaccccuucuggucuuuucauuguguuucggaaaauuucccaucuacacgauaccggacaaacuuggucccuggagccccauugauauacaucaucucagcuguccgaacaauuugguuguggaggaugaaggauguaccaaccugucagguuucucguacauggaacucaagguaggauacauuucagccaucaaagugaacggguucacuuguacggguguagugacagaagcagagaccuacaccaacuuuguuggcuaugucacuaccacguuuaagagaaagcacuuccgcccaacgccggaugcaugcagagccgcauauaacuggaagauggcuggugaccccagauaugaagaaucucugcauaauccuuacccugauuaucauuggcuccgaacugugaagaccaccaaagaaucucuuguuaucauaucuccaaguguggcagauuuggacccauacgauaaaucccuucacucgagaguuuuuccuagcggaaaaugcucaggcauaacggugucuucuaccuacugcuccacuaaccacgacuauaccaucuggaugccugagaauccuagacuagggaccucuugugacauuuucaccaacagcagagggaagagagcaucaaaagggagcaagaccuguggauuuguagaugagagaggccuguacaagucucugaaaggagcaugcaaauugaaacuaugugggguucugggacucagacuuauggauggaacaugggccgcgauccagacaucagaugagaccaaauggugcccuccugaucaguuagugaaccuacaugacuuucgcucggaugaaauugaacaucuuguuguggaggagcuggucaagaaaagggaagagugucuagaugcacuggaguccaucaugaccacaaagucugugaguuucagacgucucagucacuugaggaaacuuguacccggguuuggaaaagcauauaccauauucaauaagaccuugauggaggcugaugcucacuacaaaucaguccggacuuggaaugagaucauccccucuaaaggguguuuaagagucggggggagaugucacccucaugugaacgggguguucuucaaugguaucaucuuaggcccugacggccaugugcuaaucccggagaugcagucgucucuucuccagcagcauauggaguuauuggaauccucagucauccccuuaaugcaucccuuggcagauccaucaacaguuuuuaaagaugaugacgaggcggaagauuuuguugagguucaccuuccagaugugcacaagcaggucucaggugucgaucucggucucccaagcugggggaaguauguguugaugagcgcaggcgucuugaccgcauuaauguugaugauuuucuuaaugacguguugucgaagggccaauagagcagaaucagcacaacacagucuuggagagagggggaggaaagugucgguaaccucccagagcgggcggguuauauccucaugggaaucauacaaaaguggaggugagaccaagcuguaa

SEQ ID NO: 62718 - RNA, 1575 nt, Artificial Sequence
  derived and/or modified CDS sequence (wt) from glycoprotein__RABV__AB563997.1
augauuccucaggcucuuuuguuuguacccauucuggucuuuucauuguguuucggaaaauuucccaucuacacgauaccggacaaacuuggucccuggagccccauugauauacaucaucucagcuguccgaacaauuugguuguggaggaugaaggauguaccaaccugucagguuucucguacauggaacucaagguaggauacauuucagccaucaaagugaacggguucacuuguacggguguagugacagaagcagagaccuacaccaacuuuguuggcuaugucacuaccacguuuaagagaaagcacuuccgcccaacgccggaugcaugcagagccgcauauaacuggaagauggcuggugaccccagauaugaagaaucucugcauaacccuuacccugauuaucauuggcuccgaacugugaagaccaccaaagaaucucuuguuaucauaucuccaaguguggcagauuuggacccauacgauaaaucccuucacucgagaguuuuuccuagcggaaaaugcucaggcauaacgguguccucuaccuacugcuccacuaaccacgauuauaccauauggaugccugaaaauccuagacuagggaccucuugugacauuuucaccaauagcagagggaagagagcauccaaagggagcaagaccuguggauuuguagaugagagaggccuguacaagucucugaaaggagcaugcaaacugaaacuaugugggguucugggacucagacuuauggauggaacaugggccgcgauccagacaucagaugagaccaaauggugcccuccugaucaguuagugaaccuacaugacuuucgcucggaugaaauugaacaucuuguuguggaggaguuggucaagaaaagggaagagugucuagaugcacuggaguccaucaugaccaccaagucugugaguuucagacgucucagucacuugaggaaacuuguacccggguuuggaaaagcauauaccauauucaauaagaccuugauggaggcugaugcucacuacaaaucaguccggacuuggaacgagaucauccccucuaaaggguguuuaagagucggggggagaugucacccucaugugaacgggguguucuucaaugguaucaucuuaggcccugauggccaugugcuaaucccggagaugcagucgucucuccuccagcagcauauggaguuguuggaauccucagucauccccuuaaugcaucccuuggcagauccaucaacaguuuuuaaagaugaugacgaggcagaagauuuuguugagguucaccuuccagaugugcacaagcaggucucagggguugaccucggucucccaagcugggggaaguauguguugaugagcgcaggcgucuugaccgcacuaauguugaugauuuucuuaaugacgugcuguagaagggccaguaggguagaaucagcacaacacagucuuggagagagggggaggaaagugucggugaccucccaaagcgggcggguuauauccucaugggagucauacaaaaguggaggugagaccaagcuguaa

SEQ ID NO: 62719 - RNA, 1575 nt, Artificial Sequence
  derived and/or modified CDS sequence (wt) from glycoprotein__RABV__AB563998.1
augauuccucaggcucuuuuguuuguaccccuucuggucuuuucauuguguuucggaaaauuucccaucuacacgauaccggacaaacuuggucccuggagccccauugauauacaucaucucagcuguccgaacaauuugguuguggaggaugaaggauguaccaaccugucagguuucucguacauggaacucaagguaggauacauuucagccaucaaagugaauggguucacuuguacggguguagugacagaagcagagaccuacaccaacuuuguuggcuaugucacuaccacguuuaagagaaagcacuuccgcccaacgccggaugcaugcagagccgcauauaacuggaagauggcuggugaccccagauaugaagaaucucugcauaagccuuacccugauuaucauuggcuccgaacugugaagaccaccaaagaaucucuuguuaucauaucuccaaguguggcagauuuggacccauacgauaaaucccuucacucgagaguuuuuccuaacggaaaaugcucaggcauaacggugucuucuaccuacugcuccacuaaccacgacuauaccaucuggaugccugagaauccuagacuagggaccucuugugacauuuucaccaacagcagagggaagagagcaucaaaagggagcaagaccuguggauuuguagaugagagaggccuguacaagucucugaaaggagcaugcaaacugaaacuaugugggguucugggacucagacuuauggauggaacaugggccgcgauccagacaucagaugagaccaaauggugcccuccugaucaguuagugaaccuacaugacuuucgcucggaugaaauugaacaucuuguuguggaggagcuggucaagaaaagggaagagugucuagaugcacuggaguccaucaugaccacaaagucugugaguuucagacgucucagucacuugaggaaacuugugcccggguuuggaaaagcauauaccauauucaauaagaccuugauggaggcugaugcucacuacaaaucaguccggacuuggaaugagaucauccccucuaaaggguguuuaagagucggggggagaugucacccucauguaaacgggguguucuucaaugguaucaucuuaggcccugacggccaugugcuaaucccggagaugcagucgucucuccuccagcagcauauggaguuauuggaauccucagucauccccuuaaugcaucccuuggcagauccaucaacaguuuuuaaagaugaugacgaggcggaagauuuuguugagguucaccuuccagaugugcacaagcaggucucaggggucgaucucggucucccaagcugggggaaguauguguugaugagcgcaggcgucuugaccgcauuaauguugaugauuuucuuaaugacguguugucgaagggccaauagagcagaaucagcacaacacagucuuggagagagggggaggaaagugucgguaaccucccaaagcgggcggguuauauccucaugggagucauacaaaaguggaggugagaccaagcuguaa

SEQ ID NO: 62720 - RNA, 1575 nt, Artificial Sequence
  derived and/or modified CDS sequence (wt) from glycoprotein__RABV__AB563999.1
augauuccucaggcucuuuuguuuguaccccuucuggucucuucauuguguuucggaaaauuucccaucuacacgauaccggacaaacuuggucccuggagccccauugauauacaucaucucagcuguccgaacaauuuaguuguggaggaugaaggauguaccaaccugucagguuucucguacauggaacucaagguaggauacauuucagccaucaaagugaacggguucacuuguacggguguagugacagaagcagagaccuacaccaacuuuguuggcuaugucacuaccacguuuaagagaaagcacuuccguccaacgccagaugcaugcagagccgcauauaacuggaagauggcuggugaccccagauaugaagaaucucugcacaauccuuacccugauuaucauuggcuccgaacugugaagaccaccaaagaaucucuuguuaucauaucuccaaguguggcagauuuggacccauacgauaaaucccuucacucgagaguuuuuccuagcggaaaaugcucgggcauaacggugucuucuaccuacugcucuaccaaccacgacuauaccauuuggaugccugagaauccuagacuagggaccucuugugacauuuucacuaauagcagagggaagagagcauccaaagggagcaagaccugcggauuuguagaugagagaggccuguacaagucucugaaaggagcaugcaaacugaaacuaugugggguucugggacucagacuuauggauggaacaugggccgcgauccagacaucagaugagaccaaauggugcccuccugaucaguuagugaaccuacaugacuuccgcucggaugaaauugaacaucuuguuguggaggagcuggucaagaaaagggaagagugucuagaugcacuggaguccaucaugaccaccaagucugugaguuucagacgucucagucacuugaggaaacuugugcccggguuuggaaaagcauauaccauauucaauaagaccuugauggaggcugaugcucacuacaaaucaguccggacuuggaaugagaucaucccaucuaaaggguguuuaagagucggggggagaugucacccucaugugaacgggguguucuucaaugguaucaucuuaggcccugacggccaugugcuaaucccggagaugcagucgucucuccuccagcagcauauggaguuguuggaauccucagucauccccuuaaugcaucccuuggcagauccaucaacaguuuucaaagaugaugacgaggcggaagauuuuguugagguucaucuuccagaugugcauaagcaggucucaggggucgaucucggucucccaagcugggggaaguauguguugacgagcgcaggcgucuugaccgcacuaauguugaugauuuucuuaaugacguguuguagaagggccaauagagccgaaucugcacaacacagucuuggagagagggggaggaaagugucaguaaccucucaaagcaggcggguuauauccucaugggagucauacaaaaguggaggugagaccaagcuguaa

SEQ ID NO: 62721 - RNA, 1575 nt, Artificial Sequence
  derived and/or modified CDS sequence (wt) from glycoprotein__RABV__AB564001.1
augauuccucaggcucuuauguuugugccccuucuggucuuuucauuguguuucgggaaauuccccaucuacacgauaccggacaaacuuggccccuggagccccauugauauacaucaucucagcuguccgaacaauuuaguuguggaggaugaaggauguaccaaccugucagguuucucauacauggaacucaaagugggauauauuucagccaucaaagugaacggguucacuuguacggguguggugacagaagcagaaaccuacaccaacuuuguuggcuaugucacuacuacguuuaagagaaagcacuuccgcccgaugccagaugcaugcagagccgcauauaacuggaagauggcuggugaccccagauaugaggagucucugcauaauccuuaccccgauuaucauuggcuccggacugugaagaccaccaaagaaucucuuguuaucauaucuccaaguguggcagauuuggacccauacgauaaaucccuucacucgagaguuuucccuagcggaaaaugcucaggcaugacagugucuucuaccuacugcucuacuaaccacgacuauaccaucuggaugccugagaauccuagacuagggaccucuugugacauuuucaccaauagcagggggaagagagcauccaaagggagcaagaccuguggauuuguagaugagagaggccuauacaaaucucugaaaggagcgugcaaacugaaacuaugugggguucuuggacucagacuuauggauggaacaugggccgcaauccagacaucagaugagaccaaauggugcccuccugaucaguuagugaaccuacaugacuuucguuuggaugaaauugaacaccuuguuguggaggagcuggucaagaaaagggaagagugucuagaugcacuggaguccaucaugaccaccaagucugugaguuucagacgucucagucacuugaggaaacuugugccuggguuugggaaagcguauaccauauucaauaagaccuugauggaggcugaugcucacuacaagucaguccggacuuggaaugagaucauccccucuaaaggguguuuaagagucggggggagaugucacccucaugugaacgggguuuucuucaaugguaucaucuuaggcccugacggccaugugcuaaucccggagaugcagucgucucuccuccagcagcauauggaguugcuggaauccucagucauccccuuaaugcaucccuuggcagauccaucaacaguuuuuaaaggugaugacgaggcggaagauuuuguugagguucaccuuccagaugugcacaagcagguuucaggggucgaucucggucucccaagcugggggaaguauguguugaugagcgcaggcgucuugaccgcacuaauguugaugauuuucuuaaugacguguuguaaaagggccaauagagcagaaucagcacaccacagucuuggagagagggggaggaaagugucgguaaccucccaaagcgggcgggucauauccucaugggagucauacaaaaguggaggugagacuaaacuguaa

SEQ ID NO: 62722 - RNA, 1575 nt, Artificial Sequence
  derived and/or modified CDS sequence (wt) from glycoprotein__RABV__AB564002.1
augauuccucgggcucuuauguuugugccccuucuggucuuuucauuguguuucgggaaauuccccaucuacacgauaccggacaaacuuggccccuggagccccauugauauacaucaucucagcuguccgaacaauuuaguuguggaggaugaaggauguaccaaccugucagguuucucauacauggaacucaaagugggauauauuucagccaucaaagugaacggguucacuuguacggguguggugacagaagcagaaaccuacaccaacuuuguuggcuaugucacuacuacguuuaagagaaagcacuuccgcccgaugccagaugcaugcagagccgcauauaacuggaagauggcuggugaccccagauaugaggagucucugcauaauccuuaccccgauuaucauuggcuccggacugugaagaccaccaaagaaucucuuguuaucauaucuccaaguguggcagauuuggacccauacgauaaaucccuucacucgagaguuuucccuagcggaaaaugcucaggcaugacagugucuucuaccuacugcucuacuaaccacgacuauaccaucuggaugccugagaauccuagacuagggaccucuugugacauuuucaccaauagcagggggaagagagcauccaaagggagcaagaccuguggauuuguagaugagagaggccuauacaaaucucugaaaggagcgugcaaacugaaacuaugugggguucuuggacucagacuuauggauggaacaugggccgcaauccagacaucagaugagaccaaauggugcccuccugaucaguuagugaaccuacaugacuuucguucggaugaaauugaacaccuuguuguggaggagcuggucaagaaaagggaagagugucuagaugcacuggaguccaucaugaccaccaagucugugaguuucagacgucucagucacuugaggaaacuugugccuggguuugggaaagcguauaccauauucaauaagaccuugauggaggcugaugcucacuacaagucaguccggacuuggaaugagaucauccccucuaaaggguguuuaagagucggggggagaugucacccucaugugaacgggguuuucuucaaugguaucaucuuaggcccugacggccaugugcuaaucccggagaugcagucgucucuccuccagcagcauauggaguugcuggaauccucagucauccccuuaaugcaucccuuggcagauccaucaacaguuuuuaaaggugaugacgaggcggaagauuuuguugagguucaccuuccagaugugcacaagcagguuucaggggucgaucucggucucccaagcugggggaaguauguguugaugagcgcaggcgucuugaccgcacuaauguugaugauuuucuuaaugacguguuguaaaagggccaauagagcagaaucagcacaccacaaucuuggagagagggggaggaaagugucgguaaccucccaaagcgggcgggucauauccucaugggagucauacaaaaguggaggugagacuaaacuguaa

SEQ ID NO: 62723 - RNA, 1575 nt, Artificial Sequence
  derived and/or modified CDS sequence (wt) from glycoprotein__RABV__AB564004.1
augauuccucaggcucuuauguuugugccccuucuggucuuuucauugugucucgggaaauuccccaucuacacgauaccggacaaacuuggccccuggagccccauugauauacaucaucucagcuguccgaacaauuuaguuguggaggaugaaggauguaccaaccugucagguuucucauacauggaacucaaagugggauauauuucagccaucaaagugaacggguucacuuguacggguguggugacagaagcagaaaccuacaccaacuuuguuggcuaugucacuacuacguuuaagagaaagcacuuccgcccgaugccagaugcaugcagagccgcauauaacuggaagauggcuggugaccccagauaugaggagucucugcauaauccuuaccccgauuaucauuggcuccggacugugaagaccaccaaagaaucucuuguuaucauaucuccaaguguggcagauuuggacccauacgauaaaucccuucacucgagaguuuucccuggcggaaaaugcucaggcaugacagugucuucuaccuacugcucuacuaaccacgacuauaccaucuggaugccugagaauccuagacuagggaccucuugugacauuuucaccaauagcagggggaagagagcauccaaagggagcaagaccuguggauuuguagaugagagaggccuauacaaaucucugaaaggagcgugcaaacugaaacuaugugggguucuuggacucagacuuauggauggaacaugggccgcaauccagacaucagaugagaccaaauggugcccuccugaucaguuagugaaccuacaugacuuucguucggaugaaauugaacaccucguuguggaggagcuggucaagaaaagggaagagugucuagaugcacuggaguccaucaugaccaccaagucugugaguuucagacgucucagucacuugaggaaacuugugccuggguuugggaaagcguauaccauauucaauaagaccuugauggaggcugaugcucacuacaagucaguccggacuuggaaugagaucauccccucuaaaggguguuuaagagucggggggagaugucacccucaugugaacgggguuuucuucaaugguaucaucuuaggcccugacggccaugugcuaaucccggagaugcagucgucucuccuccagcagcauauggaguugcuggaauccucagucauccccuuaaugcaucccuuggcagauccaucaacaguuuuuaaaggugaugacgaggcggaagauuuuguugagguucaccuuccagaugugcacaagcagguuucaggggucgaucucggucucccaagcugggggaaguauguguugaugagcgcaggcgucuugaccgcacuaauguugaugauuuucuuaaugacguguuguaaaagggccaauagagcagaaucagcacaccacagucuuggagagagggggaggaaagugucgguaaccucccaaagcgggcgggucauauccucaugggagucauacaaaaguggaggugagacuaaacuguaa

SEQ ID NO: 62724 - RNA, 1575 nt, Artificial Sequence
  derived and/or modified CDS sequence (wt) from glycoprotein__RABV__AB564005.1
augauuccucaggcucuuauguuugugccccuucuggucuuuucauuguguuucgggaaauuccccaucuacacgauaccggacaaacuuggccccuggagccccauugauauacaucaucucagcuguccgaacaauuuaguuguggaggaugaaggauguaccaaccugucagguuucucauacauggaacucaaagugggauauauuucagccaucaaagugaacggguucacuuguacggguguggugacagaagcagaaaccuacaccaacuuuguuggcuaugucacuacuacguuuaagagaaagcacuuccgcccgaugccagaugcaugcagagccgcauauaacuggaagauggcuggugaccccagauaugaggagucucugcauaauccuuaccccgauuaucauuggcuccggacugugaagaccaccaaagaaucucuuguuaucauaucuccaaguguggcagauuuggacccauacgauaaaucccuucacucgagaguuuucccuagcggaaaaugcucaggcaugacagugucuucuaccuacugcucuacuaaccacgacuauaccaucuggaugccugagaauccuagacuagggaccucuugugacauuuucaccaauagcagggggaagagagcauccaaagggagcaagaccuguggauuuguagaugagagaggccuauacaaaucucugaaaggagcgugcaaacugaaacuaugugggguucucggacucagacuuauggauggaacaugggccgcaauccagacaucagaugagaccaaauggugcccuccugaucaguuagugaaccuacaugacuuucguucggaugaaauugaacaccuuguuguggaggagcuggucaagaaaagggaagagugucuagaugcacuggaguccaucaugaccaccaagucugugaguuucagacgucucagucacuugaggaaacuugugccuggguuugggaaagcguauaccauauucaauaagaccuugauggaggcugaugcucacuacaagucaguccggacuuggaaugagaucauccccucuaaaggguguuuaagagucggggggagaugucacccucaugugaacgggguuuucuucaaugguaucaucuuaggcccugacggccaugugcuaaucccggagaugcagucgucucuccuccagcagcauauggaguugcuggaauccucagucauccccuuaaugcaucccuuggcagauccaucaacaguuuuuaaaggugaugacgaggcggaagauuuuguugagguucaccuuccagaugugcacaagcagguuucaggggucgaucucggucucccaagcugggggaaguauguguugaugagcgcaggcguuuugaccgcacugauguugaugauuuucuuaaugacguguuguaaaagggccaauagagcagaaucagcacaccacagucuuggagagagggggaggaaagugucgguaaccucccaaagcgggcgggucauauccucaugggagucauacaaaaguggaggugagacuaaacuguaa

SEQ ID NO: 62725 - RNA, 1575 nt, Artificial Sequence
  derived and/or modified CDS sequence (wt) from glycoprotein__RABV__AB564006.1
augauuccucaggcucuuauguuugugccccuucuggucuuuucauuguguuucgggaaauuccccaucuacacgauaccggacaaacuuggccccuggagccccauugauauacaucaucucagcuguccgaacaauuuaguuguggaggaugaaggauguaccaaccugucagguuucucauacauggaacucaaagugggauauauuucagccaucaaagugaacggguucacuuguacggguguggugacagaagcagaaaccuacaccaacuuuguuggcuaugucacuacuacguuuaagagaaagcacuuccgcccgaugccagaugcaugcagagccgcauauaacuggaagauggcuggugaccccagauaugaggagucucugcauaauccuuaccccgauuaucauuggcuccggacugugaagaccaccaaagaaucucuuguuaucauaucuccaaguguggcagauuuggacccauacgauaaaucccuucacucgagaguuuucccuagcggaaaaugcucaggcaugacagugucuucuaccuacugcucuacuaaccacgacuauaccaucuggaugccugagaauccuagacuagggaccucuugugacauuuucaccaauagcagggggaagagagcauccaaagggagcaagaccuguggauuuguagaugagagaggccuauacaaaucucugaaaggagcgugcaaacugaaacuaugugggguucuuggacucagacuuauggauggaacaugggccgcaauccagacaucagaugagaccaaauggugcccuccugaucaguuagugaaccuacaugacuuucguucggaugaaauugaacaccuuguuguggaggagcuggucaagaaaagggaagagugucuagaugcacuggaguccaucaugaccaccaagucugugaguuucagacgucucagucacuugaggaaacuugugccuggguuugggaaagcguauaccauauucaauaagaccuugauggaggcugaugcucacuacaagucaguccggacuuggaaugagaucauccccucuaaaggguguuuaagagucggggggagaugucacccucaugugaacgggguuuucuucaaugguaucaucuuaggcccugacggccaugugcuaaucccggagaugcagucgucucuccuccagcagcauauggaguugcuggaauccucagucauccccuuaaugcaucccuuggcagauccaucaacaguuuuuaaaggugaugacgaggcggaagauuuuguugagguucaccuuccagaugugcacaagcagguuucaggggucgaucucggucucccaagcugggggaaguauguguugaugagcgcaggcgucuugaccgcacuaauguugaugauuuucuuaaugacguguuguaaaagggccaauagagcagaaucagcacaccacagucuuggagagagggggaggaaagugucgguaaccucccaaagcgggcgggucauauccucaugggagucauacaaaaguggaggugagacuaaacuguaa

SEQ ID NO: 62726 - RNA, 1575 nt, Artificial Sequence
  derived and/or modified CDS sequence (wt) from glycoprotein__RABV__AB564007.1
augauuccucaggcucuuauguuugugccccuucuggucuuuucauuguguuucgggaaauuccccaucuacacgauaccggacaaacuuggccccuggagccccauugauauacaucaucucagcuguccgaacaauuuaguuguggaggaugaaggauguaccaaccugucagguuucucauacauggaacucaaagugggauauauuucagccaucaaagugaacggguucacuuguacggguguggugacagaagcagaaaccuacaccaacuuuguuggcuaugucacuacuacguuuaagagaaagcacuuccgcccgaugccagaugcaugcagagccgcauauaacuggaagauggcuggugaccccagauaugaggagucucugcauaauccuuaccccgauuaucauuggcuccggacugugaagaccaccaaagaaucucuuguuaucauaucuccaaguguggcagauuuggacccauacgauaaaucccuucacucgagaguuuucccuggcggaaaaugcucaggcaugacagugucuucuaccuacugcucuacuaaccacgacuauaccaucuggaugccugagaauccuagacuagggaccucuugugacauuuucaccaauagcagggggaagagagcauccaaagggagcaagaccuguggauuuguagaugagagaggccuauacaaaucucugaaaggagcgugcaaacugaaacuaugugggguucuuggacucagacuuauggauggaacaugggccgcaauccagacaucagaugagaccaaauggugcccuccugaucaguuagugaaccuacaugacuuucguucggaugaaauugaacaccucguuguggaggagcuggucaagaaaagggaagagugucuagaugcacuggaguccaucaugaccaccaagucugugaguuucagacgucucagucacuugaggaaacuugugccuggguuugggaaagcguauaccauauucaauaagaccuugauggaggcugaugcucacuacaagucaguccggacuuggaaugagaucauccccucuaaaggguguuuaagagucggggggagaugucacccucaugugaacgggguuuucuucaaugguaucaucuuaggcccugacggccaugugcuaaucccggagaugcagucgucucuccuccagcagcauauggaguugcuggaauccucagucauccccuuaaugcaucccuuggcagauccaucaacaguuuuuaaaggugaugacgaggcggaagauuuuguugagguucaccuuccagaugugcacaagcagguuucaggggucgaucucggucucccaagcugggggaaguauguguugaugagcgcaggcgucuugaccgcacuaauguugaugauuuucuuaaugacguguuguaaaagggccaauagagcaaaaucagcacaccacagucuuggagagagggggaggaaagugucgguaaccucccaaagcgggcgggucauauccucaugggagucauacaaaaguggaggugagacuaaacuguaa

SEQ ID NO: 62727 - RNA, 1575 nt, Artificial Sequence
  derived and/or modified CDS sequence (wt) from glycoprotein__RABV__AB564008.1
augaauccucaggcucuuauguuuguaccucuucuggucuuuucauuguguuucgggaaauuccccaucuacacgauaccggacaaacuuggucccuggagccccauugauauacaucaucucagcuguccgaacaauuugguuguggaggacgaaggauguaccaaccugucagguuucucauacauggaacucaaaguaggauacauuucagccaucaaagugaacggguucacuuguacggguguggugacagaagcagaaacuuacaccaacuuuguuggcuaugucacuaccacguuuaagagaaagcacuuccgcccgacgccggaugcaugcagagcugcauauaacuggaagauggcuggugacccuagauaugaagaaucucugcauaauccuuacccugauuaucauuggcuccggacugugaagaccaccaaagaaucucuuguuaucauaucuccaaguguggcagaucuggacccauaugacaaaucccuucacucgagaguuuuuccuagcggaaaaugcucaggcauaacagugucuucuaccuacugcucuacuaaccacgacuauaccaucuggaugccugagaauccuagacuagggaccucuugugacauuuucaccaauagcagagggaagagagcauccaaagggagcaagaccuguggauuuguagaugagagaggccuauacaagucucugaaaggagcaugcaaauugaaacuaugugggguucuaggacucagacuuauggauggaacaugggccgcgauccagacaucagaugagaccaaauggugcccuccugaucaguuagugaaccuacaugacuuucgcucggaugaaauugagcaucuuguuguagaggagcuggucaagaaaagggaagagugucuagaugcacuggaguccaucaugaccaccaagucugugaguuucagacgucucagucacuugaggaaacuugugccuggguucggaaaagcauauaccauauucaauaagaccuugauggaggcugaugcucacuacaaaucaguccggacuuggaaugagaucauccccucuaaaggguguuugagagucggggggagaugucacccccaugugaacgggguguucuucaaugguaucauauuaggcccugacggccaugugcuaaucccggagaugcagucgucucuccuccagcagcauauggaguuguuggaauccucagucauccccuuaaugcaucccuuggcagauccaucaacaguuuuuaaagaugaugacgaggcggaagauuuuguugagguucaccuuccagaugugcacaagcaggucucagggguugaucucggucucccaagcugggggaaguauguguugaugagcgcaggaguccugaccgcacuaauguugaugauuuucuuaaugacguguugcagaagggccaauagagcagaaucagcacaacacagucuuggggagaggggaaggaaagugucgguaaccucccaaagcgggcggguuauauccucaugggagucauacaaaaguggaggugagaccaagcuguag

SEQ ID NO: 62728 - RNA, 1575 nt, Artificial Sequence
  derived and/or modified CDS sequence (wt) from glycoprotein__RABV__AB564009.1
augaauccucaggcucuuauguuuguaccucuucuggucuuuucauuguguuuugggaaauuccccaucuacacgauaccggacaaacuuggucccuggagccccauugauauacaucaucucagcuguccgaacaauuugguuguugaggacgaaggauguaccaaccugucagguuucucauacauggaacucaaaguaggauacauuucagccaucaaagugaacggguucacuuguacggguguggugacagaagcagaaacuuacaccaacuuuguuggcuaugucacuaccacguuuaagagaaagcacuuccgcccgacgccggaugcaugcagagccgcauauaacuggaagauggcuggugacccuagauaugaagaaucucugcauaauccuuacccugauuaucauuggcuccggacugugaagaccaccaaagaaucucuuguuaucauaucuccaagcguggcagaucuagacccauaugacaaaucccuucacucgagaguuuuuccuagcggaaaaugcucaggcauaacagugucuucuaccuacugcucuacuaaccacgacuauaccaucuggaugccugagaauccuagacuagggaccucuugugacauuuucaccaauagcagagggaagagagcauccaaagggagcaagaccuguggauuuguagaugagagaggccuauacaagucucugaaaggagcaugcaaauugaagcuaugugggguucuaggacucagacuuauggauggaacaugggccgcgauccagacaucagaugagaccaaauggugcccuccugaucaguuagugaaccuacaugacuuucgcucggaugaaauugagcaucuuguuguggaggagcuagucaagaaaagggaagagugucuagaugcacuggaguccaucaugaccaccaaguccgugaguuucagacgucucagucacuugaggaaacuugugccuggguucggaaaagcauauaccauauucaauaagaccuugauggaggcugaugcucacuacaaaucaguccggacuuggaaugagaucauccccucuaaaggguguuugagagucggggggagaugucacccccaugugaacgggguguucuucaaugguaucauauuaggcccugacggccaugugcuaaucccggagaugcagucgucucuccuccagcagcauguggaguuguuggaauccucagucauccccuuaaugcaucccuuggcagauccaucaacgguuuuuaaagaugaugacgaggcggaagauuuuguugagguucaccuuccagaugugcacaagcaggucucagggguugaucucggucucccaagcugggggaaguauguguugaugagcgcaggaguccugaccgcacuaauguugaugauuuucuuaaugacguguugcagaagggccaauagagcagaaucagcacaacacagucuuggagagaggggaaggaaagugucgauaaccucccaaagcgggcggguuauauccucaugggagucauacaaaaguggaggugagaccaagcuguag

SEQ ID NO: 62729 - RNA, 1575 nt, Artificial Sequence
  derived and/or modified CDS sequence (wt) from glycoprotein__RABV__AB564010.1
augaauccucaggcucuuauguuuguaccucuucuggucuuuucauuguguuuugggaaauuccccaucuacacgauaccggacaaacuuggucccuggagccccauugauauacaucaucucagcuguccgaacaauuugguuguugaggacgaaggauguaccaaccugucagguuucucauacauggaacucaaaguaggauacauuucagccaucaaagugaacggguucacuuguacggguguggugacagaagcagaaacuuacaccaacuuuguuggcuaugucacuaccacguuuaagagaaagcacuuccgcccgacgccggaugcaugcagagccgcauauaacuggaagauggcuggugacccuagauaugaagaaucucugcauaauccuuacccugauuaucauuggcuccggacugugaagaccaccaaagaaucucuuguuaucauaucuccaagcguggcagaucuagacccauaugacaaaucccuucacucgagaguuuuuccuagcggaaaaugcucaggcauaacagugucuucuaccuacugcucuacuaaccacgacuauaccaucuggaugccugagaauccuagacuagggaccucuugugacauuuucaccaauagcagagggaagagagcauccaaagggagcaagaccuguggauuuguagaugagagaggccuauacaagucucugaaaggagcaugcaaauugaagcuaugugggguucuaggacucagacuuauggauggaacaugggccgcgauccagacaucagaugagaccaaauggugcccuccugaucaguuagugaaccuacaugacuuucgcucggaugaaauugagcaucuuguuguggaggagcuagucaagaaaagggaagagugucuagaugcacuggaguccaucaugaccaccaaguccgugaguuucagacgucucagucacuugaggaaacucgugccuggguucggaaaagcauauaccauauucaauaagaccuugauggaggcugaugcucacuacaaaucaguccggacuuggaaugagaucauccccucuaaaggguguuugagagucggggggagaugucacccccaugugaacgggguguucuucaaugguaucauauuaggcccugacggccaugugcuaaucccggagaugcagucgucucuccuccagcagcauauggaguuguuagaauccucagucauccccuuaaugcaucccuuggcagauccaucaacgguuuuuaaagaugaugacgaggcggaagauuuuguugagguucaccuuccagaugugcacaagcaggucucagggguugaucucggucucccaagcugggggaaguauguguugaugagcgcaggaguccugaccgcacuaauguugaugauuuucuuaaugacguguugcagaagggccaauagagcagaaucagcacaacacagucuuggagagaggggaaggaaagugucgguaaccucccaaagcgggcggguuauauccucaugggagucauacaaaaguggaggugagaccaagcuguag

SEQ ID NO: 62730 - RNA, 1575 nt, Artificial Sequence
  derived and/or modified CDS sequence (wt) from glycoprotein__RABV__AB564011.1
augaauccucaggcucuuauguuuguaccucuucuggucuuuucauuguguuuugggaaauuccccaucuacacgauaccggacaaacuuggucccuggagccccauugauauacaucaucucagcuguccgaacaauuugguuguugaggacgaaggauguaccaaccugucagguuucucauacauggaacucaaaguaggauacauuucagccaucaaagugaacggguucacuuguacggguguggugacagaagcagaaacuuacaccaacuuuguuggcuaugucacuaccacguuuaagagaaagcacuuccgcccgacgccggaugcaugcagagccgcauauaacuggaagauggcuggugacccuagauaugaagaaucucugcauaauccuuacccugauuaucauuggcuccggacugugaagaccaccaaagaaucucuuguuaucauaucuccaagcguggcagaucuagacccauaugacaaaucccuucacucgagaguuuuuccuagcggaaaaugcucaggcauaacagugucuucuaccuacugcucuacuaaccacgacuauaccaucuggaugccugagaauccuagacuagggaccucuugugacauuuucaccaauagcagagggaagagagcauccaaagggagcaagaccuguggauuuguagaugagagaggccuauacaagucucugaaaggagcaugcaaauugaagcuaugugggguucuaggacucagacuuauggauggaacaugggccgcgauccagacaucagaugagaccaaauggugcccuccugaucaguuagugaaccuacaugacuuucgcucggaugaaauugagcaucuuguuguggaggagcuagucaagaaaagggaagagugucuagaugcacuggaguccaucaugaccaccaaguccgugaguuucagacgucucagucacuugaggaaacuugugccuggguucggaaaagcauauaccauauucaauaagaccuugauggaggcugaugcucacuacaaaucaguccggacuuggaaugagaucauccccucuaaaggguguuugagagucggggggagaugucacccccaugugaacgggguguucuucaaugguaucauauuaggcccugacggccauguacuaaucccggagaugcagucgucucuccuccagcagcauauggaguuguuggaauccucagucauccccuuaaugcaucccuuggcagauccaucaacgguuuuuaaagaugaugacgaggcggaagauuuuguugagguucaccuuccagaugugcacaagcaggucucagggguugaucucggucucccaagcugggggaaguauguguugaugagcgcaggaguccugaccgcacuaauguugaugauuuucuuaaugacguguugcagaagggccaauagagcagaaucagcacaacacagucuuggagagaggggaaggaaagugucgguaaccucccaaagcgggcggguuauauccucaugggagucauacaaaaguggaggugagaccaagcuguag

SEQ ID NO: 62731 - RNA, 1575 nt, Artificial Sequence
  derived and/or modified CDS sequence (wt) from glycoprotein__RABV__AB564012.1
augaauccucaggcucuuauguuuguaccucuucuggucuuuucauuguguuuugggaaauuccccaucuacacgauaccagacaaacuuggucccuggagccccauugauauacaucaucucagcuguccgaacaauuugguuguugaggacgaaggauguaccaaccugucagguuucucauacauggaacucaaaguaggauacauuucagccaucaaagugaacggguucacuuguacggguguggugacagaagcagaaacuuacaccaacuuuguuggcuaugucacuaccacguuuaagagaaagcacuuccgcccgacgccggaugcaugcagagccgcauauaacuggaagauggcuggugacccuagauaugaagaaucucugcauaauccuuacccugauuaucauuggcuccggacugugaagaccaccaaagaaucucuuguuaucauaucuccaagcguggcagaucuagacccauaugacaaaucccuucacucgagaguuuuuccuagcggaaaaugcucaggcauaacagugucuucuaccuacugcucuacuaaccacgacuauaccaucuggaugccugagaauccuagacuagggaccucuugugacauuuucaccaauagcagagggaagagagcauccaaagggagcaagaccuguggauuuguagaugagagaggccuauacaagucucugaaaggagcaugcaaauugaagcuaugugggguucugggacucagacuuauggauggaacaugggccgcgauccagacaucagaugagaccaaauggugcccuccugaucaguuagugaaccuacaugacuuucacucggaugaaauugagcaucuuguuguggaggagcuagucaagaaaagggaagagugucuagaugcacuggaguccaucaugaccaccaaguccgugaguuucagacgucucagucacuugaggaaacuugugccuggguucggaaaagcauauaccauauucaauaagaccuugauggaggcugaugcucacuacaaaucaguccggacuuggaaugagaucauccccucuaaaggguguuugagagucggggggagaugucacccccaugugaacgggguguucuucaaugguaucauauuaggcccugacggccaugugcuaaucccggagaugcagucgucucuccuccagcagcauauggaguuguuggaauccucagucauccccuuaaugcaucccuuggcagauccaucaacgguuuuuaaagaugaugacgaggcggaagauuuuguugagguucaccuuccagaugugcacaagcaggucucagggguugaucucggucucccaagcugggggaaguauguguugaugagcgcaggaguccugaccgcacuaauguugaugauuuucuuaaugacguguugcagaagggccaauagagcagaaucagcacaacacagucuuggagagaggggaaggaaagugucgguaaccucccaaagcgggcggguuauauccucaugggagucauacaaaaguggaggugagaccaagcuguag

SEQ ID NO: 62732 - RNA, 1575 nt, Artificial Sequence
  derived and/or modified CDS sequence (wt) from glycoprotein__RABV__AB564015.1
augaauccucaggcucuuauguuuguaccucuucuggucuuuucauuguguuucgggaaauuccccaucuacacaauaccggacaaacuuggucccuggagccccauugauauacaucaucucagcuguccgaacaauuugguuguggaggacgaaggauguaccaaccugucagguuucucauacauggaacucaaaguaggauacauuucagccaucaaagugaacggguucacuuguacggguguggugacagaagcagaaacuuacaccaacuuuguuggcuaugucacuaccacguuuaagagaaagcacuuccgcccgacgccggaugcaugcagagccgcauauaacuggaagauggcuggugacccuagauaugaagaaucucugcauaauccuuacccugauuaucauuggcuccggacugugaagaccaccaaagaaucucuuguuaucauaucuccaaguguggcagaucuggacccauaugacaaaucccuucacucgagaguuuuuccuagcggaaaaugcucaggcauaacagugucuucuaccuacugcucuacuaaccacgacuauaccaucuggaugccugagaauccuagacuagggaccucuugugacauuuucaccaauagcagagggaagagagcauccaaagggagcaagaccuguggauuuguagaugagagaggccuauacaagucucugaaaggagcaugcaaauugaaacuaugugggguucugggacucagacuuauggauggaacaugggccgcgauccagacaucagaugagaccaaauggugcccuccugaucaguuagugaaccuacaugacuuucgcucggaugaaauugagcaucuuguuguagaggagcuggucaagaaaagggaagagugucuagaugcacuggaguccaucaugaccaccaaguccgugaguuucagacgucucagucacuugaggaaacuugugccuggguucggaaaagcauauaccauauucaauaagacuuugauggaggcugaugcucacuacaaaucaguccggacuuggaaugagaucauccccucuaaaggguguuugagagucggggggagaugucacccccaugugaacgggguguucuucaaugguaucauauuaggcccugacggccaugugcuaaucccggagaggcagucgucucuccuccagcagcauauggaguuguuggaauccucagucauccccuuaaugcaucccuuggcagauccaucaacaguuuuuaaagaugaugacgaggcggaagauuuuguugagguucaccuuccagaugugcacaagcaggucucagggguugaucuuggucucccaagcugggggaaguauguguugaugagcgcaggaguccugaccgcacuaauguugaugauuuucuuaaugacguguugcagaagggccaauagagcagaaucagcacaacacagucuuggggagaggggaaggaaagugucgguaaccucccaaagcgggcggguuauauccucaugggagucauacaaaaguggaggugagaccaagcuguag

SEQ ID NO: 62733 - RNA, 1575 nt, Artificial Sequence
  derived and/or modified CDS sequence (wt) from glycoprotein__RABV__AB564016.1
augaauccucaggcucuuauguuuguaccucuucugggcuuuucauuguguuucgggaaauuccccaucuacacgauaccggacaaacuuggucccuggagccccauugauauacaucaucucagcuguccgaacaauuugguuguggaggacgaaggauguaccaaccugucagguuucucauacauggaacucaaaguaggauacauuucagccaucaaagugaacggguucacuuguacggguguggugacagaagcagaaacuuacaccaacuuuguuggcuaugucacuaccacguuuaagagaaagcacuuccgcccgacgccggaugcaugcagagcugcauauaacuggaagauggcuggugacccuagauaugaagaaucucugcauaauccuuacccugauuaucauuggcuccggacugugaagaccaccaaagaaucucuuguuaucauaucuccaaguguggcagaucuggacccauaugacaaaucccuucacucgagaguuuuuccuagcggaaaaugcucaggcauaacagugucuucuaccuacugcucuacuaaccacgacuauaccaucuggaugccugagaauccuagacuagggaccucuugugacauuuucaccaauagcagagggaagagagcauccaaagggagcaagaccuguggauuuguagaugagagaggccuauacaagucucugaaaggagcaugcaaauugaaacuaugugggguucuaggacucagacuuauggauggaacaugggccgcgauccagacaucagaugagaccaaauggugcccuccugaucaguuagugaaccuacaugacuuucgcucggaugaaauugagcaucuuguuguagaggagcuggucaagaaaagggaagagugucuagaugcacuggaguccaucaugaccaccaagucugugaguuucagacgucucagucacuugaggaaacuugugccuggguucggaaaagcauauaccauauucaauaagaccuugauggaggcugaugcucacuacaaaucaguccggacuuggaaugagaucauccccucuaaaggguguuugagagucggggggagaugucacccccaugugaacgggguguucuucaaugguaucauauuaggcccugacggccaugugcuaaucccggagaugcagucgucucuccuccagcagcauauggaguuguuggaauccucagucauccccuuaaugcaucccuuggcagauccaucaacaguuuuuaaagaugaugacgaggcggaagauuuuguugagguucaccuuccagaugugcacaagcaggucucagggguugaucucggucucccgagcugggggaaguauguguugaugagcgcaggaguccugaccgcacuaauguugaugauuuucuuaaugacguguugcagaagggccaauagagcagaaucagcacaacacagucuuggggagaggggaaggaaagugucgguaaccucccaaagcgggcggguuauauccucaugggagucauacaaaaguggaggugagaccaagcuguag

SEQ ID NO: 62734 - RNA, 1575 nt, Artificial Sequence
  derived and/or modified CDS sequence (wt) from glycoprotein__RABV__AB564017.1
augaauccucaggcucuuauguuuguaccucuucuggucuuuucauuguguuucgggaaauuccccaucuacacgauaccggacaaacuuggucccuggagccccauugauauacaucaucucagcuguccgaacaauuugguuguggaggacgaaggauguaccaaccugucagguuucucauacauggaacucaaaguaggauacauuucagccaucaaagugaacggguucacuuguacggguguggugacagaagcagaaacuuacaccaacuuuguuggcuaugucacuaccacguuuaagagaaagcacuuccgcccgacgccggaugcaugcagagccgcauauaacuggaagauggcuggugacccuagauaugaagaaucucugcauaauccuuacccugauuaucauuggcuccggacugugaagaccaccaaagaaucucuuguuaucauaucuccaagcguggcagaucuagacccauaugacaaaucccuucacucgagaguuuuuccuagcggaaaaugcucaggcauaacagugucuucuaccuacugcucuacuaaccacgacuauaccaucuggaugccugagaauccuagacuagggaccucuugugacauuuucaccaauagcagagggaagagagcauccgaagggagcaagaccuguggauucguagaugagagaggccuauacaagucucugaaaggagcaugcaaauugaagcuaugugggguucuaggacucagacuuauggauggaacaugggccgcgauccagacaucagaugagaccaaauggugcccuccugaucaguuagugaaccuacaugacuuucgcucggaugaaauugagcaucuuguuguggaggagcuagucaagaaaagggaagagugucuagaugcacuggaguccaucaugaccaccaaguccgugaguuucagacgucucagucacuugaggaaacuugugccuggguucggaaaagcauauaccauauucaauaagaccuugauggaggcugaugcucacuacaaaucaguccggacuuggaaugagaucauccccucuaaaggguguuugagagucggggggagaugucacccccaugugaacgggguguucuucaaugguaucauauuaggcccugacggccaugugcuaaucccggagaugcagucgucucuccuccagcagcauauggaguuguuggaauccucagucauccccuuaaugcaucccuuggcagauccaucaacaguuuuuaaagaugaugacgaggcggaagauuuuguugagguucaccuuccagaugugcacaagcaggucucagggguugaucucggucucccaagcugggggaaguauguguugaugagcgcaggaguccugaccgcacuaauguugaugauuuucuuaaugacguguugcagaagggccaauagagcagaaucagcacaacacagucuuggggagaggggaaggaaagugucgguaaccucccaaagcgggcggguuauauccucaugggagucauacaaaaguggaggugagaccaagcuguag

SEQ ID NO: 62735 - RNA, 1575 nt, Artificial Sequence
  derived and/or modified CDS sequence (wt) from glycoprotein__RABV__AB569299.1
auggucccgcaggcccuuuuguuugugccucuucugguguucucauuguguuucgggaaguuccccauuuacacgauaccagacaagcuugguccauggagucccauugauauacaucaucucagcuguccaaacaaucugguuguagaggaugaaggaugcaccaaccuaucaggauucuccuacauggaacucaaaguaggauacaucucagccauaaaagugaacggcuucacuuguacagguguggucacagaagcagagacuuacacuaacuucguugguuaugucacuaccacguucagaagaaagcacuuccgcccaacacccgaugcguguagggccgcauacaacuggaaaauggcuggcgaccccagauaugaagagucccugcacaauccauaccccgacuaccauuggcuucggacuguuaaaaccaccaaggagucucuuguuauaauaucuccgagcguggcagauuuggacccauaugacaaaucccuucacucgagaguuuuucccggcggaaagugcucaggaauaacaguaucuucuacuuacugcucaacgaaccacgauuacaccaucuggaugccugagaauccaagacucgggacaucuugugacaucuucgucaacagcagagggaagagggcguccaaggggggcaagaccuguggguuuguagaugagagagguuuguauaagucacuaaaaggggcuugcaaacucaaauuguguggugugccuggacuuagacuuauggacggaacgugggucgcgauucagacgucagaugagaccaaauggugccccccugaucaguuaguaaaucuacaugacuuucgcucagaugaaaucgaacaucuugucguggaagagcuggucaagaaaagagaagagugccuagacgcgcuggaguccaucaugaccaccaagucuguaaguuucagacgucucagucaccugaggaaacucgucccuggguucgggaaagcauauacuauauucaacaaaacuuugauggaggcugaugcucacuauaagucggucaggacuuggaacgagaucaucccuucaaaaggguguuuaagaguaggaggaagaugucauccucaugugaaugggguauuuuuuaaugguauaauauugggcccugauggccauguucugaucccagagaugcaaucgucccuccuccaacaacacauggaauuguuggaauccucagucauccccuuaaugcauccauuggcagacccgucaacagucuucaaggauggugaugaggcggaagacuuuguugagguucaccuuccggaugugcacaaacugaucucaggggucgaccuuggucuucccagcuggggaaaguauguguugaugagugcaggcauucugauaacacugauguugaugaucuucuugaugacuuguugcaggaggguuaaucaagcaggaucaaaacaacaugggcucgaaggggcagggaggaaaguaucugucaccucccagaacgggagggucauauccuccugggagucauauaaaaacggaggugaaaccaggcuguga

SEQ ID NO: 62736 - RNA, 1575 nt, Artificial Sequence
  derived and/or modified CDS sequence (wt) from glycoprotein__RABV__AB608731.1
augaucccucaggcucuucuguuugugccucuccugauucccucgcuguguaucggggaauuccccaucuacacgauaccagacaaacucggcccuuggaccccuauugacauacaucaucucagcugucccaacaaucugguugcagagaaugacgggugcaccagucugucaggguucuccuauauggaacuaaaggugggauacaucucugccauaaaggugaacggguucacuuguaccgguguugugacagaagccgagaccuacacaaacuuuguagguuaugucacuaccacauucaagagaaagcacuuccgcccgaugccagaugccugcagagcugcacacgacuggaagauggccggugauccuagauaugaagauucccuucaaaauccuuauccugauuaccauugguuacggaccguaaagaccaccaaggagucgcucguuauuauauccccgaguguugcugauuuggaccccuacgacaagucccuucauucaagaguuuuccccagugggaaguguuuggggauaacagucucuuccaccuacugcucaaccaaccaugauuacaccaucuggaugcccguagaaccgagacuuggaacaucuugugauauuuuuaccaauagcagagggaagaaagcaucuaagggaggcaggguuugcggauuuguggaugagaggggcuuauacaaaucucucaaaggagcaugcaaacucaagcugugcggaguccccgggauuaggcugauggauggaaccugggucucaauccagacaucagaagauauuaaguggugcccuccugaucgauuagugaaucuacacgacuuucacucggaugaacuagaacaucuuguuguagaggaauugaucaagaggagggaaaauugucuagaugcacuggaguccaucgugaccaccaaaucagugagcuucagacgucucagccacuugaggaagcuuguuccuggguuugggaaggcauacaccauauucaacaagaccuuaauggaagcugaugcucauuacaagucagucaagacuuggaacgaggucaucccuucgaaagguugccuggaagucggagggaaaugucaccccccugugaacggaguauucuucaaugguauaauuuuggguccagauggaaauguucugaucccugagaugcaaucuucccugcuucaacaacauauggagcuguuagagucuucuguuaucccucugaugcaucccuuggcagacccaucaacagucuucaaggaaggugaugaggcggaagacuuuguugagguucaucuuccagauguccacaaacagguuucugauguugaccuuggucuuccgaguuggggaaaguaucuguugaugagugcaggugcucuggcaauacugauucuggcgaucgucuuaauaauauguuguaggagggucaauaagacaggaucaacacagagaggucauagggaaucaagagggaaaaugucaguagcaccucaaaaugggaagaucauauccucaugggagcuguacaaaagcgaaagugagacugggcuguga

SEQ ID NO: 62737 - RNA, 1575 nt, Artificial Sequence
  derived and/or modified CDS sequence (wt) from glycoprotein__RABV__AB635373.1
auggucccgcaggcccuuuuguuugugccucuucugguauucucauuguguuucgggaaguuccccauuuacacuauaccagacaagcuuggucccuggagucccauugauauacaucaucucagcuguccaaacaaucugguuguagaggaugaaggaugcacuaaccuaucaggauucuccuacauggaacucaaaguaggauacaucucagccauaaaagugaauggcuucacuuguacaggugugguuacagaggcagagacuuacacuaacuucguugguuaugucacuaccacguucagaagaaagcacuuccgcccaacacccgaugcguguagggccgcauacaacuggaaaauggcuggcgaccccagauaugaagagucccugcacaauccauaccccgacuaccauuggcuucggacuguuaaaaccaccaaggagucucuuguuauaauauccccgaguguggcagauuuggacccauaugacaaaucccuucacucgagaguuuuucccggcggaaagugcucaggaauaacagugucuucuacuuacugcucaacuaaccacgauuacaccauuuggaugccugagaauccaagacucgggacaucuugugacaucuucaucaacagcagagggaagagggcguccaaggggggcaagaccuguggguuuguagaugagagagguuuguauaagucgcuaaaaggggcuugcaaacucaaauuauguggggugccuggacuuagacuuauggacggaacaugggucgcaauucagacgucagaugagaccaaauggugccccccugaucaguuaguaaaucuacaugacuuucacucagaugaaaucgaacaucucgucguggaagagcuggucaagaaaagagaagagugccuagacgcgcuggagucaaucaugaccacuaagucuguaaguuucagacgucucagucaccugaggaaacucgucccuggguuugggaaagcauauacuauauucaacaaaaccuugauggaggcugaugcucacuauaagucaguccggacuuggaacgagaucauccccucaaaggggugcuugagaguaggaggaagaugucauccucaugugaaugggguauuuuucaaugguauaauauugggcccugauggccauguucugaucccagagaugcaaucgucccuccuccaacaacacauggaauuguuggaauccucagucauccccuuaaugcauccauuggcagacccuucaacagucuucaaggauggugaugaggcggaagacuuuguugagguucaccuuccggaugugcacaaacugaucucaggggucgaccuuggucuucccagcugggggaaguauguguugaugagugcaggcauucugacaacacuaauguugaugaucuucuugaugauuuguugcaggaggguuaaucaaacaggaucaaaacaacaugggcucggaggggcagggaggaaaguaucuguuacuucccagaacgggagggucauauccuccugggagucauauaaaagcggaggugaaaccaggcuguga

SEQ ID NO: 62738 - RNA, 1575 nt, Artificial Sequence
  derived and/or modified CDS sequence (wt) from glycoprotein__RABV__AB645847.1
augguuccucaggcucuuuugguugugccccuucuggguuuuucauuguguuucgggaaauucccaauuuacacgauaccagacaaacuuggucccuggagcccgauugacauacaucaucucagcuguccaaacaaucugguuguggaggacgaaggaugcaccaaccugucaggguuuuccuacauggaacuuaaaguuggguacaucucagccauaaaagugaacggguucaccugcacaggaguugugacagaggccgagaccuacacuaacuuugucgguuaugucacaaccacguucaaaagaaagcacuuccgcccaacaccagaugaguguagagccgcguacaacuggaagauggccggugaccccagauaugaggagucucuacacaauccauacccugacuaccauuggcuucgaacuguaaaaaccaccaaagagucucucguuaucauaucuccaaguguggcagauuuggacccauaugacaaaucccuucacucgagggucuucccuagcggaaaaugcucaggaauaacggugucuucuaccuacuguucaacuaaccaugauuacaccauuuggaugcccgagaauccgagguuagggacaucuugugacauuuuuaccaauagcagagggaagagagcauccaaagggaguaaaacuugcggcuuuguagaugaaagaggccuguauaagucucuaaaaggagcaugcaaacucaaguuauguggaguucuaggacuuaaacuuauggaugggacaugggucgcgaugcaaacaucagacgagaccaaauggugcccucccgaucaguuggugaaucugcaugacuuucgcucggacgaaauugagcaccuuguuguagaagauuuggucaagaaaagagaggagugucuggaugcacuagaguccaucaugacaaccaagucagugaguuucaggcgucucagucauuuaagaaaacuugucccuggguucggaaaagcauauaccauauucaacaagaccuugauggaggcagaugcucacuacaagucaguucgaaccuggaaugaggucaucccuucaaaaggguguuuaaaagugggggggaggugucauccucaugugaacgggguguuuuucaacggugugauauuagggccugacggccauguucugauccccgagaugcagucaucccuacuccggcaacauauggaguuguuggaauccucgguuaucccuuugaugcacccucuggcagacccgucuacaguuuucaaggacggugaugaggccgaggauuucguugaaguucaccuacccgaugugcacaaacaggucucggggguugaccugggucucccaaacugggggaaguauguaucacugagugcaggggccuugauugccuugauguugaugauuuuccugaugacauguuguagaaaaguuaaucgaccagaaccuacgcaacgcagucucgagggaaaagggaggaaaguaucggucacuucccaaagcgggaaggucauaucuucaugggagucauauaaaagcgggggugagaccagucuguga

SEQ ID NO: 62739 - RNA, 1575 nt, Artificial Sequence
  derived and/or modified CDS sequence (wt) from glycoprotein__RABV__AB683584.1
augauuccucaggcucuuuuguuuguaccccuucuggucuuuucauuguguuucggaaaauuucccaucuacacgauaccggacaaacuuggucccuggagccccauugauauacaucaucucagcuguccgaacaauuugguuguggaggaugaaggauguaccaaccugucagguuucucguacauggaacucaagguaggauacauuucagccaucaaagugaacggguucacuuguacggguguagugacagaagcagagaccuacaccaacuuugucggcuaugucacuaccacguuuaagagaaagcacuuccgcccaacgccggaugcaugcagagccgcauauaacuggaagauggcuggugaccccagauaugaagaaucucugcauaacccuuacccugauuaucauuggcuccgaacugugaagaccaccaaagaaucucuugucauaauaucuccaaguguggcagauuuggacccauacgauaaaucccuucacucgagaguuuuuccuagcggaaaaugcucaggcauaacggugucuucuaccuacugcucuacuaaccacgacuauaccaucuggaugccugagaauccuagacuagggaccucuugugacauuuucaccaauagcagagggaagagagcauccaaagggagcaagaccuguggauuuguagaugagagaggccuguacaagucucugaaaggagcaugcaaacugaaacugugugggguucugggacucagacuuauggauggaacaugggccgcgauccagacaucagaugagaccaaauggugcccuccugaucaguuagugaaccuacaugacuuucgcucggaugaaauugaacaucuugucguggaggagcuggucaagaaaagggaagagugucuagaugcacuggaguccaucaugaccaccaagucugugaguuucagacgucucagucacuugaggaagcuugugccuggguuuggaaaagcauauaccauauuuaauaagaccuugauggaggcugaugcucacuacaaaucaguccggacuuggaaugagaucauccccucuaaaggguguuuaagaguaggggggagaugucacccucaugugaacgggguguucuucaacgguaucaucuuaggcccugacggccaugugcuaaucccggagaugcagucgucucuccuccagcagcauauggaguuguuggaauccucagucauccccuuaaugcaccccuuggcagauccaucaacaguuuuuaaagaugaugacgaggcggaagaauuuguugagguucaccuuccagaugugcacaagcaggucucaggggucgaucucggucucccaagcugggggaaguauguguugaugagcgcaggcgucuugaccgcgcuaauguugaugauuuucuuaaugacguguuguagaagggccaauagaguagaaucagcacaacacagucuuggagagagggggaggaaagugucgguaaccucccaaagcgggcggguuauauccucaugggagucguacaaaaguggaggugagaccaagcuguaa

SEQ ID NO: 62740 - RNA, 1575 nt, Artificial Sequence
  derived and/or modified CDS sequence (wt) from glycoprotein__RABV__AB683585.1
augauuccucaggcucuuuuguuuguaccccuucuggucuuuucauuguguuucggaaaauuucccaucuacacgauaccggacaaacuuggucccuggagccccauugauauacaucaucucagcuguccgaacaauuugguuguggaggaugaaggauguaccaaccugucagguuucucguacauggaacucaagguaggauacauuucagccaucaaagugaacggguucacuuguacggguguggugacagaagcagagaccuacaccaacuuuguuggcuaugucacuaccacguuuaagagaaagcacuuccgcccaacgccggaugcaugcagagccgcauauaacuggaagauggcuggugaccccagauaugaagaaucucugcauaauccuuacccugauuaucauuggcuccgaacugugaagaccaccaaagaaucucuugucaucauaucuccaaguguggcagauuuggacccauacgauaaaucccuucacucgagaguuuuuccuagcggaaaaugcucaggcauaacgguguccucuaccuacugcucuacuaaccacgacuauaccaucuggaugccugagaauccuagacuagggaccucuugugacauuuucaccaauagcagagggaagagagcauccaaagggagcaagaccuguggauuuguagaugagagaggccuguacaagucucugaaaggagcaugcaaacugaaacugugugggguucugggacucagacuuauggauggaacaugggccgcgauccagacaucagaugagaccaaauggugcccuccugaucaguuagugaaccuacaugacuuucgcucggaugaaauugaacaucuugucguggaggagcuggucaagaaaagggaagagugucuagaugcacuggaguccaucaugaccaccaagucugugaguuuuagacgucucagucacuugaggaaacuugugccuggguuuggaaaagcauauaccauauuuaauaagaccuugauggaggcugaugcucacuacaaaucaguccggacuuggaaugagaucauccccucuaaaggguguuuaagaguaggggggagaugucacccucaugugaacgggguguucuucaaugguaucaucuuaggcccugacggccaugugcuaaucccggagaugcagucgucucuccuccagcagcauauggaguuguuggaauccucagucauccccuuaaugcaucccuuggcagauccaucaacaguuuuuaaagaugaugacgaggcggaagauuuuguugagguucaccuuccagaugugcacaagcaggucucaggggucgaucucggucucccaagcugggggaaguauguguugaugagcgcaggugucuugaccgcgcuaauguugaugauuuucuuaacgacguguuguagaagggccaauagagcagaaucagcacaacacagucuuggagagaaggggaggaaagugucgguaaccucccaaagcgggcggguuauauccucaugggagucauacaaaaguggaggugagaccaagcuguaa

SEQ ID NO: 62741 - RNA, 1575 nt, Artificial Sequence
  derived and/or modified CDS sequence (wt) from glycoprotein__RABV__AB683586.1
augauuccucaggcucuuuuguuuguaccccuucuggucuuuucauuguguuucggaaaauuuccuaucuacacaauaccggacaaacuuggucccuggagccccauugacauacaucaucucagcuguccgaacaauuugguuguggaagaugaaggauguaccaaccugucagguuucucguacauggaacucaagguaggauacauuucugccaucaaagugaacggguucacuuguacggguguagugacggaagcagagaccuacaccaacuuuguuggcuaugucacuaccacguuuaagagaaagcacuuccgcccaacgccggaugcaugcagagccgcauauaacuggaagauggcuggugaccccagauaugaagaaucucugcauaauccuuacccugauuaucauuggcuccgaacugugaagaccaccaaagagucucuuguuaucauaucuccaaguguggcagauuuggacccauacgauaaaucccuucacucgagaguuuuuccuagcggaaaaugcucaggcauaacggugucuucuaccuacugcuccacuaaccacgacuauaccaucuggaugccugagaauccuagacuagggaccucuugugacauuuucaccaauagcagagggaagagagcauccaaagggagcaaaaccuguggauuuguagaugagagaggccuguacaagucucugaaaggagcaugcaaacugaaacuaugugggguucugggacucagacuuauggauggaacaugggccgcgauccagacaucagaugagaccaaauggugcccuccugaucaguuagugaaccuacaugacuuucgcucggaugaaauugaacaucuuguuguggaggagcuggucaagaaaagggaagagugucuagaugcacuggaguccaucaugaccaccaagucugugaguuucagacgucucagucacuugaggaaacuugugcccggguuuggaaaagcauauaccauauugaauaagaccuugauggaggcugaugcucacuacaaaucaguccggacuuggaaugagaucauccccucuaaaggguguuuaagagucggggggagaugucacccucaugugaacgggguguucuucaaugguaucaucuuaggcccugacggccaugugcuaaucccggagaugcagucgucucuccuccagcagcauauggaguuauuggaauccucagucauccccuuaaugcaucccuuggcagauccaucaacaguuuuuaaagaugaugacgaggcggaagauuuuguugagguucaccuuccagaugugcacaagcaggucucaggggucgaucucggucucccaagcugggggaaguauguguugaugagcgcaggcgucuugaccgcauuaauguugaugauuuucuuaaugacguguuguagaagggccaauagagcagaaucagcacaacacagucuuggagagggggagaggaaagugucgguaaccucccaaagugggcggguuauauccucaugggagucauacaaaaguggaggugagaccaagcuguaa

SEQ ID NO: 62742 - RNA, 1575 nt, Artificial Sequence
  derived and/or modified CDS sequence (wt) from glycoprotein__RABV__AB683587.1
augauuccucaggcucuuuuguuuguaccccuucuggucuuuucauuguguuuuggaaaauuucccaucuacacgauaccagacaaacuuggucccuggagccccauugauauacaucaucucagcuguccgaacaauuugguuguggaggaugaaggauguaccaaccugucagguuucucguacauggaacucaagguaggauacauuucagccaucaaagugaacggguucacuuguacggguguagugacagaagcagagaccuacaccaacuuuguuggcuaugucacuaccacauuuaagagaaagcacuuccgcccaacgccggaugcaugcagagccgcauauaacuggaagauggcuggugaccccagauaugaagaaucucugcacaauccuuacccugauuaucauuggcuccgaacugugaagaccaccaaagaaucucuuguuaucauaucuccaaguguggcagauuuggacccauacgauaaaucccuucacucgaggguuuuuccuagcggaaaaugcucaggcauaacggugucuucuaccuacugcucuacuaaccacgacuauaccaucuggaugccugagaauccuagacuagggaccucuugugacaucuucaccaauagcagagggaagagagcauccaaagggagcaagaccuguggauuuguagaugagagaggccuguacaagucucugaaaggagcaugcaaacugaaacuaugugggguucugggacucagacuuauggauggaacaugggccgcgauccagacaucagaugagaccaaauggugcccuucugaucaguuagugaaccuacaugacuuucgcucggaugaaauugaacaucuuguuguggaggagcuggucaagaaaagggaagagugucuagaugcacuggaguccaucaugaccaccaagucugugaguuucagacgucucagucacuugaggaaacuugugccuggguuuggaaaagcauauaccauauucaauaagaccuugauggaggcugaugcucacuauaaaucagucaggacuuggaaugagaucauccccucuaaaggguguuuaagagucggggggagaugucacccucaugugaacgggguguucuucaaugguaucauccuaggcccugacggccaugugcuaaucccggagaugcagucgucucuccuucagcaacacauggagcuguuggaauccucaguuauccccuuaaugcaucccuuggcagauccaucaacaguuuuuaaagaugaugacgaggcggaagauuuuguugagguucaccuuccagaugugcacaagcaggucucaggggucgaucucggucucccaaguugggggaaguauguguugaugagcgcaggcgucuugaccgcacuaauguugaugauuuucuuaaugaccuguuguagaagggccaauagagcagaaucagcacaacacagucuuggagagagggggaggaaagugucgguaaccucccaaagcgggcggguuauauccucaugggagucauacaaaaguggaggugagaccaagcuguaa

SEQ ID NO: 62743 - RNA, 1575 nt, Artificial Sequence
  derived and/or modified CDS sequence (wt) from glycoprotein__RABV__AB683589.1
augaauccucaggcucuuauguuuguaccucuucuggucuuuucauuguguuucgggaaauuccccaucuacacgauaccggacaaacuuggucccuggagccccauugauauacaucaucucagcuguccgaacaauuugguuguggaggacgaaggauguaccaaccugucagguuucucauacauggaacucaaaguaggauacauuucagccaucaaagugaacggguucacuuguacggguguggugacagaagcagaaacuuacaccaacuuuguuggcuaugucacuaccacguuuaagagaaagcacuuccgcccgaugccggaugcaugcagagccgcauauaacuggaagauggcuggugacccuagauaugaagaaucucugcauaauccuuacccugauuaucauuggcuccggacugugaagaccaccaaagaaucucuuguuaucauaucuccaaguguggcagaucuggacccauaugacaaaucccuucacucgagaguuuuuccuagcggaaaaugcucaggcauaacagugucuucuaccuacugcucuacuaaccacgacuauaccaucuggaugccugagaauccuagacuagggaccucuugugacauuuucaccaauagcagagggaagagagcauccaaagggagcaagaccuguggauuuguagaugagagaggccuauacaagucucugaaaggagcaugcaaauugaaacuaugugggguucuaggacucagacuuauggauggaacaugggccgcgauccagacaucagaugagaccaaauggugcccuccugaucaguuagugaaccuacaugacuuucgcucggaugaaauugagcaucuuguuguagaggagcuggucaagaaaagggaagagugucuagaugcacuggaguccaucaugaccaccaagucugugaguuucagacgucucagucacuugaggaaacuugugccuggguucggaaaagcauauaccauauucaauaagaccuugauggaggcugaugcucacuacaaaucaguccggacuuggaaugagaucauccccucuaaaggguguuugagagucggggggagaugucacccccaugugaacgggguguucuucaaugguaucauauuaggcccugacggccaugugcuaaucccggagaugcagucgucucuccuccagcagcauauggaguuguuggaauccucagucauccccuuaaugcaucccuuggcagauccaucaacaguuuuuaaagaugaugacgaggcggaagauuuuguugagguucaccuuccagaugugcacaagcaggucucagggguugaucucggucucccaagcugggggaaguauguguugaugagcgcaggaguccugaccgcacuaauguugaugauuuucuuaaugacguguugcagaagggccaauagagcagaaucagcacaacacagucuuggggagaggggaaggaaagugucgguaaccucccaaagcgggcggguuauauccucaugggagucauacaaaaguggaggugagaccaagcuguag

SEQ ID NO: 62744 - RNA, 1575 nt, Artificial Sequence
  derived and/or modified CDS sequence (wt) from glycoprotein__RABV__AB683591.1
augaauccucaggcucuuauguuuguaccucuucuggucuuuucauuguguuucgggaaauuccccaucuacacgauaccggacaaacuuggucccuggagccccauugauauacaucaucucagcuguccgaacaauuugguuguggaggacgaaggauguaccaaccugucagguuucucauacauggaacucaaaguaggauacauuucagccaucaaagugaacggguucacuuguacggguguggugacagaagcagaaacuuacaccaacuuuguuggcuaugucacuaccacguuuaagagaaagcacuuccgcccgacgccggaugcaugcagagccgcauauaacuggaagauggcuggugacccuagauaugaagaaucucugcauaauccuuacccugauuaucauuggcuccggacugugaagaccaccaaagaaucucuuguuaucauaucuccaaguguggcagaucuggacccauacgacaaaucccuucacucgagaguuuuuccuagcggaaaaugcucaggcauaacagugucuucuaccuacugcucuacuaaccaugacuauaccaucuggaugccugagaauccuagacuagggaccucuugugacauuuucaccaauagcagagggaagagagcauccaaagggagcaagaccuguggauuuguagaugagagaggccuauacaagucucugaaaggagcaugcaaauugaaacuaugugggguucuaggacucagacuuauggauggaacaugggccgcgauccagacaucagaugagaccaaauggugcccuccugaucaguuagugaaccuacaugacuuucgcucggaugaaauugagcaucuuguuguggaggagcuggucaagaaaagggaagagugucuagaugcacuggaguccaucaugaccaccaaguccgugaguuucagacgucucagucacuugaggaaacuugugccuggguucgggaaagcauauaccauauucaauaagaccuugauggaggcugaugcucacuacaaaucaguccggacuuggaaugagaucauccccucuaaaggguguuugagagucggggggagaugucacccccaugugaacgggguguucuucaaugguaucauauuaggcccugacggccaugugcuaaucccggagaugcagucgucucuccuccagcagcauauggaguuguuggaauccucagucauccccuuaaugcaucccuuggcagauccaucaacaguuuuuaaagaugaugacgaggcggaagauuuuguugagguucaccuuccagaugugcacaagcaggucucagggguugaucucggucucccaagcugggggaaguauguguugaugagcgcaggaguccugaccgcacuaauguugaugauuuucuugaugacguguugcagaagggccaauagagcagaaucagcacaacacagucuuggagagaggggaaggaaagugucgguaaccucucaaagcgggcggguuauauccucaugggagucauacaaaaguggaggugagaccaagcuguag

SEQ ID NO: 62745 - RNA, 1575 nt, Artificial Sequence
  derived and/or modified CDS sequence (wt) from glycoprotein__RABV__AB699208.1
augguuccucagguucuuuuguuuguaccccuucugguuuucucaauguguuucgggaaauucccuaucuauacgauaccagacaaacuuggucccuggagcccgauugacauacaucaucucagcuguccaaacaaccugguuguggaagaugaaggaugcacuaaccugucggguuucuccuacauggaacuuaaggugggauacaucucggccauaaaaguaaacggguucacgugcacagguguggugacagaggcagagacuuacacuaacuuugucgguuauguuaccaccacguucaaaagaaagcauuuccgcccaacacccgaugcaugucgagcugcuuacaauuggaagauggccggugaccccagauaugaagaaucgcugcauaauccguacccugacuaccacuggcuucgaaccguuaaaaccacaaaggagucccucgucaucauauccccaaguguagcggaccuggacccauacaacaaaucccuucauucgagggucuuuccuagcgggaaaugcucggggauaacaauaucaucuacuuacugcgcuacuaaccaugauuacacaaucuggaugcccgagaauccgagacuggggacaucuugugacaucuuuaccaacaguagagggaagagagcauccaaagggggcaaaacuugcggauuuguugaugaaagaggcuuguauaagucucugaaaggggcaugcaagcucaaguuauguggaguucuuggccuuagacuuauggauggaacguggguugcgaugcaaacaucggaugaaaccaagugguguccuccugaucaguugguaaaucuacacgacuuucgcucagacgagaucgaacaucuuguuguggaggaguuggucaagaagagagaggagugucuggaugcauuagagucuaucaugacuaccaagucggugaguuucagacgucucagccacuugagaaaacuugucccuggguucgggaaggcauacaccauauucaacaaaaccuugauggaagcagaugcucauuacaagucaauccgaaccuggaaugagaucauccccuccaaaggguguuugagaguuggagggaggugucauccucacgugaacgggguguuuuuuaacgguauaauacuggguccugacggccauguucuaaucccagagaugcaaucaucccuccuucagcagcauauggaguuguuggaauccucaguuaucccccugaugcacccuuuagcagacccgucuacaguuuucaaggacggugaugaagcagaggauuuuguugagguucaccuucccgacgugcacaaacaaauuucagguguugaccugggucuccccagcuggggaaaguauguuuuggugagugcaggggucuugguuguccugauguugacaauuuucauaaugacauguugcgggagaguccgucgacccaaaucuacacaacacagucucggaggggcagggaggaagguaucggucacuucccaaagcggaaaggucauaucuucaugggagucauauaagaacgggggugagaccagacuguga

SEQ ID NO: 62746 - RNA, 1575 nt, Artificial Sequence
  derived and/or modified CDS sequence (wt) from glycoprotein__RABV__AB699209.1
augguuccucagguucuuucguuuguaccccuucugguuuucucaacguguuucgggaaauucccuaucuauacgauaccagacaaacuuggucccuggagcccaauugacauacaucaucucagcuguccaaacaaccugguuguggaagaugaaggaugcacuaaccugucggguuucuccuacauggaacuuaaggugggauacaucucggccauaaaaguaaacggguucacgugcacagguguggugacagaggcagagacuuacacuaacuuugucgguuauguuaccaccacguucaaaagaaagcauuuccgcccaacacccgaugcaugucgagcugcuuacaauuggaagauggccggugaccccagauaugaagaaucgcugcacaauccguacccugacuaccacuggcuucgaaccgucaaaaccacaaaggagucccucgucaucauauccccaaauguagcggaccuggacccauacaacaaaucccuccauucgagagucuuuccuagcgggaaaugcucggggauaacaauaucaucuacuuacugcucuacuaaccaugauuacacaaucuggaugcccgagaauccgagacuggggacaucuugugacaucuucaccaacaguagagggaagagagcauccaaagggggcaaaacuugcggauuuguugaugaaagaggcuuguacaagucuuugaaaggggcaugcaaacucaaguuauguggaguucuuggccuuagacuuauggauggaacguggguugcgaugcaaacaucggacgaaaccaagugguguccuccugaucaguugguaaaucugcacgacuuucgcucagacgagaucgaacaucuuguuguggaggaguuggucaagaaaagagaggagugucuggaugcauuagagucuaucaugacuaccaagucggugaguuucagacgucucagccacuugagaaaacuugucccuggguucgggaaggcauacaccauauucaacaaaaccuugauggaagcagaugcucauuacaagucaguccgaaccuggaaugagaucauccccuccaaaggguguuugagaguuggagggaggugucauccucacgugaacgggguguuuuuuaacgguauaauacuggguccugacggccauguucuaaucccagagaugcaaucaucccuccuucagcagcauauggaguuguuggaauccucaguuauuccccugaugcacccuuuagcagacccgucuacagucuucaaggacggugaugaagcagaggauuuuguugagguucaccuucccgacgugcacaaacaaauuucagguguugaccugggucucccuagcuggggaaaguauguuuuggugagugcaggggucuugguuguccugauguugacaauuuucauaaugacauguugcgggaaaguccgucgacccaagucuacacaacacagucucggagggacagggaggaaggugucggucacuucccaaagcggaaaggucauuucuucaugggagucauauaagagcgggggugagaccagacuguga

SEQ ID NO: 62747 - RNA, 1575 nt, Artificial Sequence
  derived and/or modified CDS sequence (wt) from glycoprotein__RABV__AB699210.1
augguuccucagguucuuucguuuguaccccuucugguuuucucaacguguuucggaaaauucccuaucuauacgauaccagacaaacuuggucccuggagcccaauugacauacaucaucucagcuguccaaacaaccugguuguggaagaugaaggaugcacuaaccugucggguuucuccuacauggagcuuaaggugggauacaucucggccauaaaaguaaacggguucacgugcacagguguggugacagaggcagagacuuacacuaacuuugucgguuauguuaccaccacguucaaaagaaagcauuuccgcccaacacccgaugcaugucgagcugcuuacaauuggaagauggccggugaccccagauaugaagaaucgcugcacaauccguacccugacuaccacuggcuucgaaccguuaaaaccacaaaggagucccucgucaucauauccccaaguguagcggaccuggacccauacaacaaaucccuccauucgagggucuuuccuagcgggaaaugcucggggauaacaauaucaucuacuuacugcucuacuaaccaugauuacacaaucuggaugccugagaauccgagacuggggacaucuugugacaucuucaccaacaguagagggaagagagcauccaaagggggcaaaacuuguggauuuguugaugaaagaggcuuguauaagucuuugaaaggggcaugcaaacucaaguuauguggaguucuuggccuuagacuuauggauggaacguggguugcgaugcaaacaucggacgaaaccaagugguguccuccugaucaguugguaaaucugcacgacuuucgcucagacgagaucgaacaucuuguuguggaggaguuggucaagaaaagagaggagugucuggaugcauuagagucuaucaugacuaccaagucggugaguuucagacgucucagccacuugagaaaacuugucccuggguucgggaaggcauacaccauauucaacaaaaccuugauggaagcagaugcucauuacaagucaguccgaaccuggaaugagaucauccccuccaaaggguguuugagaguuggagggagaugucauccucacgugaacgggguguuuuuuaacgguauaauacuggguccugacggccauguucuaaucccagagaugcaaucaucccuccuucagcagcauauggaguuguuggaauccucaguuauuccccugaugcacccuuuagcagacccgucuacaguuuucaaggacggugaugaagcagaggauuuuguugagguucaccuucccgacgugcacaaacaaauuucagguguugaccugggucucccuagcuggggaaaguauguuuuggugagugcaggggucuugguuguccugauguugacaauuuucauaaugacauguugcgggagaguccgucgacccaagucuacacaacacagucucggagggacagggaggaaggugucggucacuucccaaagcgggaaggucauaucuucaugggagucauauaagagcgggggugagaccagacuguga

SEQ ID NO: 62748 - RNA, 1575 nt, Artificial Sequence
  derived and/or modified CDS sequence (wt) from glycoprotein__RABV__AB699212.1
augguuccucagguucuuucguuuguaccccuucugguuuucucaacguguuucgggaaauucccuaucuauacgauaccagacaagcuuggucccuggagcccaauugacauacaucaucucagcuguccaaacaaccugguuguggaagaugaaggaugcacuaaccugucggguuucuccuacauggagcuuaaggugggauacaucucggccauaaaaguaaacggguucacgugcacagguguggugacagaggcagagacuuacacuaacuuugucgguuauguuaccaccacguucaaaagaaagcauuuccgcccaacacccgaugcaugucgagcugcuuacaauuggaagauggccggugaccccagauaugaagaaucgcugcacaauccguauccugacuaccacuggcuucgaaccguuaaaaccacaaaggagucccucgucaucauauccccaaguguagcggaccuggacccauacgacaaaucccuccauucgagggucuuuccuagcgggaaaugcucggggauaacaauaucaucuacuugcugcucuacuaaccaugauuacacaaucuggaugccugagaauccgagacuggggacaucuugugacaucuucaccaacaguagagggaagagagcauccaaagggggcaaaacuuguggauuuguugaugaaagaggcuuguauaagucuuugaaaggggcaugcaaacucaaguuauguggaguucuuggccuuagacuuauggauggaacguggguugcgaugcaaacaucggacgaaaccaagugguguccuccugaucaguugguaaaucugcacgacuuucgcucagacgagaucgaacaucuuguuguggaggaguuggucaagaaaagagaggagugucuggaugcauuagagucuaucaugacuaccaagucggugaguuucagacgucucagccacuugagaaaacuugucccuggguucgggaaggcauacaccauauucaacaaaaccuugauggaagcagaugcucauuacaagucaguccgaaccuggaaugagaucauccccuccaaaggguguuugagaguuggagggaggugucauccucacgugaacgggguguuuuuuaacgguauaauacuggguccugacggccauguucuaaucccagagaugcaaucaucccuccuucagcagcauauggaguuguuggaauccucaguuauuccccugaugcacccuuuagcagacccgucuacaguuuucaaggacggugaugaagcagaggauuuuguugagguucaccuuccugacgugcacaagcaaauuucagguguugaccugggucucccuagcuggggaaaguauguuuuggugagugcaggggucuugguuguccugauguugacaauuuucauaaugacauguugcgggagaguccgucgacccaagucuacacaacacagucucggagggacagggaggaaggugucggucacuucccaaagcgggaaggucauaucuucaugggagucauauaagagcgggggugagaccagacuguga

SEQ ID NO: 62749 - RNA, 1575 nt, Artificial Sequence
  derived and/or modified CDS sequence (wt) from glycoprotein__RABV__AB699213.1
augguuccucagguucuuucguuuguaccccuucugguuuucucaacguguuucggaaaauucccuaucuauacgauaccagacaaacuuggucccuggagcccaauugacauacaucaucucagcuguccaaacaaccugguuguggaagaugaaggaugcacuaaccugucggguuucuccuacauggagcuuaaggugggauacaucucggccauaaagguaaacggguucacgugcacagguguggugacagaggcagagacuuacacuaacuuugucgguuauguuaccaccacguucaaaagaaagcauuuccgcccaacacccgaugcaugucgagcugcuuacaauuggaagauggccggugaccccagauaugaagaaucgcugcacaauccguauccugacuaccacuggcuucgaaccguuaaaaccacaaaggagucccucgucaucauauccccaaguguagcggaccuggacccauacaacaaaucccuccauucgagggucuuuccuagcgggaaaugcucggggauaacaauaucaucuacuuacugcucuacuaaccaugauuacacaaucuggaugccugagaauccgagacuggggacaucuugugacaucuucaccaacaguagagggaagagagcauccaaagggggcaaaacuuguggauuuguugaugaaagaggcuuguauaagucuuugaaaggggcaugcaaacucaaguuauguggaguucuuggccuuagacuuauggauggaacguggguugcgaugcaaacaucggacgaaaccaagugguguccuccugaucaguugguaaaucugcacgacuuucgcucagacgagaucgaacaucuuguuguggaggaguuggucaagaaaagagaggagugucuggaugcauuagaaucuaucaugacuaccaagucggugaguuucagacgucucagccacuugagaaaacuugucccuggguucgggaaggcauacaccauauucaacaaaaccuugauggaagcagaugcucauuacaagucaguccgaaccuggaaugagaucauccccuccaaaggguguuugagaguuggagggaggugucauccucacgugaacgggguguuuuuuaacgguauaauacuggguccugacggccauguucuaaucccagagaugcaaucaucccuccuucagcagcauauggaguuguuggaauccucaguuauuccccugaugcacccuuuagcagacccgucuacaguuuucaaggacggugaugaagcagaggauuuuguugagguucaccuucccgacgugcacaaacaaauuucagguguugaccugggucucccuagcuggggaaaguauguuuuggugagugcaggggucuugguuguccugauguugacaauuuucauaaugacauguugcgggagaguccgucgacccaagucuacacaacacagucucggagggacagggaggaaggugucggucacuucccaaagcgggaaggucauaucuucaugggagucauauaagagcgggggugagaccagacuguga

SEQ ID NO: 62750 - RNA, 1575 nt, Artificial Sequence
  derived and/or modified CDS sequence (wt) from glycoprotein__RABV__AB733961.1
augauuccucaggcucuuuuguuuguaccccuucuggucucuucauuguguuucggaaaauuucccaucuacacgauaccggacaaacuuggucccuggagccccauugauauacaucaucucagcuguccgaacaauuuaguuguggaggaugaaggauguaccaaccugucagguuucucguacauggaacucaagguaggauacauuucagccaucaaagugaacggguucacuuguacggguguagugacagaagcagagaccuacaccaacuuuguuggcuaugucacuaccacguuuaagagaaagcacuuccguccaacgcuagaugcaugcagagccgcauauaacuggaagauggcuggugaccccagauaugaagaaucucugcacaauccuuacccugauuaucauuggcuccgaacugugaagaccaccaaagaaucucuuguuaucauaucuccaaguguggcagauuuggacccauacgauaaaucccuucacucgagaguuuuuccuagcggaaaaugcucgggcauaacggugucuucuaccuacugcucuaccaaccacgacuauaccauuuggaugccugagaauccuagacuagggaccucuugugacauuuucacuaauagcagagggaagagagcauccaaagggagcaagaccugcggauuuguagaugagagaggccuguacaagucucugaaaggagcaugcaaacugaaacuaugugggguucugggacucagacuuauggauggaacaugggccgcgauccagacaucagaugagaccaaauggugcccuccugaucaguuagugaaccuacaugacuuccgcucggaugaaauugaacaucuuguuguggaggagcuggucaagaaaagggaagagugucuagaugcacuggaguccaucaugaccaccaagucugugaguuucagacgucucagucacuugaggaaacuugugcccggguuuggaaaagcauauaccauauucaauaagaccuugauggaggcugaugcucacuacaaaucaguccggacuuggaaugagaucaucccaucuaaaggguguuuaagagucggggggagaugucacccucaugugaacgggguguucuucaaugguaucaucuuaggcccugacggccaugugcuaaucccggagaugcagucgucucuccuccagcagcauauggaguuguuggaauccucagucauccccuuaaugcaucccuuggcagauccaucaacaguuuucaaagaugaugacgaggcggaagauuuuguugagguucaucuuccagaugugcauaagcaggucucaggggucgaucucggucucccaagcugggggaaguauguguugacgagcgcaggcgucuugaccgcacuaauguugaugauuuucuuaaugacguguuguagaagggccaauagagccgaaucugcacaacacagucuuggagagagggggaggaaagugucaguaaccucucaaagcgggcggguuauauccucaugggagucauacaaaaguggaggugagaccaagcuguaa

SEQ ID NO: 62751 - RNA, 1575 nt, Artificial Sequence
  derived and/or modified CDS sequence (wt) from glycoprotein__RABV__AB733962.1
augauuccucaggcucuuuuguuuguaccccuucuggucuuuucauugugucucggaaaauuucccaucuacacgauaccggacaaacuuggucccuggagccccauugauauacaucaucucagcuguccgaacaauuugguuguggaggaugaaggauguaccaaccugucagguuucucguacauggaacucaaggugggauacauuucagccaucaaagugaacggguucacuuguacggguguagugacagaagcagagaccuacaccaacuuuguuggcuaugucacuaccacguuuaagagaaagcacuuccgcccaacgccggaugcaugcagagccgcauauaacuggaagauggcuggugaccccagauaugaagaaucucugcauaauccuuacccugauuaucauuggcuccgaacugugaagaccaccaaagaaucucuuguuaucauaucuccaaguguggcagauuuggacccauaugauaaaucccuucacucgagaguuuuuccuagcggaaaaugcucaggcauaacggugucuucuaccuacugcucuacuaaccacgacuauaccaucuggaugccugagaaucccagacuggggaccucuugugacauuuucaccaauagcagagggaagagagcauccaaagggagcaagaccuguggauuuguagaugagagaggccuguacaagucucugaaaggagcaugcaaacugaaacuaugugggguucugggacucagacuuauggauggaacaugggccgcgauccagacaucagaugagaucaaauggugcccuccugaucaguuagugaaccugcaugacuuucgcucggaugaaauugaacaucuuguuguggaggagcuggucaagaaaagggaagagugucuagaugcacuggaguccaucaugaccaccaagucugugaguuucagacgucucagucacuugaggaagcuugugcccggguuuggaaaagcauauaccauauucaauaaaaccuugauggaggcugaugcucacuacaaaucaguccgaacuuggaaugagaucauccccucuaaaggguguuuaagagucggggggagaugucacccucaugugaacgggguguucuucaacgguaucaucuuaggcccugacggccaugugcuaaucccggagaugcaaucgucucuccuccagcagcacauggaauuguuggaauccucagucaucccuuugaugcaucccuuggcagauccaucaacaguuuuuaaagaugaugacgaggcggaagauuuuguugagguucaccuuccagaugugcacaagcaggucucaggggucgaucucggucuuccaagcugggggaaguauguguugaugagcgcaggcgucuugaccgcauuaauguugaugauuuucuuaacgacguguuguagaagggccaauagagcagaaucagcgcaacacagucuuggagaaagggggaggaaagugucgguaaccucccaaagcgggcggguuauauccucaugggagucauacaaaaguggaggugagaccaagcuguaa

SEQ ID NO: 62752 - RNA, 1575 nt, Artificial Sequence
  derived and/or modified CDS sequence (wt) from glycoprotein__RABV__AB733963.1
augauuccucaggcucuuuuguuuguaccccuucuggucuuuucauuguguuucggaaaauuucccaucuacacgauaccggacaaacuuggucccuggagccccauugauauacaucaucucagcuguccgaacaauuugguuguggaggaugaaggauguaccaaccugucagguuucucguacauggaacucaagguaggauacauuucagccaucaaagugaacggguucacuuguacggguguagugacagaagcagagaccuacaccaacuuuguuggcuaugucacuaccacauuuaagagaaagcacuuccgcccaacgccggaugcaugcagagccgcauauaacuggaagauggcuggugaccccagauaugaagaaucucugcauaauccuuacccugauuaucauuggcuccgaacugugaagaccaccaaagaaucucuuguuaucauaucuccaaguguggcagauuuggacccauacgauaaaucccuucacucgagaguuuuuccuagcggaaaaugcucaggcauaacggugucuucuaccuacugcuccacuaaccacgacuauaccaucuggaugccugagaauccuagacuagggaccucuugugacauuuucaccaauagcagagggaagagagcguccaaagggagcaagaccuguggauuuguagaugagagaggccuguacaagucucugaaaggagcaugcaaacugaaacuaugugggguucugggacucagacuuauggaugggacaugggccgcgauccagacaucagaugagaccaaauggugcccuccugaucaguuagugaaccuacaugacuuucgcucggaugagauugaacaucuuguuguggaggagcuggucaagaaaagggaagagugucuagaugcacuggaguccaucaugaccaccaagucugugaguuucagacgucucagucacuugaggaaacuugugcccggguuuggaaaagcauauaccauauucaauaagaccuugauggaggcugaugcucacuacaaaucaguccggacuuggaaugagaucauccccucuaaaggguguuuaagagucggggggagaugucacccucaugugaacgggguguucuucaaugguaucaucuuaggcccugacggccaugugcuaaucccggagaugcagucaucucuccuccagcagcauauggaguuauuggaauccucagucauccccuuaaugcaucccuuggcagauccaucaacaguuuuuaaagacgaugacgaggcggaagauuuuguugagguucaccuuccagaugugcacaagcaggucucaggggucgaucucggucucccaagcugggggaaguauguguugaugagcgcaggcgucuugaccgcauuaauguugaugauuuucuuaaugacguguuguagaagggccaauagaguagaaucagcacaacacagucuuggagagagggggaggaaagugucgguaaccucccaaagcgggcggguuauauccucaugggagucauacaaaaguggaggugagaccaagcuguaa

SEQ ID NO: 62753 - RNA, 1575 nt, Artificial Sequence
  derived and/or modified CDS sequence (wt) from glycoprotein__RABV__AB733964.1
augauuccucaggcucuuuuguuuguaccccuucuggucuuuucauugugucucggaaaauuucccaucuacacgauaccggacaaacuuggucccuggagccccauugauauacaucaucucagcuguccgaacaauuugguuguggaggaugaaggauguaccaaccugucagguuucucguacauggaacucaagguaggauacauuucagccaucaaagugaacggguucacuuguacggguguagugacagaagcagagaccuacaccaacuuuguuggcuaugucacuaccacguuuaagagaaagcacuuccgcccaacgccggaugcaugcagagccgcauauaacuggaagauggcuggugaccccagauaugaagaaucucugcauaauccuuacccugauuaucauuggcuccgaacugugaagaccaccaaagaaucucuuguuaucauaucuccaaguguggcagauuuggacccauaugauaaaucccuucacucgagaguuuuuccuagcggaaaaugcucaggcauaacggugucuucuaccuacugcucuacuaaccacgacuauaccaucuggaugccugagaauccuagacuagggaccucuugugacauuuucaccaauagcagagggaagagagcaucuaaagggagcaagaccuguggauuuguagaugagagaggccuguacaagucucugaaaggagcaugcaaacugaaacuaugugggguucugggacucagacuuauggacggaacaugggccgcgauccagacaucagaugagaccaaauggugcccuccugaucaguuagugaaccugcaugacuuucacucggaugaaauugaacaucuuguuguggaggagcuggucaagaaaagggaagagugucuagaugcacuggaguccaucaugaccaccaagucugugaguuucagacgucucagucacuugaggaaacuugugcccggguuuggaaaagcauauaccauauucaauaaaaccuugauggaggcugaugcucacuacaaaucaguccggacuuggaaugagaucauccccacuaaaggguguuuaagagucggggggagaugucacccucaugugaacgggguguucuucaaugguaucaucuuaggcccugacggccaugugcuaaucccggagaugcagucgucucuccuccagcagcacauggaguuguuggaauccucagucaucccuuuaaugcaucccuuggcagauccaucaacaguuuuuaaagaugaugacgaggcggaagauuuuguugagguucaccuuccagaugugcacaagcaggucucaggggucgaucucggucuuccaagcugggggaaguauguguugaugagcgcaggcgucuugaccgcauuaauguugaugauuuucuuaacgacguguuguagaagggccgauagagcagaaucagcgcaacacagucuuggagagagggggaggaaagugucgguaaccucccagagcgggcggguuauauccucaugggagucauacaaaaguggaggugagaccaagcuguaa

SEQ ID NO: 62754 - RNA, 1575 nt, Artificial Sequence
  derived and/or modified CDS sequence (wt) from glycoprotein__RABV__AB733965.1
augauuccucaggcucuuuuguuuguaccccuucuggucuuuucauuguguuucggaaaauuucccaucuacacgauaccggacaaacuuggucccuggagccccauugauauacaucaucucagcuguccgaacaauuugguuguggaggaugaaggauguaccaaccugucagguuucucguacauggaacucaagguaggauacauuucagccaucaaaguaaacggguucacuuguacggguguagugacagaagcagagaccuacaccaacuuuguuggcuaugucacuaccacguuuaagagaaagcacuuccgcccaacgccggaugcaugcagagccgcauauaacuggaagauggcuggugaccccagauaugaagaaucucugcauaauccuuacccugauuaucauuggcuccgaacugugaagaccaccaaagaaucucuuguuaucauaucuccaaguguggcagauuuggacccauaugauaaaucccuucacucgagaguuuuuccuagcggaaaaugcucaggcauaacggugucuucuaccuacugcucuacuaaccacgacuauaccaucuggaugccugagaauccuaggcuagggaccucuugugacauuuucaccaauagcagagggaagagagcauccaaagggagcaagaccuguggauuuguagaugagaggggccuguacaagucucugaaaggagcaugcaaacugaaacuaugugggguucugggacucagacuuauggauggaacaugggccgcgauccagacaucagaugagaccaaauggugcccuccugaucaguuagugaaccugcaugacuuucgcucggaugaaauugaacaucuuguuguggaggagcuggucaagaaaagggaagagugucuagaugcacuggaguccaucaugaccaccaagucugugaguuucagacgucucagucacuugaggaaacuugugcccggguuuggaaaagcauauaccauauucaauaaaaccuugauggaggcugaugcucacuacaaaucaguccggacuuggaaugagaucauccccucuaaaggguguuuaagagucggggggagaugucacccucaugugaacgggguguucuucaaugguaucaucuuaggcccugacggccaugugcuaaucccggagaugcagucgucucuccuccagcagcacauggaguuguuggaauccucagucaucccuuuaaugcaucccuuggcagauccaucaacaguuuuuaaagaugaugacgaggcggaagauuuuguugagguucaccuuccagaugugcacaagcaggucucaggggucgaucucggucuuccaagcugggggaaguauguguugaugagcgcaggcgucuugaccgcauuaauguugaugaucuucuuaacgacguguuguagaagggccaauagagcagaaucggcgcaacacagucuuggagagagggggaggaaagugucgguaaccucccaaagcgggcggguuauauccucaugggagucauacaaaaguggaggugagaccaagcuguaa

SEQ ID NO: 62755 - RNA, 1575 nt, Artificial Sequence
  derived and/or modified CDS sequence (wt) from glycoprotein__RABV__AB733966.1
augauuccucaggcucuuuuguuuguaccccuucuggucuuuucauuguguuucggaaaauuucccaucuacacgauaccggacaaacuuggucccuggagccccauugauauacaucaucucagcuguccgaacaauuugguuguggaggaugaaggauguaccaaccugucagguuucucguacauggaacucaagguaggauacauuucagccaucaaaguaaacggguucacuuguacggguguagugacagaagcagagaccuacaccaacuuuguuggcuaugucacuaccacguuuaagagaaagcacuuccgcccaacgccggaugcaugcagagccgcauauaacuggaagauggcuggugaccccagauaugaagaaucucugcauaauccuuacccugauuaucauuggcuccgaacugugaagaccaccaaggaaucucuuguuaucauaucuccaaguguggcagauuuggacccauaugauaaaucccuucacucgagaguuuuuccuagcggaaaaugcucaggcauaacggugucuucuaccuacugcucuacuaaccacgacuauaccaucuggaugccugagaauccuaggcuagggaccucuugugacauuuucaccaauagcagagggaagagagcauccaaagggagcaagaccuguggauuuguagaugagaggggccuguacaagucucugaaaggagcaugcaaacugaaacuaugugggguucugggacucagacuuauggauggaacaugggccgcgauccagacaucagaugagaccaaauggugcccuccugaucaguuagugaaccugcaugacuuucacucggaugaaauugaacaucuuguuguggaggagcuggucaagaaaagggaagagugucuagaugcacuggaguccaucaugaccaccaagucugugaguuucagacgucucagucacuugaggaaacuugugcccggguuuggaaaagcauauaccauauucaauaaaaccuugauggaggcugaugcucacuacaaaucaguccggacuuggaaugagaucauccccucuaaaggguguuuaagagucggggggagaugucacccucaugugaacgggguguucuucaaugguaucaucuuaggcccugacggccaugugcuaaucccggagaugcagucgucucuccuccagcagcacauggaguuguuggaauccucagucaucccuuuaaugcaucccuuggcagauccaucaacaguuuuuaaagaugaugacgaggcggaagauuuuguugagguucaccuuccagaugugcacaagcaggucucaggggucgaucucggucuuccaagcugggggaaguauguguugaugagcgcaggcgucuugaccgcauuaauguugaugaucuucuuaacgacguguuguagaagggccaauagagcagaaucggcucaacacagucuuggagagagggggaggaaagugucgguaaccucccaaagcgggcggguuauauccucaugggagucauacaaaaguggaggugagaccaagcuguaa

SEQ ID NO: 62756 - RNA, 1575 nt, Artificial Sequence
  derived and/or modified CDS sequence (wt) from glycoprotein__RABV__AB733967.1
augauuccucaggcucuuuuguuuguaccccuucuggucuuuucauuguguuucggaaaauuuccuaucuacacaauaccggacaaacuuggucccuggagccccauugauauacaucaucucagcuguccgaacaauuugguuguggaggaugaaggauguaccaaccugucagguuucucguacauggaacucaagguaggauacauuucagccaucaaagugaacggguucacuuguacggguguagugacagaagcagagaccuacaccaacuuuguuggcuaugucacuacuacguuuaagagaaagcacuuccgcccaacgccggaugcaugcagagccgcauauaacuggaagauggcuggugaccccagauaugaagaaucucugcauaauccuuacccugauuaucauuggcuccgaacugugaagaccaccaaagaaucucuuguuaucauaucuccaaguguggcagauuuggacccauaugauaaaucccuucacucgagaguuuuuccuagcggaaaaugcucaggcauaacagugucuucuaccuacugcucaacuaaccacgacuauaccauuuggaugccugagaauccuagacuagggaccucuugugacauuuucaccaauagcagagggaagagagcauccaaagggagcaagaccuguggauuuguagaugagagaggccuguacaagucucugaaaggagcaugcaaacugaaacuaugugggauucugggacucagacuuauggauggaacaugggccgcgauccagacaucagaugagaccaaauggugcccuccugaucaguuagugaaccuacaugacuuucgcucggaugaaauugaacaucuuguuguggaggagcuggucaagaaaagagaagagugucuagaugcacuggaguccaucaugaccaccaagucugugaguuucagacgucucagucacuugaggaaacuugugcccggguuuggaaaagcauauaccauauucaauaagaccuugauggaggcugaugcucacuacaaaucaguccggacuuggaaugagaucauccccucuaaaggguguuuaagagucggggggagaugucacccucaugugaacgggguguucuucaauggcaucaucuuaggcccugacggccaugugcuaaucccggagaugcagucgucucuccuccagcagcauauggaguuauuggaauccucaguaauccccuuaaugcaccccuuggcagauccaucaacaguuuuuaaagaugaugacgaggcggaagauuuuguugagguucaccuuccagaugugcacaagcaggucucaggggucgaucucggucucccaagcugggggaaguauguguugaugagcgcaggcgucuugaccgccuuaauguugaugauuuucuuaaugacguguuguagaagggccaauagagcagaaucagcacaacacagucuuggagagagggggagaaaagugucgguaaccucccaaagugggcggguuauauccucaugggagucauacaagaguggaggugagaccaagcuguaa

SEQ ID NO: 62757 - RNA, 1575 nt, Artificial Sequence
  derived and/or modified CDS sequence (wt) from glycoprotein__RABV__AB733968.1
augauuccucaggcucuuuuguuuguaccccuucuggucuuuucauuguguuucggaaaauuucccaucuacacgauaccggacaaacuuggucccuggagccccauugauauacaucaucucagcuguccgaacaauuugguuguugaggaugaaggauguaccaaccugucagguuucucguacauggaacucaagguaggauacauuucagccaucaaagugaacggguucacuuguacggguguagugacagaagcagagaccuacaccaacuuuguuggcuaugucacuaccacguuuaagagaaagcacuuccgcccaacgccggaugcaugcagagccgcauauaacuggaagauggcuggugaccccagauaugaagaaucucugcauaauccuuacccugauuaucauuggcuccgaacugugaagaccaccaaagaaucucuuguuaucauaucuccaaguguggcagauuuggacccauaugauaaaucccuucacucgagaguuuuuccuagcggaaaaugcucaggcauaacggugucuucuaccuacugcccuacuaaccacgacuauaccaucuggaugccugagaauccuagacuagggaccucuugugacauuuucaccaauagcagagggaagagagcaucuaaagggagcaagaccuguggauuuguagaugagagaggccuguacaagucucugaaaggagcaugcaaacugaaacuaugugggguucugggacucagacuuauggauggaacaugggccgcgauccagacaucagaugagaccaaauggugcccuccugaucaguuagugaaccugcaugacuuucgcucggaugaaauugaacaucuuguuguggaggagcuggucaagaaaagggaagagugucuagaugcacuggaguccaucaugaccaccaagucugugaguuucagacgucucagucacuugaggaaacuugugcccggguuuggaaaagcauauaccauauucaauaaaaccuugauggaggcugaugcucacuacaaaucaguccggacuuggaaugagaucauccccucuaaaggguguuuaagagucggggggagaugucacccucaugugaacgggguguucuucaaugguaucaucuuaggcccugacggccaugugcuaaucccggagaugcagucgucucuccuccagcagcacauggaguuguuggaauccucagucaucccuuuaaugcaucccuuggcagauccaucaacaguuuuuaaagaugaugacgaggcggaagauuuuguugagguucaccuuccagaugugcacaagcaggucucaggggucgaucucggucuuccaagcugggggaaguauguguugaugagcgcaggcgucuugacugcauuaauguugaugauuuucuuaacgacguguuguagaagggccgauagagcagaaucagcgcaacacagucuuggagagagggggaggaaagugucgguaaccucccagagcgggcggguuauauccucaugggagucauacaaaaguggaggugagaccaagcuguaa

SEQ ID NO: 62758 - RNA, 1575 nt, Artificial Sequence
  derived and/or modified CDS sequence (wt) from glycoprotein__RABV__AB733969.1
augauuccucaggcucuuuuguuuguaccccuucuggucuuuucauuguguuucggaaaauuucccaucuacacgauaccggacaaacuuggucccuggagccccauugauauacaucaucucagcuguccgaacaauuugguuguggaggaugaaggauguaccaaccugucagguuucucguacauggaacucaagguaggauacauuucagccaucaaagugaacggguucacuuguacggguguagugacagaagcagagaccuacaccaacuuuguuggcuaugucacuaccacguuuaagagaaagcacuuccgcccaacgccggaugcaugcagagccgcauauaacuggaagauggcuggugaccccagauaugaagaaucucugcauaauccuuacccugauuaucauuggcuccgaacugugaagaccaccaaagaaucucuuguuaucauaucuccaaguguggcagauuuggacccauaugauaaaucccuucacucgagaguuuuuccuagcggaaaaugcucaggcauaacggugucuucuaccuacugcucuacuaaccacgacuauaccaucuggaugccugagaacccuagacuagggaccucuugugacauuuucaccaauagcagagggaagagagcaucuaaagggagcaagaccuguggauuuguagaugagagaggccuguacaagucucugaaaggagcaugcaaacugaaacuaugugggguucugggacucagacuuauggauggaacaugggccgcgauccagacaucagaugagaccaaauggugcccuccugaucaguuagugaaccugcaugacuuucgcucggaugaaauugaacaucuuguuguggaggagcuggucaagaaaagggaagagugucuagaugcacuggaguccaucaugaccaccaagucugugaguuucagacgucucagucacuugaggaaacuugugcccggguuuggaaaagcauauaccauauucaauaaaaccuugauggaggcugaugcucacuacaaaucaguccggacuuggaaugagaucauccccucuaaaggguguuuaagagucggggggagaugucacccucaugugaacgggguguucuucaaugguaucaucuuaggcccugacggccaugugcuaaucccggagaugcagucgucucuccuccagcagcacauggaguuguuggaauccucagucaucccuuuaaugcaucccuuggcagauccaucaacaguuuuuaaagaugaugacgaggcggaagauuuuguugagguucaccuuccagaugugcacaagcaggucucaggggucgaucucggucuuccaagcugggggaaguauguguugaugagcgcaggcgucuugaccgcauuaauguugaugauuuucuuaacgacguguuguagaagggccgauagagcagaaucagcgcaacacagucuuggagagagggggaggaaagugucgguaaccucccagagcgggcggguuauauccucaugggagucauacaaaaguggaggugagaccaagcuguaa

SEQ ID NO: 62759 - RNA, 1575 nt, Artificial Sequence
  derived and/or modified CDS sequence (wt) from glycoprotein__RABV__AB733970.1
augauuccucaggcucuuuuguuuguaccccuucuggucucuucauuguguuucggaaaauuucccaucuacacgauaccggacaaacuuggucccuggagccccauugauauacaucaucucagcuguccgaacaauuugguuguggaggaugaaggauguaccaaccugucagguuucucguacauggaacucaagguaggauacauuucagccaucaaagugaacggguucacuuguacggguguagugacagaagcagagaccuacaccaacuuuguuggcuaugucacuaccacauuuaagagaaagcacuuccgcccaacgccagaugcaugcagagccgcauauaacuggaagauggcuggugaccccagauaugaagaaucucugcauaauccuuacccugauuaucauuggcuccgaacugugaagaccaccaaagaaucucuuguuaucauaucuccaaguguggcagauuuggacccauacgauaaaucccuucacucgagaguuuuuccuagcggaaaaugcucgggcauaacggugucuucuaccuacugcucuacuaaccacgacuauaccauuuggaugccugagaauccuagauuggggaccucuugugacauuuucacuaauagcagagggaagagagcauccaaagggagcaagaccugcggauuuguagaugagagaggccuguacaagucucuaaaaggagcaugcaaacugaaacuaugugggguucugggacucagacuuauggauggaacaugggccgcgauccagacaucagacgagaccaaaugguguccuccugaucaguuagugaaccugcaugacuuucguucggaugaaauugaacaucuuguuguggaggagcuggucaagaaaagggaagagugucuagaugcacuggaguccaucaugaccaccaagucugugaguuucagacgucucagucacuugaggaaacuugugcccggguuuggaaaagcauauaccauauucaauaagaccuugauggaggcugaugcucacuacaaaucaguccggacuuggaaugagaucaucccaucuaaaggguguuuaagagucggggggagaugucacccucaugugaacgggguguucuucaaugguaucaucuuaggcccugacggccaugugcuaaucccggagaugcagucgucucuccuccagcagcauauggaguuguuggaauccucagucauccccuuaaugcaucccuuggcagauccaucaacaguuuucaaagaugaugacgaggcggaagauuuuguugagguucaccuuccagaugugcacaagcaggucucaggggucgaucucggucucccaagcugggggaaguauguguugacgagcgcaggggucuugaccgcacuaauguugaugauuuucuuaaugacguguuguagaagggccaauagagccgaaucugcacaacacagucuuggagagagggggaggaaagugucgguaaccucccaaagcggacggguuauauccucaugggagucauacaaaaguggaggugagaccaagcuguaa

SEQ ID NO: 62760 - RNA, 1575 nt, Artificial Sequence
  derived and/or modified CDS sequence (wt) from glycoprotein__RABV__AB733971.1
augauuccucaggcucuuuuguuuguaccccuucuggucucuucauuguguuucggaaaauuucccaucuacacgauaccggacaaacuuggucccuggagccccauugauauacaucaucucagcuguccgaacaauuugguuguggaggaugaaggauguaccaaccugucagguuucucguacauggaacucaagguaggauacauuucagccaucaaagugaacggguucacuuguacggguguagugacagaagcagagaccuacaccaacuuuguuggcuaugucacuaccacauuuaagagaaagcacuuccgcccaacgccagaugcaugcagagccgcauauaacuggaagauggcuggugaccccagauaugaagaaucucugcauaauccuuacccugauuaucauuggcuccgaacugugaagaccaccaaagaaucucuuguuaucauaucuccaaguguggcagauuuggacccauacgauaaaucccuucacucgagaguuuuuccuagcggaaaaugcucgggcauaacggugucuucuaccuacugcucuacuaaccacgacuauaccauuuggaugccugagaauccuagauuggggaccucuugugacauuuucacuaauagcagagggaagagagcauccaaagggagcaagaccugcggauuuguaaaugagagaggccuguacaagucucuaaaaggagcaugcaaacugaaacuaugugggguucugggacucaaacuuauggauggaacaugggccgcgauccagacaucaaacgagaccaaaugguguccuccugaucaguuagugaaccugcaugacuuucguucggaugaaauugaacaucuuguuguggaggagcuggucaagaaaagggaagagugucuagaugcacuggaguccaucaugaccaccaagucugugaguuucagacgucucagucacuugaggaaacuugugcccggguuuggaaaagcauauaccauauucaauaagaccuugauggaggcugaugcucacuacaaaucaguccggacuuggaaugagaucaucccaucuaaaggguguuuaagagucggggggagaugucacccucaugugaacgggguguucuucaaugguaucaucuuaggcccugacggccaugugcuaaucccggagaugcagucgucucuccuccagcagcauauggaguuguuggaauccucagucauccccuuaaugcaucccuuggcagauccaucaacaguuuucaaagaugaugacgaggcggaagauuuuguugagguucaccuuccagaugugcacaagcaggucucaggggucgaucucggucucccaagcugggggaaguauguguugacgagcgcaggggucuugaccgcacuaauguugaugauuuucuuaaugacguguuguagaagggccaauagagccgaaucugcacaacacagucuuggagagagggggaggaaagugucgguaaccucccaaagcggacggguuauauccucaugggagucauacaaaaguggaggugagaccaagcuguaa

SEQ ID NO: 62761 - RNA, 1575 nt, Artificial Sequence
  derived and/or modified CDS sequence (wt) from glycoprotein__RABV__AB733972.1
augauuccucaggcucuuuuguuuguaccccuucuggucuuuucauuguguuucggaaaauuucccaucuacacgauaccggacaaacuuggucccuggagccccauugauauacaucaucucagcuguccgaacaauuugguuguggaggaugaaggauguaccaaccugucagguuucucguacauggaacucaagguaggauacauuucagccaucaaagugaacggguucacuuguacggguguagugacagaagcagagaccuacaccaacuuuguuggcuaugucacuaccacguuuaagagaaagcacuuccgcccaacgccggaugcaugcagagccgcauauaacuggaagauggcuggugaccccagauaugaagaaucucugcauaauccuuacccugauuaucauuggcuccgaacugugaagaccaccaaagaaucucuuguuaucauaucuccaaguguggcagauuuggacccauaugauaaaucccuucacucgagaguuuuuccuagcggaaaaugcucaggcauaacggugucuucuaccuacugcuccacuaaccacgacuauaccaucuggaugcccgagaauccuagacuagggaccucuugugacauuuucaccaauagcagagggaagagagcauccaaagggagcaagaccuguggauuuguggaugagagaggccuguacaagucucugaaaggagcaugcaaacugaaacuaugugggguucugggacucagacuuauggauggaacaugggccgcgauccagacaucagaugagaccaaauggugcccuccugaccaguuagugaaccuacaugacuuucgcucggaugaaauugagcaucuuguuguggaggagcuggucaagaaaagggaagagugucuagaugcacuggaguccaucaugaccaccaagucugugaguuucagacgucucagucacuugaggaaacuugugcccggguuuggaaaagcauauaccauauucaauaagaccuugauggaggcugaugcucacuacaaaucaguccggaccuggaaugagaucauccccuccaaaggguguuuaagagucggggggagaugucacccucaugugaacgggguguucuucaaugguaucaucuuaggcccugacggccaugugcuaaucccggagaugcagucgucucuccuccagcagcauauggaguuauuggaauccucagucauucccuuaaugcaucccuuggcagauccaucaacaguuuuuaaaaaugaugacgaggcggaagauuuuguugagguucaccuuccagaugugcacaagcaggucucaggggucgaucucggucucccaagcugggggaaguauguguugaugagcgcaggcgucuugaccgcauuaauguugaugauuuucuuaaugacguguuguagaaggaccaauagagcagaaucagcacaacacagucuuggagagagggggaggaaagugucgguaaccucccaaagcgggcggguuauauccucaugggagucauacaaaaguggaggugagaccaagcuguaa

SEQ ID NO: 62762 - RNA, 1575 nt, Artificial Sequence
  derived and/or modified CDS sequence (wt) from glycoprotein__RABV__AB733973.1
augauuccucaggcucuuuuguuuguaccccuucuggucuuuucauuguguuucggaaaauuucccaucuacacgauaccggacaaacuuggucccuggagccccauugauauacaucaucucagcuguccgaacaauuugguuguugaggaugaaggauguaccaaccugucagguuucucguacauggaacucaagguaggauacauuucagccaucaaagugaacggguucacuuguacggguguagugacagaagcagagaccuacaccaacuuuguuggcuaugucacuaccacguuuaagagaaagcacuuccgcccaacgccggaugcaugcagagccgcauauaacuggaagauggcuggugaccccagauaugaagaaucucugcauaauccuuacccugauuaucauuggcuccgaacugugaagaccaccaaagaaucucuuguuaucauaucuccaaguguggcagauuuggacccauaugauaaaucucuucacucgagaguuuuuccuagcggaaaaugcucaggcauaacggugucuucuaccuacugcccuacuaaccacgacuauaccaucuggaugccugagaauccuagacuagggaccucuugugacauuuucaccaauagcagagggaagagagcaucuaaagggagcaagaccuguggauuuguagaugagagaggccuguacaagucucugaaaggagcaugcaaacugaaacuaugugggguucugggacucagacuuauggauggaacaugggccgcgauccagacaucagaugagaccaaauggugcccuccugaucaguuagugaaccugcaugacuuucgcucggaugaaauugaacaucuuguuguggaggagcuggucaagaaaagggaagagugucuagaugcacuggaguccaucaugaccaccaagucugugaguuucagacgucucagucacuugaggaaacuugugcccggguuuggaaaagcauauaccauauucaauaaaaccuugauggaggccgaugcucacuacaaaucaguccggacuuggaaugagaucauccccucuaaaggguguuuaagagucggggggagaugucacccucaugugaacgggguauucuucaaugguaucaucuuaggcccugacggccaugugcuaaucccggagaugcagucgucucuccuccagcagcacauggaguuguuggaauccucagucaucccuuuaaugcaucccuuggcagauccaucaacaguuuuuaaagaugaugacgaggcggaagauuuuguugagguucaccuuccagaugugcacaagcaggucucaggggucgaucucggucuuccaagcugggggaaguauguguugaugagcgcaggcgucuugacugcauuaauguugaugauuuucuuaacgacguguuguagaagggccgauagagcagaaucagcgcaacacagucuuggagagagggggaggaaagugucgguaaccucccagagcgggcggguuauauccucaugggagucauacaaaaguggaggugagaccaagcuguaa

SEQ ID NO: 62763 - RNA, 1575 nt, Artificial Sequence
  derived and/or modified CDS sequence (wt) from glycoprotein__RABV__AB733974.1
augauuccucaggcucuuuuguuuguaccccuucuggucuuuucacuguguuucggaaaauuucccaucuacacgauaccggacaaacuuggucccuggagccccaucgauauacaucaucucagcuguccgaacaauuuaguugucgaggaugaaggauguaccaaccugucagguuucucguacauggaacucaagguaggauacauuucagccaucaaagugaacggguucacuuguacggguguagugacagaagcagagaccuacaccaacuuuguuggcuaugucacuaccacguuuaagagaaagcacuuccgcccaacgccggaugcaugcagagccgcauauaacuggaagauggccggugaccccagauaugaagaaucucugcauaauccuuacccugauuaucauuggcuccgaacugugaagaccacuaaagaaucucuuguuaucauaucuccgaguguggcagauuuggacccauacgauaaaucccuucacucgagaguuuuuccuagcggaaaaugcucaggcauaacggugucuucuaccuacugcucuacuaaccacgacuauaccaucuggaugccugagaauccuagacuagggaccucuugugacauuuucacuaauagcagagggaagagagcauccaaagggaguaagaccuguggauuuguagaugagagaggccuguacaagucucugaaaggagcaugcaaacugaaacuauguggaguucugggacucaaacuuauggauggaacaugggccgcgauccaaacaucaaaugagaccaaauggugcccuccugaucaguuagugaaccuacaugacuuucgcucggaugaaauugaacaucuuguuguggaggagcuagucaagaaaagggaagagugucuagaugcacuggaguccaucaugaccaccaagucugugaguuucagacgucucagucacuugaggaaacuugugcccggguuuggaaaagcauauaccauauucaauaagaccuugauggaggcugaugcucacuacaaaucaguccggacuuggaaugagaucaucccaucuaaaggguguuuaagagucggggggagaugucacccucacgugaacgggguguucuucaaugguaucaucuugggcccugacggccaugugcuaaucccggagaugcagucgucucuccuccagcagcauauggaguuguuggaauccucagucauccccuuaaugcaucccuuggcagauccaucaacaguuuuuaaagaugaugacgaggcggaagauuuuguugagguucaccuuccagaugugcacaagcaggucucaggggucgaucucggucucccaagcugggggaaguauguguugaugagcgcaggcgucuugaccgcacuaauguugaugauuuucuuaaugacguguuguagaagggccaauagagcagaaucagcacaacacagucuuggagagagggggaggaaagugucgguaaccucccaaagcgggcggguuauauccucaugggagucauacaaaagugggggugagaccaagcuguaa

SEQ ID NO: 62764 - RNA, 1575 nt, Artificial Sequence
  derived and/or modified CDS sequence (wt) from glycoprotein__RABV__AB733975.1
augauuccucaggcucuuuuguuuguaccccuucuggucuuuucacuguguuucggaaaauuucccaucuacacgauaccggacaaacuuggucccuggagccccauugauauacaucaucucagcuguccgaacaauuuaguugucgaggaugaaggauguaccaaccugucagguuucucguacauggaacucaagguaggauacauuucagccaucaaagugaacggguucacuuguacggguguagugacagaagcagagaccuacaccaacuuuguuggcuaugucacuaccacguuuaagagaaagcacuuccgcccaacgccggaugcaugcagagccgcauauaacuggaagauggccggugaccccagauaugaagaaucucugcauaauccuuacccugauuaucauuggcuccgaacugugaagaccacuaaagaaucucuuguuaucauaucuccgaguguggcagauuuggacccauacgauaaaucccuucacucgagaguuuuuccuagcggaaaaugcucaggcauaacggugucuucuaccuacugcucuacuaaccacgacuauaccaucuggaugccugagaauccuagacuagggaccucuugugacauuuucacuaauagcagagggaagagagcauccaaagggaguaagaccuguggauuuguagaugagagaggccuguacaagucucugaaaggagcaugcaaacugaaacuauguggaguucugggacucaaacuuauggauggaacaugggccgcgauccaaacaucaaaugagaccaaauggugcccuccugaucaguuagugaaccuacaugacuuucgcucggaugaaauugaacaucuuguuguggaggagcucgucaagaaaagggaagagugucuagaugcacuggaguccaucaugaccaccaagucugugaguuucagacgucucagucacuugaggaaacuugugcccggguuuggaaaagcauauaccauauucaauaagaccuugauggaggcugaugcucacuacaaaucaguccggacuuggaaugagaucaucccaucuaaaggguguuuaagagucggggggagaugucacccucacgugaacgggguguucuucaaugguaucaucuugggcccugacggccaugugcuaaucccggagaugcagucgucucuccuccagcagcauauggaguuguuggaauccucagucauccccuuaaugcaucccuuggcagauccaucaacaguuuuuaaagaugaugacgaggcggaagauuuuguugagguucaccuuccagaugugcacaagcaggucucaggggucgaucucggucucccaagcugggggaaguauguguugaugagcgcaggcgucuugaccgcacuaauguugaugauuuucuuaaugacguguuguagaagggccaauagagcagaaucagcacaacacagucuuggagagagggggaggaaagugucaguaaccucccaaagcgggcggguuauauccucaugggagucauacaaaagugggggugagaccaagcuguaa

SEQ ID NO: 62765 - RNA, 1575 nt, Artificial Sequence
  derived and/or modified CDS sequence (wt) from glycoprotein__RABV__AB733976.1
augauuccucaggcucuuuuguuuguaccccuucuggucuuuucacuguguuucggaaaauuucccaucuacacgauaccggacaaacuuggucccuggagccccauugauauacaucaucucagcuguccgaacaauuuaguugucgaggaugaaggauguaccaaccugucagguuucucguacauggaacucaagguaggauacauuucagccaucaaagugaacggguucacuuguacggguguagugacagaagcagagaccuacaccaacuuuguuggcuaugucacuaccacguuuaagagaaagcacuuccgcccaacgccggaugcaugcagagccgcauauaacuggaagauggccggugaccccagauaugaagaaucucugcauaauccuuacccugauuaucauuggcuccgaacugugaagaccacuaaagaaucucuuguuaucauaucuccgaguguggcagauuuggacccauacgauaaaucccuucacucgagaguuuuuccuagcggaaaaugcucaggcauaacggugucuucuaccuacugcucuacuaaccacgacuauaccaucuggaugccugagaauccuagacuagggaccucuugugacauuuucacuaauagcagagggaagagagcauccaaagggaguaagaccuguggauuuguagaugagagaggccuguacaagucucugaaaggagcaugcaaacugaaacuauguggaguucugggacucagacuuauggauggaacaugggccgcgauccaaacaucagaugagaccaaauggugcccuccugaucaguuagugaaccuacaugacuuucgcucggaugaaauugaacaucuuguuguggaggagcuagucaagaaaagggaagagugucuagaugcacuggaguccaucaugaccaccaagucugugaguuucagacgucucagucacuugaggaaacuugugcccggguuuggaaaagcauauaccauauucaauaagaccuugauggaggcugaugcucacuacaaaucaguccggacuuggaaugagaucaucccaucuaaaggguguuuaagagucggggggagaugucacccucacgugaacgggguguucuucaaugguaucaucuugggcccugacggccaugugcuaaucccggagaugcagucgucucuccuccagcagcauauggaguuguuggaguccucagucauccccuuaaugcaucccuuggcagauccaucaacaguuuuuaaagaugaugacgaggcggaagauuuuguugagguucaccuuccagaugugcacaagcaggucucaggggucgaucucggucucccaagcugggggaaguauguguugaugagcgcaggcgucuugaccgcacuaauguugaugauuuucuuaaugacguguuguagaagggccaauagagcagaaucagcacaacacagucuuggagagagggggaggaaagugucgguaaccucccaaagcgggcggguuauauccucaugggagucauacaaaagugggggugagaccaagcuguaa

SEQ ID NO: 62766 - RNA, 1575 nt, Artificial Sequence
  derived and/or modified CDS sequence (wt) from glycoprotein__RABV__AB733977.1
augauuccucaggcucuuuuguuuguacccauucuggucuuuucauuguguuucggaaaauuucccaucuacacgauaccggacaaacuuggucccuggagccccauugauauacaucaucucaguuguccgaacaauuugguuguggaggaugaaggauguaccaaccugucagguuucucguacauggaacucaagguaggauacauuucagccaucaaagugaacggauucacuuguacggguguagugacagaagcagagaccuauaccaacuuuguuggcuaugucacuaccacguuuaagagaaagcacuuccgcccaacgccggaugcaugcagagccgcauauaacuggaagauggcuggugaccccagauaugaagaaucucugcauaauccuuacccugauuaucauuggcuccgaacugugaagaccaccaaagaaucucuuguuaucauaucuccaaguguggcagauuuggacccauacgauaaaucccuucacucgagaguuuuuccuagcggaaaaugcucaggcauaacgguguccucuaccuacugcuccacuaaccacgauuauaccaucuggaugccugaaaauccuagacuagggaccucuugugacauuuucaccaauagcagagggaagagagcauccaaagggagcaagaccuguggauuuguagaugagagaggccuguacaagucucugaaaggagcaugcaaacugaaacuaugugggguucugggacucagacuuauggauggaacaugggccgcgauccagacaucagaugagaccaaauggugcccuccugaccaguuagugaaccuacaugacuuucgcucggaugaaauugaacaucuuguuguggaggaguuggucaagaaaagggaagagugucuagaugcacuggaguccaucaugaccaccaagucugugaguuucagacgucucagucacuugaggaaacuugugcccggguuuggaaaagcauauaccauauucaauaagaccuugauggaggccgaugcucacuacaaaucaguccggacuuggaacgagaucauccccucuaaaggguguuuaagagucggggggagaugucacccucaugugaacgggguguucuucaaugguaucaucuuaggcccugauggccaugugcuaaucccggagaugcagucgucucuccuccagcagcauauggaguuguuggaauccucagucauccccuuaaugcaucccuuggcagauccaucaacaguuuuuaaagaugaugacgaggcggaagauuuuguugagguucaccuuccagauguacacaagcaggucucaggggucgaucucggucucccaagcugggggaaguauguguugaugagcgcaggcgucuugaccgcacuaauguugaugauuuucuuaaugacaugcuguagaagggccaauagaguagaaucagcacaacacagucuuggagagagggggaggaaagugucgguaaccucccaaagcgggcggguuauauccucaugggagucauacaaaaguggaggugagaccaagcuguaa

SEQ ID NO: 62767 - RNA, 1575 nt, Artificial Sequence
  derived and/or modified CDS sequence (wt) from glycoprotein__RABV__AB733979.1
augauuccucaggcucuuuuguuuguaccccuucuggucuuuucauuguguuucggaaaauuucccaucuacacgauaccggacaaacuuggucccuggagccccauugauauacaucaucucagcuguccgaacaauuugguuguggaggaugaaggauguaccaaccugucagguuucucguacauggaacucaagguaggauacauuucagccaucaaagugaacggguucacuuguacggguguagugacagaagcagagaccuacaccaacuuuguuggcuaugucacuaccacguuuaagagaaagcacuuccgcccaacgccggaugcaugcagagccgcauauaacuggaagauggcuggugaccccagauaugaagaaucucugcauaauccuuacccugauuaucauuggcuccgaacugugaagaccaccaaagaaucucuuguuaucauaucuccaaguguggcagauuuggacccauacgauaaaucccuucacucgagaguuuuuccuagcggaaaaugcucaggcauaacggugucuucuaccuacugcuccacuaaccacgacuauaccaucuggaugccugagaauccuagacuagggaccucuugugacauuuucaccaauagcagagggaagagagcguccaaagggagcaagaccuguggauuuguagaugagagaggccuguacaagucucugaaaggagcaugcaaacugaaacuaugugggguucugggacucagacuuauggaugggacaugggccgcgauccagacaucagaugagaccaaauggugcccuccugaucaguuagugaaccuacaugacuuucgcucggaugaaauugaacaucuuguuguggaggagcuggucaagaaaagggaagagugucuagaugcacuggaguccaucaugaccaccaagucugugaguuucagacgucucagucacuugaggaaacuugugcccggguuuggaaaagcauauaccauauucaauaagaccuugauggaggcugaugcucacuacaaaucaguccggacuuggaaugagaucauccccucuaaaggguguuuaagagucggggggagaugucacccucaugugaacgggguguucuucaaugguaucaucuuaggcccugacggccaugugcuaaucccggagaugcagucgucucuccuccagcagcauauggaguuauuggaauccucagucauccccuuaaugcaucccuuggcagauccaucaacaguuuuuaaagaugaugacgaggcggaagauuuuguugagguucaccuuccagaugugcacaagcaggucucagggguugaucucggucucccaagcugggggaaguauguguugaugagcgcaggcgucuugaccgcauuaauguugaugauucucuuaaugacguguuguagaagggccaauagaguagaaucagcacaacacagucuuggagagagggggaggaaagugucuguaaccucccaaagcgggcggguuauauccucaugggagucguacaaaaguggaggugagaccaagcuguaa

SEQ ID NO: 62768 - RNA, 1575 nt, Artificial Sequence
  derived and/or modified CDS sequence (wt) from glycoprotein__RABV__AB781935.1
augguuccucaggcucuccuguuuguaccccuucugguuuuuccauuguguuuugggaaauucccuauuuacacgauaccagacaagcuuggucccuggagcccgauugacauacaucaccucagcugcccaaacaauuugguaguggaggacgaaggaugcaccaaccugucaggguucuccuacauggaacuaaaaguuggauacaucuuagccauaaaaaugaacggguucacuugcacaggcguugugacggaggcugaaaccuacacuaacuucguugguuaugucacaaccacguucaaaagaaagcauuuccgcccaacaccagaugcauguagagccgcguacaacuggaagauggccggugaccccagauaugaagagucucuacaaaauccguacccugacuaccgcuggcuucgaacuguaaaaaccaccaaggagucucucguuaucauaucuccaaguguggcagauuuggacccauaugacagaucccuucacucgagggucuucccuagcgggaagugcucgggaguagcggugucuucuaccuacugcuccacuaaccacgauuacaccauuuggaugcccgagaauccgagacuagggaugucuugugacauuuuuaccaauaguagagggaagagagcauccaaagggagugagacuugcggcuuuguagaugaaagaggccuauauaagucuuuaaaaggagcaugcaaacucaaguuauguggaguucuaggacuuagacuuauggauggaacaugggucgcgaugcaaacaucaaaugaaaccaaauggugcccucccgaucaguuggugaaccugcacgacuuucacucagacgaaauugagcaccuuguuguagaggaguuggucaggaagagagaggagugucuggaugcacuagaguccaucaugacaaccaagucagugaguuucagacgucucagucauuuaagaaaacuugucccuggguuuggaaaagcauauaccauauucaacaagaccuugauggaagccgaugcucacuacaagucagucagaacuuggaaugagaucaucccuucaaaaggguguuuaagaguuggggggaggugucauccucaugugaacgggguguuuuucaaugguauaauauuaggaccugacggcaaugucuuaaucccagagaugcaaucaucccuccuccagcaacauauggaguuguuggaauccucgguuaucccccuugugcacccccuggcagacccgucuaccauuuucaaggacggugacgaggccgaggauuuuguugaaguucaccuucccgaugugcacaaucaggucucaggaguugacuugggucucccgaacugggggaaguauguauuacugagugcaggggcccugacugccuugauguugauaauuuuccugaugacauguuguagaagagucaaucgaucagaaccuacgcaacacaaucucagagggacagggagggaggugucagucacuccccaaagcgggaagaucauaucuucaugggaaucacacaagagugggggugagaccagacuguga

SEQ ID NO: 62769 - RNA, 1575 nt, Artificial Sequence
  derived and/or modified CDS sequence (wt) from glycoprotein__RABV__AB817099.1
auggucccgcaggcccuuuuguuugugccucuucugguguucucauuguguuucgggaaguuccccauuuacacgauaccagacaagcuugguccauggagucccauugauauacaucaucucagcuguccaaacaaucugguuguagaggaugagggaugcaccaaccugucaggauucuccuacauggaacucaaaguaggauacaucucagccauaaaagugaacggcuucacuuguacaggugugguuacagaggcagagacuuauacuaacuuuguugguuaugucacuaccacguucagaagaaagcacuuccgcccaacacccgaugcguguagggccgcauacaacuggaaaauggcuggcgaccccagauaugaagagucccugcacaauccauaccccgacuaccauuggcuucggacuguuaaaaccaccaaggagucucuuguuauaauauccccgagcguggcagauuuggacccauaugacaaaucccuucacucgagaguuuuucccgguggaaagugcucaggaauaacaguaucuucuacuuacugcucaacuaaccaugauuacaccaucuggaugccugagaauccaagacucgggacaucuugugacaucuucgucaacagcagagggaagagggcauccaaggggggcaagacuuguggguuuguagaugagagagguuuguauaagucacuaaaaggggcuugcaaacucaaauuauguggggugccuggacuuagacuuauggacggaacgugggucgcgauucagacgucagaugagaccaaauggugccccccugaucaguuaguaaaucuacaugacuuucgcucagaugaaaucgaacaucuugucguggaagagcuggucaagaaaagagaagagugccuagacgcgcuggaguccaucaugaccaccaagucuguaaguuucagacgucucagucaccugaggaaacucgucccuggguuugggaaagcauauacuauauucaacaaaaccuugauggaggcugaugcucacuauaagucgguccggacuuggaacgagaucaucccuucaaaaggguguuugagaguaggaggaagaugucauccucaugugaaugggguauuuuuuaaugguauaauauugggcccugauggccauguucugaucccagagaugcaaucgucccuccuccaacaacacauggaauuguuggaauccucagucauccccuuaaugcauccauuggcagacccgucaacaguuuucaaggauggugaugaggcggaagacuuuguugagguucaccuuccggaugugcacaaacugaucucaggggucgaccuuggucuucccagcugggggaaguauguguugaugagugcagguauucugacaacacugauguugaugaucuucuugaugacuuguugcaggaggguuaaucaagcaggaucaaaacaacaugggcucgaaggggcagggaggaaaguaucugucaccucccagaacgggagggucauauccuccugggagucauauaaaagcggaggugaaaccaggcuguga

SEQ ID NO: 62770 - RNA, 1575 nt, Artificial Sequence
  derived and/or modified CDS sequence (wt) from glycoprotein__RABV__AB817100.1
auggucccgcaggcccuuuuguuugugccucuucugguguucucauuguguuucgggaaguuccccauuuacacgauaccagacaagcuugguccauggagucccauugauauacaucaucucagcuguccaaacaaucugguuguagaggaugaaggaugcaccaaccugucaggauucuccuacauggaacucaaaguaggauacaucucagccauaaaagugaacggcuucacuuguacaggugugguuacagaggcagagacuuauacuaacuuuguugguuaugucacuaccacguucagaagaaagcacuuccgcccaacacccgaugcguguagggccgcauacaacuggaaaauggcuggcgaccccagauaugaagagucccugcacaauccauacccugacuaccauuggcuucggacuguuaaaaccaccaaggagucucuuguuauaauauccccgagcguggcagauuuggacccauaugacaaaucccuucacucgagaguuuuucccggcggaaagugcucaggaauaacaguaucuucuacuuacugcucaacuaaccaugauuacaccaucuggaugccugagaauccaagacuugggacaucuugugacaucuucgucaacagcagagggaagagggcguccaaggggggcaagacuuguggguuuguagaugagagagguuuguauaagucacuaaaaggggcuugcaaacucaaauuauguggggugccuggacucagacuuauggacggaacgugggucgcgauucagacgucagaugagaccaaauggugccccccugaucaguuaguaaaucuacaugacuuucgcucagaugaaaucgaacaucuugucguggaagagcuggucaagaaaagagaagagugccuagacgcgcuggaguccaucaugaccaccaagucuguaaguuucagacgucucagucaccugaggaaacucgucccuggguuugggaaagcauauacuauauucaacaaaaccuugauggaggcugaugcucacuauaagucgguccggacuuggaacgagaucaucccuucaaaaggguguuugagaguaggaggaagaugucauccucaugugaaugggguguuuuuuaaugguauaauauugggcccugauggccauguucugaucccagagaugcaaucgucccuccuccaacaacacauggaauuguuggaauccucagucauccccuuaaugcauccauuggcagacccgucaacaguuuucaaggauggugaugaggcggaagacuuuguugagguucaccuuccggaugugcacaaacugaucucaggggucgaccuuggucuucccagcugggggaaguauguguugaugagugcagguauucugauaacacugauguugaugaucuucuugaugacuuguugcaggaggguuaaucaagcaggaucaaaacaacaugggcucgaaggggcagggaggaaaguaucugucaccucccagaacgggagggucauauccuccugggagucauauaaaagcggaggugaaaccaggcuguga

SEQ ID NO: 62771 - RNA, 1575 nt, Artificial Sequence
  derived and/or modified CDS sequence (wt) from glycoprotein__RABV__AB817101.1
auggucccgcaggcccuuuuguuugugccucuucugguguucucauugugcuucgggaaguuccccauuuacacgauaccagacaagcuugguccauggagucccauugauauacaucaucucagcuguccaaacaaucugguuguagaggaugaaggaugcaccaaccugucaggauucuccuacauggaacucaagguaggauacaucucagccauaaaagugaacggcuucacuuguacaggugugguuacagaggcagagacuuauacuaacuuuguugguuaugucacuaccacguuuagaagaaagcacuuucgcccaacacccgaugcguguagggccgcauacaacuggaaaauggcuggugaccccagauaugaagagucccugcacaauccauaccccgacuaccauuggcuucggacuguuaaaaccaccaaggagucucuuguuauaauauccccgagcguggcagauuuggauccauaugacaaaucccuucacucgagaguuuuucccggcggaaagugcucaggaauaacaguaucuucuacuuacugcucaacuaaccaugauuacaccaucuggaugccugagaauccaagacucgggacaucuugugacaucuucgucaacagcagagggaagagggcguccaaggggggcaagacuuguggguuuguagaugagagagguuuguauaagucacuaaaaggggccugcaaacucaaauuauguggggugccuggacuuagacuuauggacggaacgugggucgcgauucagacgucagaugagaccaaauggugccccccugaucaguuaguaaaucuacaugacuuucgcucagaugaaaucgaacaucuugucguggaagagcuggucaagaaaagagaagagugccuagacgcgcuggaguccaucaugaccaccaagucuguaaguuucagacgucucagucaccugaggaaacucgucccgggguuugggaaagcauauacuauauucaacaaaaccuugauggaggcugaugcucauuauaagucgguccggacuuggaacgagaucaucccuucaaaaggguguuugagaguaggaggaagaugucauccucaugugaaugggguauuuuuuaaugguauaauauugggcccugauggccauguucugaucccagagaugcaaucgucccuccuccaacaacacauggaauuguuggaauccucagucauccccuuaaugcauccauuggcagacccgucaacaguuuucaaggauggugaugaggcggaagacuuuguugagguucaccuuccggaugugcacaaacugaucucaggggucgaccuuggucuucccagcugggggaaguauguguugaugagugcagguauucugacaacacugauguugaugaucuucuugaugacuuguugcaggaggguuaaucaagcaggaucaaaacaacaugggcucgaagggccagggaggaaaguaucugucaccucccagaacgggagggucauauccuccugggagucauauaaaagcggaggugaaaccaggcuguga

SEQ ID NO: 62772 - RNA, 1575 nt, Artificial Sequence
  derived and/or modified CDS sequence (wt) from glycoprotein__RABV__AB817102.1
auggucccgcagacccuuuuguuugugccucuucugguguucucacuguguuucgggaaguuccccauuuacacgauaccagacaagcuugguccauggagucccauugauauacaucaucucagcuguccaaacaaucugguuguagaggaugaaggaugcaccaaccuaucaggauucucuuacauggaacucaaaguaggauacaucucagccauaaaggugaacggcuucacuuguacaggugugguuacagaggcagagacuuacacuaacuucguugguuaugucacuaccacguucagaagaaagcacuuccgcccaacacccgaugcguguagggccgcauacaacuggaaaauggcuggcgaccccagauaugaagagucccugcauaauccauaccccgacuaccauuggcuucggacuguuaaaaccaccaaggagucucuuguuauaauauccccgagcguggcagauuuggacccauaugacaaaucccuucacucgagaguuuuucccggcggaaagugcucaggaauaacaguaucuucuacuuacugcucaacuaaccaugauuacaccaucuggaugccugagaauccaagacucgggacaucuugugacaucuucgucaacagcagagggaagagggcguccagggggggcaagacuuguggguuuguagaugagagagguuuguauaagucucuaaaaggggcuugcaaacucaaauuauguggggugccuggacuuagacuuauggacggaacgugggucgcgauucagacgucagaugagaccaaauggugccccccugaucaguuaguaaaucuacaugacuuucgcucagaugaaaucgaacaucuugucguggaagagcuggucaagaaaagagaagagugccuagacgcguuggaguccaucaugaccaccaagucuguaaguuucagacgucucagucaccugaggaaacucgucccuggguuugggaaagcauauacuauauucaacaaaaccuugauggaggcugaugcucacuauaagucgguccggacuuggaacgagaucaucccuucaaaaggguguuugagaguaggaggaagaugucauccucaugugaaugggguauuuuuuaaugguauaauauugggcccugauggccauguucugaucccagagaugcaaucgucccuccuccaacaacacauggaauuguuggaauccucagucauccccuuaaugcauccauuggcagacccgucaacaguuuucaaggauggugaugaggcggaagacuuuguugagguucaccuuccggaugugcacaaacugaucucaggggucgaccuuggucuucccagcugggggaaguauguguugaugaguguagguauucugacaacacugauguugaugaucuucuugaugacuuguugcaggaggguuaaucaaguaggaccaaaacaacaugggcucgaaggggcagggaggaaaguaucugucaccucccagaacgggagggucauauccuccugggagucauauaaaagcggaggugaaaccaggcuguga

SEQ ID NO: 62773 - RNA, 1575 nt, Artificial Sequence
  derived and/or modified CDS sequence (wt) from glycoprotein__RABV__AB817103.1
auggucccgcaggcccuuuuguuugugccucuucugguguucucauuguguuucgggaaguuccccauuuacacgauaccagacaagcuugguccauggagucccauugauauacaucaucucagcuguccaaacaaucugguuguagaggaugaaggaugcaccaaccuaucaggauucucuuacauggaacucaaaguaggauacaucucagccauaaaagugaacggcuucacuuguacaggugugguuacagaggcagagacuuacaccaacuucguugguuaugucacuaccacguucagaagaaagcacuuccgcccaacacccgaugcguguagggccgcauacaacuggaaaauggcuggcgaccccagauaugaagaguccuugcacaauccauaccccgacuaccauuggcuucggacuguuaaaaccaccaaggagucucuuguuauaauauccccgagcguggcagauuuggacccauaugacaaaucccuccacucgagaguuuuucccggcggaaagugcucaggaauaacaguaucuucuacuuacugcucaacuaaccaugauuacaccaucuggaugccugagaauccaagacucgggacaucuugugacaucuucgucaauagcagagggaagagggcguccaaggggggcaagaccuguggguuuguagaugagagagguuuguauaagucacuuaaaggggcuugcaaacucaaauuauguggggugccuggacuuagacuuauggacggaacgugggucgcgauucagacgucagaugagaccaaauggugucccccugaucaguuagugaaucuacaugacuuucgcucagaugaaaucgaacaucuugucguggaagagcuggucaagaaaagagaagagugccuagacgcgcuggaguccaucaugaccaccaagucuguaaguuucagacgucucagucaccugaggaaacucgucccuggguuugggaaagcauauacuauauucaacaaaaccuugauggaggcugaugcucacuauaagucgguccggacuuggaacgagaucaucccuucaaaaggguguuuaagaguaggaggaagaugucauccucaugugaaugggguguuuuuuaaugguauaauauugggcccugauggccauguucugaucccagagaugcaaucgucccuccuccaacaacacauggaauuguuggaauccucagucauccccuuaaugcauccauuggcagacccgucaacaguuuucaaggauggugaugaggcggaagacuuuguugagguucaccuuccggaugugcacaaacugaucucaggggucgaccuuggucuucccagcugggggaaguauguguugaugagugcagguauucugacgacacugauguugaugaucuucuugaugacuuguugcaggaggguuaaucaagcaggaucaaaacaacaugggcucgaaggggcagggaggaaaguaucugucaccucccagaacgggaggaucauauccuccugggagucauauaaaagcggaggugaaaccagacuguga

SEQ ID NO: 62774 - RNA, 1575 nt, Artificial Sequence
  derived and/or modified CDS sequence (wt) from glycoprotein__RABV__AB817104.1
auggucccgcaggcccuuuuguuuguaccucuucugguguucucauuguguuucgggaaguucccuauuuacacgauaccagacaagcuugguccauggagucccauugauauacaucaucucagcuguccaaacaaucugguuguagaggaugaaggaugcaccaaucuaucaggauucuccuauauggaacucaaaguaggauacaucucagccauaaaagugaacggcuucacuuguacaggugugguuacagaggcagagacuuacacuaacuucguugguuauguaacuaccacguucagaagaaagcacuuccgcccaacacccgaugcguguagggccgcauacaacuggaaaauggcuggcgaccccagauaugaagagucccugcacaauccauaccccgacuaccauuggcuucggacuguuaaaaccaccaaggagucucuuguuauaauauccccgagcguggcagauuuggacccauaugacaaaucccuucacucgagaguuuuucccggcggaaagugcucaggaauaacaguaucuucuacuuacugcucaacuaaccaugauuacaccaucuggaugccugagaauccaagacucgggacaucuugugacaucuuugucaacagcagagggaagagggcguccaaggggggcaagaccuguggguuuguagaugagagagguuuguauaagucacuaaaaggggcuugcaaacucaaauuauguggggugccuggacuuagacuuauggacggaacgugggucgcgauucagacgucagaugagaccaaauggugccccccugaucaguuaguaaaucuacaugacuuucgcucagaugaaaucgaacaucuugucguggaagaguuggucaagaaaagagaagagugccuagacgcgcuggaguccaucaugaccaccaagucuguaaguuucagacgucucagucaccugaggaaacucgucccuggguuugggaaagcauauacuauauucaacaaaaccuugauggaggcugaugcucacuauaagucgguccggacuuggaacgagaucaucccuucaaaaggguguuuaagaguaggaggaagaugucauccucacgugaaugggguauuuuuuaaugguauaauauugggcccugauggccauguucuuaucccagagaugcaaucgucccuccuccaacaacacauggaauuguuggaaucaucagucaucccauuaaugcauccauuggcagacccgucaacaguuuucaaggauggugaugaggcggaagacuuuguugagguucaccuuccggaugugcacaaacugaucucaggagucgaccuuggucuucccagcugggggaaguauguguugaugagugcagguauucugauaacacugauguugaugaucuucuugaugacuuguugcaggaggguuaaucaagcaggaucaaaacaacaugggcucgaaggggcagggaggaaaguaucugucaccucccagaacgggagggucauauccuccugggagucauauaaaagcgggggugaaaccaggcuguga

SEQ ID NO: 62775 - RNA, 1575 nt, Artificial Sequence
  derived and/or modified CDS sequence (wt) from glycoprotein__RABV__AB817105.1
auggucccgcaggcccuuuuguuugugccucuucugguguucucauuguguuucgggaaguuccccauuuacacgauaccagacaagcuugguccauggagucccauugauauacaucaucucagcuguccaaacaaucugguuguagaggaugaaggaugcaccaaccuaucaggauucucuuacauggaacucaaaguaggauacaucucagccauaaaagugaacggcuucacuuguacaggugugguuacagaggcagagacuuacaccaacuucguugguuaugucacuaccacguucagaagaaagcacuuccgcccaacacccgaugcguguagggccgcauacaacuggaaaauggcuggcgaccccagauaugaagaguccuugcacaauccauaccccgacuaccauuggcuucggacuguuaaaaccaccaaggagucucuuguuauaauauccccgagcguggcagauuuggacccauaugacaaaucccuccacucgagaguuuuucccggcggaaagugcucaggaauaacaguaucuucuacuuacugcucaacuaaccaugauuacaccaucuggaugccugagaauccaagacucgggacaucuugugacaucuucgucaauagcagagggaagagggcguccaaggggggcaagaccuguggguuuguagaugagagagguuuguauaagucacuaaaaggggcuugcaaacucaaauuauguggggugccuggacuuagacuuauggacggaacgugggucgcgauucagacgucagaugagaccaaauggugucccccugaucaguuagugaaucuacaugacuuucgcucagaugaaaucgaacaucuuguuguggaagagcuggucaagaaaagagaagagugccuagacgcgcuggaguccaucaugaccaccaagucuguaaguuucagacgucucagucaccugaggaaacucgucccuggguuugggaaagcauauacuauauucaacaaaaccuugauggaggcugaugcucacuauaagucgguccggacuuggaacgagaucaucccuucaaaaggguguuuaagaguaggaggaagaugucauccucaugugaaugggguauuuuuuaaugguauaauauugggcccugauggccauguucugaucccagagaugcaaucgucccuccuccaacaacacauggaauuguuggaauccucagucauccccuuaaugcauccauuggcagacccgucaacaguuuucaaggauggugaugaggcggaagacuuuguugagguucaccuuccggaugugcacaaacugaucucaggggucgaccuuggucuucccagcugggggaaguauguguugaugagugcagguauucugacgacacugauguugaugaucuucuugaugacuuguugcaggaggguuaaucaagcaggaucaaaacaacaugggcucgaaggggcagggaggaaaguaucugucaccucccagaccgggaggaucauauccuccugggagucauauaaaagcggaggugaaaccagacuguga

SEQ ID NO: 62776 - RNA, 1575 nt, Artificial Sequence
  derived and/or modified CDS sequence (wt) from glycoprotein__RABV__AB817106.1
auggucccgcaggcccuuuuguuugugccucuucugguguucucauuguguuucgggaaguuccccauuuacacgauaccagacaagcuugguccauggagucccauugauauacaucaucucagcugcccaaacaaucugguuguagaggaugaaggaugcaccaaccuaucaggauucuccuacauggaacucaaaguaggauacaucucagccauaaaagugaacggcuucacuuguacaggugugguuacagaggcagagacuuacacuaacuucguugguuaugucacuaccacguucagaagaaagcacuuucgcccaacacccgaugcguguagggccgcauacaacuggaaaauggcuggcgaccccagauaugaagagucccugcacaauccauaccccgacuaccauuggcuucggacuguuaaaaccaccaaggagucucuuguuauaauauccccgagcguggcagauuuggacccauaugacaaaucccuucacucgagaguuuuucccggcggaaagugcucaggaauaacaguaucuucuacuuacugcucaacuaaccaugauuacaccaucuggaugccugagaauccaagacucgggacaucuugugacauauucgucaacagcagagggaagagggcguccaaggggggcaagaccuguggguuuguagaugagagagguuuguauaagucacuaaaaggggcuugcaaacucaaauuauguggggugccuggacuuagacuuauggacggaacgugggucgcgauucagacgucagaugagaccaaauggugccccccugaucaguuaguaaaucuacaugacuuucgaucagaugaaaucgaacaucuugucguggaagagcuggucaagaaaagagaagagugccuagacgcgcuggaguccaucaugaccaccaagucuguaaguuucagacgucucagucaccugaggaaacucgucccuggguuugggaaagcauauacuauauucaacaaaaccuugauggaggcugaugcucacuauaagucgguccggacuuggaacgagaucaucccuucaaaaggguguuuaagaguaggaggaagaugucauccucaugugaaugggguauuuuuuaaugguauaauauugggcccugauggccauguucugaucccagagaugcaaucgucccuccuccaacaacacauggaauuguuggaauccucagucauccccuuaaugcauccauuggcagacccgucaacaguuuucaaggauggugaugaggcggaagacuuuguugagguucaccuuccggaugugcacaaacugaucucaggggucgaccuuggucuucccagcugggggaaguauguguugaugagugcagguauucugacaacacugauguugaugaucuucuugaugacuuguugcaggaggguuaaucaagcaggaucaaaacaacaugggcucgaaggggcagggaggaagguaucugucaccucccagaacgggagggucauauccucuugggagucauauaaaaguggaggugaaaccaggcuguga

SEQ ID NO: 62777 - RNA, 1575 nt, Artificial Sequence
  derived and/or modified CDS sequence (wt) from glycoprotein__RABV__AB817107.1
auggucccgcaggcccuuuuguuugugccccuucugguguucucauuguguuucgggaaguuccccauuuacacgauaccagacaagcuugguccauggagucccauugauauacaucaucucagcuguccaaacaaucugguuguagaggaugaaggaugcaccaaccuaucaggauucuccuacauggaacucaagguaggauacaucucagccauaaaagugaacggcuucacuuguacaggugugguuacagaagcagagacuuacacuaacuucguugguuaugucacuaccacguucagaagaaagcacuuccgcccaacacccgaugcguguagggccgcauacaacuggaaaauggcuggcgaccccagauaugaagagucccugcacaauccauaccccgacuaccauuggcuucggacuguuaaaaccaccaaggagucucuuguuauaauauccccgagcguggcagauuuggacccauaugacaaaucccuucacucgagaguuuuucccggcggaaagugcucaggaauaacaguaucuucuacuuacugcucaacgaaccaugauuacaccaucuggaugccugagaauccaagacucgggacaucuugugacaucuucgucaacagcagagggaagagggcguccaaggggggcaagaccuguggguuuguagaugagagagguuuguauaagucacuaaaaggggcuugcaaacucaaauuauguggggugccuggacuuagacuuauggacggaacgugggucgcgauucagacgucagaugagaccaaauggugccccccugaucaguuaguaaaucuacaugacuuucgcucagaugaaaucgaacaucuugucguggaagagcuggucaagaaaagagaagagugccuagacgcgcuggaguccaucaugaccaccaagucuguaaguuuuagacgucucagucaccugaggaaacucgucccuggguuugggaaagcauauacuauauucaacaaaaccuugauggaggcugaugcucacuauaagucaguccggacuuggaaugagaucaucccuucaaaaggguguuuaagaguaggaggaagaugucauccucaugugaaugggguauuuuuuaaugguauaauauugggcccugauggccauguucugaucccagagaugcaaucgucccuccuccaacaacacauggaauuguuggaauccucagucauccccuuaaugcauccauuggcagacccgucaacaguuuucaaggauggugaugaggcggaagacuuuguugagguucaccuuccggaugugcacaaacugaucucaggggucgaccuuggucuucccagcugggggaaguauguguugaugagugcagguauucugauaacacugauguugaugaucuucuugaugacuuguugcaggaggguuaaucaagcaggaucaaaacaacaugggcucgaaggggcagggaggaaaguaucugucaccucccagaacgggagggucauauccuccugggagucauauaaaagcggaggugaaaccaggcuguga

SEQ ID NO: 62778 - RNA, 1575 nt, Artificial Sequence
  derived and/or modified CDS sequence (wt) from glycoprotein__RABV__AB817108.1
auggucccgcaggcccuuuuguuugugccucuucugguguucucauuguguuucgggaaguuccccauuuacacgauaccagacaagcuugguccauggagucccauugauauacaucaucucagcuguccaaacaaucugguuguagaggaugaaggaugcaccaaccuaucaggauucuccuacauggaacucaaaguaggauacaucucagccauaaaagugaacggcuucacuuguacagguguggucacagaagcagagacuuacacuaacuucguugguuaugucacuaccacguucagaagaaagcacuuccgcccaacacccgaugcguguagggccgcauacaacuggaaaauggcuggcgaccccagauaugaagagucccugcacaauccauaccccgacuaccauuggcuucggacuguuaaaaccaccaaggagucucuuguuauaauaucuccgagcguggcagauuuggacccauaugacaaaucccuucacucgagaguuuuucccggcggaaagugcucaggaauaacaguaucuucuacuuacugcucaacgaaccacgauuacaccaucuggaugccugagaauccaagacucgggacaucuugugacaucuucgucaacagcagagggaagagggcguccaaggggggcaagaccuguggguuuguagaugagagagguuuguauaagucacuaaaaggggcuugcaaacucaaauuauguggugugccuggacuuagacuuauggacggaacgugggucgcgauucagacgucagaugagaccaaauggugccccccugaucaguuaguaaaucuacaugacuuucgcucagaugaaaucgaacaucuugucguggaagagcuggucaagaaaagagaagagugccuagacgcgcuggaguccaucaugaccaccaagucuguaaguuucagacgucucagucaccugaggaaacucgucccuggguucgggaaagcauauacuauauucaacaaaacuuugauggaggcugaugcucacuauaagucggucaggacuuggaacgagaucaucccuucaaaaggguguuuaagaguaggaggaagaugucauccucaugugaaugggguauuuuuuaaugguauaauauugggcccugauggccauguucugaucccagagaugcaaucgucccuccuccaacaacacauggaauuguuggaauccucagucauccccuuaaugcauccauuggcagacccgucaacagucuucaaggauggugaugaggcggaagacuuuguugagguucaccuuccggaugugcacaaacugaucucaggggucgaccuuggucuucccagcugggggaaguauguguugaugagugcagguauucugauaacacugauguugaugaucuucuugaugacuuguugcaggaggguuaaucaagcaggaucaaaacaacaugggcucgaaggggcagggaggaaaguaucugucaccucccagaacgggagggucauauccuccugggagucauauaaaagcggaggugaaaccaggcuguga

SEQ ID NO: 62779 - RNA, 1575 nt, Artificial Sequence
  derived and/or modified CDS sequence (wt) from glycoprotein__RABV__AB817109.1
auggucccgcaggcccuuuuguuugugccucuucugguguucucauuguguuucgggaaguuccccauuuacacgauaccagacaagcuugguccauggagucccauugauauacaucaucucagcuguccaaacaaucugguuguagaggaugaaggaugcaccaaccuaucaggauucuccuacauggaacucaaaguaggauacaucucagccauaaaagugaacggcuucacuuguacagguguggucacagaagcagagacuuacacuaacuucguugguuaugucacuaccacguucagaagaaagcacuuccgcccaacacccgaugcguguagggccgcauacaacuggaaaauggcuggcgaccccagauaugaagagucccuacacaauccauaccccgacuaccauuggcuucggacuguuaaaaccaccaaggagucucuuguuauaauauccccgagcguggcagauuuggacccauaugacaaaucccuucacucgagaguuuuucccggcggaaagugcucaggaauaacaguaucuucuacuuacugcucaacgaaccaugauuacaccaucuggaugccugagaauccaagacucgggacaucuugugacaucuucgucaacagcagagggaagagggcguccaaggggggcaagaccuguggguuuguagaugagagagguuuguauaagucacuaaaaggggcuugcaaacucaaauuauguggugugccuggacuuagacuuauggacggaacgugggucgcgauucagacgucagaugagaccaaauggugccccccugaucaguugguaaaucuacaugacuuucgcucagaugaaaucgaacaucuuguuguggaagagcuggucaagaaaagagaagagugccuagacgcgcuggaguccaucaugaccaccaagucuguaaguuucagacgucucagucaccugaggaaacuagucccuggguucgggaaagcauauacuauauucaacaaaaccuugauggaggcugaugcucacuauaagucgguccggacuuggaacgagaucaucccuucaaaaggguguuuaagaguaggaggaagaugucauccucaugugaaugggguauuuuuuaaugguauaauauugggcccugauggccauguucugaucccagagaugcaaucgucccuccuccaacaacacauggaauuguuggaauccucagucauccccuuaaugcauccauuggcagacccgucaacaguuuucaaggauggugaugaggcggaagacuuuguugagguucaccuuccggaugugcacaaacugaucucaggggucgaccuuggucuucccagcugggggaaguauguguugaugagugcagguauucugauaacacugauguugaugaucuucuugaugacuuguugcaggaggguuaaucaagcaggaucaaaacaacaugggcucgaaggggcagggaggaaaguaucugucaccucccagaacgggagggucauauccuccugggagucauauaaaagcggaggugaaaccaggcuguga

SEQ ID NO: 62780 - RNA, 1575 nt, Artificial Sequence
  derived and/or modified CDS sequence (wt) from glycoprotein__RABV__AB817110.1
auggucccgcaggcccuuuuguuugugccucuucugguguucucauuguguuucgggaaguucccuauuuacacgauaccagacaagcuugguccauggagucccauugauauacaucaucucagcuguccaaacaaucugguuguagaggaugaaggaugcaccaaucuaucaggauucuccuauauggaacucaaaguaggauacaucucagccauaaaagugaacggcuucacuuguacaggugugguuacagaggcagagacuuacacuaacuucguugguuauguaacuaccacguucagaagaaagcacuuccgcccaacacccgaugcguguagggccgcauacaacuggaaaauggcuggcgaccccagauaugaagagucccugcacaauccauaccccgacuaccauuggcuucggacuguuaaaaccaccaaggagucucuuguuauaauauccccgagcguggcagauuuggacccauaugacaaaucccuucacucgagaguuuuucccggcggaaagugcucaggaauaacaguaucuucuacuuacugcucaacuaaccaugauuacaccaucuggaugccugagaauccaagacucgggacaucuugugacaucuuugucaacagcagagggaagagggcguccaaggggggcaagaccuguggguuuguagaugagagagguuuguauaagucacuaaaaggggcuugcaaacucaaauuauguggggugccuggacuuagacuuauggacggaacgugggucgcgauucagacgucagaugagaccaaauggugccccccugaucaguuaguaaaucuacaugacuuucgcucagaugaaaucgaacaucuugucguggaagaguuggucaagaaaagagaagagugccuagacgcgcuggaguccaucaugaccaccaagucuguaaguuucagacgucucagucaccugaggaaacucgucccuggguuugggaaagcauauacuauauucaacaaaaccuugauggaggcugaugcucacuauaagucgguccggacuuggaacgagaucaucccuucaaaaggguguuuaagaguaggaggaagaugucauccucacgugaaugggguauuuuucaaugguauaauauugggcccugauggccauguucuuaucccagagaugcaaucgucccuccuccaacaacacauggaauuguuggaauccucagucaucccauuaaugcauccauuggcagacccgucaacaguuuucaaggauggugaugaggcggaagacuuuguugagguucaccuuccggaugugcacaaacugaucucaggggucgaccuuggucuucccagcugggggaaguauguguugauaagugcagguauucugauaacacugauguugaugaucuucuugaugacuuguugcaggaggguuaaucaagcaggaucaaaacaacaugggcucgaaggggcaggaaggaaaguaucugucaccucccagaacgggagggucauauccuccugggagucauauaaaaacggaggugaaaccaggcuguga

SEQ ID NO: 62781 - RNA, 1575 nt, Artificial Sequence
  derived and/or modified CDS sequence (wt) from glycoprotein__RABV__AB817111.1
auggucccgcaggcccuuuuguuugugccucuucugguguucucauuguguuucgggaaguuccccauuuacacgauaccagacaagcuugguccauggagucccauugauauacaucaucucagcuguccaaacaaucugguuguagaggaugaaggaugcaccaaccuaucaggauucuccuacauggaacucaaaguaggauacaucucagccauaaaagugaacggcuucacuuguacagguguggucacagaagcagagacuuacacuaacuucguugguuaugucacuaccacguucagaagaaagcacuuccgcccaacacccgaugcguguagggccgcauacaacuggaaaauggcuggcgaccccagauaugaagagucccugcacaauccauaccccgacuaccauuggcuucggacuguuaaaaccaccaaggagucucuuguuauaauaucuccgagcguggcagauuuggacccauaugacaaaucccuucacucgagaguuuuucccggcggaaagugcucaggaauaacaguaucuucuacuuacugcucaacgaaccacgauuacaccaucuggaugccugagaauccaagacucgggacaucuugugacaucuucgucaacagcagagggaagagggcguccaaggggggcaagaccuguggguuuguagaugagagagguuuguauaagucacuaaaaggggcuugcaaacucaaauuauguggugugccuggacuuagacuuauggacggaacgugggucgcgauucagacgucagaugagaccaaauggugccccccugaucaguuaguaaaucuacaugacuuucgcucagaugaaaucgaacaucuugucguggaagagcuggucaagaaaagagaagagugccuagacgcgcuggaguccaucaugaccaccaagucuguaaguuucagacgucucagucaccugaggaaacucgucccuggguucgggaaagcauauacuauauucaacaaaacuuugauggaggcugaugcucacuauaagucggucaggacuuggaacgagaucaucccuucaaaaggguguuuaagaguaggaggaagaugucauccucaugugaaugggguauuuuuuaaugguauaauauugggcccugauggccauguucugaucccagagaugcaaucgucccuccuccaacaacacauggaauuguuggaauccucagucauccccuuaaugcauccauuggcagacccgucaacagucuucaaggauggugacgaggcggaagacuuuguugagguucaccuuccggaugugcacaaacugaucucaggggucgaccuuggucuucccagcugggggaaguauguguugaugagugcagguauucugauaacacugauguugaugaucuucuugaugacuuguugcaggaggguuaaucaagcaggaucaagacaacaugagcucgaaggggcagggaggaaaguaucugucaccucccagaacgggagggucauauccuccugggagucauauaaaagcggaggugaaaccaggcuguga

SEQ ID NO: 62782 - RNA, 1575 nt, Artificial Sequence
  derived and/or modified CDS sequence (wt) from glycoprotein__RABV__AB817112.1
auggucccgcaggcccuuuuguuugugccucuucugguguucucauuguguuucgggaaguucccuauuuacacgauaccagacaagcuugguccauggagucccauugauauacaucaucucagcuguccaaacaaucugguuguagaggaugaaggaugcaccaaucuaucaggauucuccuauauggaacucaaaguaggauacaucucagccauaaaagugaacggcuucacuuguacaggugugguuacagaggcagagacuuacacuaacuucguugguuauguaacuaccacguucagaagaaagcacuuccgcccaacacccgaugcguguagggccgcauacaacuggaaaauggcuggcgaccccagauaugaagagucccugcacaauccauaccccgacuaccauuggcuucggacuguuaaaaccaccaaggagucucuuguuauaauauccccgagcguggcagauuuggacccauaugacaaaucccuucacucgagaguuuuucccggcggaaagugcucaggaauaacaguaucuucuacuuacugcucaacuaaccaugauuacaccaucuggaugccugagaauccaagacucgggacaucuugugacaucuuugucaacagcagagggaagagggcguccaaggggggcaagaccuguggguuuguagaugagagagguuuguauaagucacuaaaaggggcuugcaaacucaaauuauguggggugccuggacuuagacuuauggacggaacgugggucgcgauucagacgucagaugagaccaaauggugccccccugaucaguuaguaaaucuacaugacuuucgcucagaugaaaucgaacaucuugucguggaggaguuggucaagaaaagagaagagugccuagacgcgcuggaguccaucaugaccaccaagucuguaaguuucagacgucucagucaccugaggaaacucgucccuggguuugggaaagcauauacuauauucaacaaaaccuugauggaggcugaugcucacuauaagucgguccggacuuggaacgagaucaucccuucaaaaggguguuuaagaguaggaggaagaugucauccucacgugaaugggguauuuuuuaaugguauaauauugggcccugauggccauguucuuaucccagagaugcaaucgucccuccuccaacaacacauggaauuguuggaauccucagucaucccauuaaugcauccauuggcagacccgucaacaguuuucaaggauggugaugaggcggaagacuuuguugagguucaccuuccggaugugcacaaacugaucucaggggucgaccuuggucuucccagcugggggaaguauguguugauaagugcagguauucugauaacacugauguugaugaucuucuugaugacuuguugcaggaggguuaaucaagcaggaucaaaacaacaugggcucgaaggggcaggaaggaaaguaucugucaccucccagaacgggagggucauauccuccugggagucauauaaaaacggaggugaaaccaggcuguga

SEQ ID NO: 62783 - RNA, 1575 nt, Artificial Sequence
  derived and/or modified CDS sequence (wt) from glycoprotein__RABV__AB817113.1
auggucccgcaggcccuuuuguuugugccucuucugguguucucauuguguuucgggaaguuccccauuuacacgauaccagacaagcuugguccauggagucccauugauguacaucaucucagcuguccaaacaaucugguuguagaggaugaaggaugcaccaaccugucaggauucuccuacauggaacucaaaguaggauacaucucagccauaaaagugaacggcuucacuuguacaggugugguuacagaggcagagacuuauacuaaccuuguugguuaugucacuaccacguucagaagaaagcacuuccgcccaacaccagaugcguguagggccucauacaacuggaaaauggcuggcgaccccagauaugaagagucccugcacaauccauaucccgacuaccauuggcuucggacuguuaaaaccaccaaggagucucuuguuauaauauccccgagcguggcagauuuggacccauaugacaaaucccuucacucgagaguuuuucccggcggaaagugcucaggaauaacaguaucuucuacuuacugcucaacuaaccaugauuacaccaucuggaugccugagaauccaagacucgggacaucuugugacaucuucgucaacagcagagggaagagggcguccaaggggggcaagacuuguggguuuguagaugagagagguuuguauaagucacuaaaaggggcuugcaaacucaaauuauguggggugccuggacuuagacuuauggacggaacgugggucgcgauucagacgucagaugagaccaaauggugcccccccgaucaguuaguaaaucuacaugacuuucgcucagaugaaaucgaacaucuugucguggaagagcuggucaagaaaagagaagagugccuagacgcgcuggaguccaucaugaccaccaagucuguaaguuucagacgucucagucaccugaggaaacucgucccuggguuugggaaagcauauacuauauucaacaaaaccuugauggaggcugaugcucacuauaagucgguccggacuuggaacgagaucaucccuucaaaaggguguuugagaguaggaggaagaugucauccucaugugaaugggguauuuuuuaaugguauaauauugggcccugauggccauguucugaucccagagaugcaaucgucccuccuccaacaacacauggaauuguuggaauccucagucauccccuuaaugcauccauuggcagacccgucaacaguuuucaaggauggugaugaggcggaagacuuuguugagguucaccuuccggaugugcacaaacugaucucaggggucgaccuuggucuucccagcugggggaaguauguguugaugagugcaggcauucugacaacacugauguugaugaucuucuugaugacuuguugcaggaggguuaaucaagcaggaucaaaacaacacgggcucgaaggggcagggaggaaaguaucugucaccucccagaacgggagggucauauccuccugggagucauauaaaagcggaggugaaaccaggcuguga

SEQ ID NO: 62784 - RNA, 1575 nt, Artificial Sequence
  derived and/or modified CDS sequence (wt) from glycoprotein__RABV__AB817114.1
auggucccgcaggcccuuuuguuugugccucuucugguguucucauuguguuucgggaaguuccccauuuacacgauaccagacaagcuugguccauggagucccauugauauacaucaucucagcuguccaaacaaucugguuguagaggaugaaggaugcaccaaccuaucaggauucuccuacauggaacucaaaguaggauacaucucagccauaaaagugaacggcuucacuuguacaggugugguuacagaggcagagacuuacacuaacuucguugguuaugucacuaccacguucagaagaaagcacuuccgcccaacacccgaugcguguagggccgcauacaacuggaaaauggcuggcgaccccagauaugaagagucccugcacaauccauaccccgacuaccauuggcuucggacuguuaagaccaccaaggagucucuuguuauaauauccccgagcguggcagauuuggacccauaugacaaaucccuucacucgagaguuuuucccggcggaaagugcucaggaauaacaguaucuucuacuuacugcucaacuaaccaugauuacaccaucuggaugccugagaauccaagacucgggacaucuugugacaucuucgucaacagcagagggaagagggcguccaaggggggcaagacuuguggguuuguagaugagagagguuuguauaagucacuaaaaggggcuugcaaacucaaauuauguggggugccuggacuuagacuuauggacggaacgugggucgcgauucagacgucagaugagaccaaauggugccccccugaucaguuaguaaaucuacaugacuuucgcucagaugaaaucgaacaucuugucguggaagagcuggucaagaaaagagaagagugccuagacgcgcuggaguccaucaugaccaccaagucuguaaguuucagacgucucagucaccugaggaaacucgucccuggguuugggaaagcauauacuauauucaacaaaaccuugauggaggcugaugcccacuauaagucgguccggacuuggaacgagaucaucccuucaaaaggguguuugagaguaggaggaagaugucauccucaugugaaugggguauuuuucaaugguauaauauugggcccugauggccauguucugaucccagagaugcaaucgucccuccuccaacaacacauggaauuguuggaauccucagucauccccuuaaugcauccauuagcagacccgucaacaguuuucaaggauggugaugaggcggaagacuuuguugagguucaccuuccggaugugcacaaacugaucucaggggucgaccuuggucuucccagcugggggaaguauguguugaugagugcagguauucugacaacacugauguugaugaucuucuugaugacuuguugcaggaggguuaaucaagcaggaucaaaacaacaugggcuggaaagggcagggaggaaaguaucugucaccucccagaacgggagggucauauccuccugggagucauauaaaagcggaggugaaaccaggcuguga

SEQ ID NO: 62785 - RNA, 1575 nt, Artificial Sequence
  derived and/or modified CDS sequence (wt) from glycoprotein__RABV__AB817115.1
auggucccgcaggcccuuuuguuugugccucuucugguguucucauuguguuucgggaaguuccccauuuacacgauaccagacaagcuugguccauggagucccauugauauacaucaucucagcugcccaaacaaucugguuguagaggaugaaggaugcaccaaccuaucaggauucuccuacauggaacucaaaguaggauacaucucagccauaaaagugaacggcuucacuuguacaggugugguuacagaggcagagacuuacacuaacuucguugguuaugucacuaccacguucagaagaaagcacuuccgcccaacacccgaugcguguagggccgcauacaacuggaaaauggcuggcgaccccagauaugaagagucccugcacaauccauaccccgacuaccauuggcuucggacuguuaaaaccaccaaggagucucuuguuauaauauccccgagcguggcagauuuggacccauaugacaaaucccuucacucgagaguuuuucccggcggaaagugcucaggaauaacaguaucuucuacuuacugcucaacuaaccaugauuacaccaucuggaugccugagaauccaagacucgggacaucuugugacauauucgucaacagcagagggaagagggcguccaaggggggcaagaccuguggguuuguagaugagagagguuuguauaagucacuaaaaggggcuugcaaacucaaauuauguggggugccuggacuuagacuuauggacggaacgugggucgcgauucagacgucagaugagaccaaauggugccccccugaucaguuaguaaaucuacaugacuuucgaucagaugaaaucgaacaucuugucguggaagagcuggucaagaaaagagaagagugccuagacgcgcuggaguccaucaugaccaccaagucuguaaguuucagacgucucagucaccugaggaaacucgucccuggguuugggaaagcauauacuauauucaacaaaaccuugauggaggcugaugcucacuauaagucgguccggacuuggaacgagaucaucccuucaaaaggguguuuaagaguaggaggaagaugucauccucaugugaaugggguauuuuuuaaugguauaauauugggcccugauggccauguucugaucccagagaugcaaucgucccuccuccaacaacacauggaauuguuggaauccucagucauccccuuaaugcauccauuggcagacccgucaacaguuuucaaggauggugaugaggcggaagacuuuguugagguucaccuuccggaugugcacaaacugaucucaggggucgaccuuggucuucccggcugggggaaguauguguugaugagugcagguauucugacaacacugauguugaugaucuucuugaugacuuguugcaggaggguuaaucaagcaggaucaaaacaacaugggcucgaaggggcagggaggaagguaucugucaccucccagaacgggagggucauauccucuugggagucauauaaaaguggaggugaaaccaggcuguga

SEQ ID NO: 62786 - RNA, 1575 nt, Artificial Sequence
  derived and/or modified CDS sequence (wt) from glycoprotein__RABV__AB817116.1
auggucccgcaggcccuuuuguuugugccucuucugguguucucauuguguuucgggaaguuccccauuuacacgauaccagacaagcuugguccauggagucccauugauauacaucaucucagcuguccaaacaaucugguuguagaggaugaaggaugcaccaaccuaucaggauucuccuacauggaacucaaaguaggauacaucucagccauaaaagugaacggcuucacuuguacagguguggucacagaagcagagacuuacacuaacuucguugguuaugucacuaccacguucagaagaaagcacuuccgcccaacacccgaugcguguagggccgcauacaacuggaaaauggcuggcgaccccagauaugaagagucccugcacaauccauaccccgacuaccauuggcuucggacuguuaaaaccaccaaggaaucucuuguuauaauaucuccgagcguggcagauuuggacccauaugacaaaucccuucacucgagaguuuuucccggcggaaagugcucaggaauaacaguaucuucuacuuacugcucaacgaaccacgauuacaccaucuggaugccugagaauccaagacucgggacaucuugugacaucuucgucaacagcagagggaagagggcguccaaggggggcaagaccuguggguuuguagaugagagagguuuguauaagucacuaaaaggggcuugcaaacucaaauuauguggugugccuggacuuagacuuauggacggaacgugggucgcgauucagacgucagaugagaccaaauggugccccccugaucaguuaguaaaucuacaugacuuucgcucagaugaaaucgaacaucuugucguggaagagcuggucaagaaaagagaagagugccuagacgcgcuggaguccaucaugaccaccaagucuguaaguuucagacgucucagucaccugaggaaacucgucccuggguucgggaaagcauauacuauauucaacaaaacuuugauggaggcugaugcucacuauaagucggucaggacuuggaacgagaucaucccuucaaaaggguguuuaagaguaggaggaagaugucauccucaugugaaugggguauuuuuuaaugguauaauauugggcccugauggccauguucugaucccagagaugcaaucgucccuccuccaacaacacauggaauuguuggaauccucagucauccccuuaaugcauccauuggcagacccgucaacagucuucaaggauggugaugaggcggaagacuuuguugagguucaccuuccggaugugcacaaacugaucucaggggucgaccuuggucuucccagcugggggaaguauguguugaugagugcagguauucugauaacacugauguugaugaucuucuugaugacuuguugcaggaggguuaaucaagcaggaucaaaacaacaugggcucgaaggggcagggaggaaaguaucugucaccucccagaacgggagggucauauccuccugggagucauauaaaagcggaggugaaaccaggcuguga

SEQ ID NO: 62787 - RNA, 1575 nt, Artificial Sequence
  derived and/or modified CDS sequence (wt) from glycoprotein__RABV__AB817117.1
auggucccgcaggcccuuuuguuugugccucuucugguguucucauuguguuucgggaaguuccccauuuacacgauaccagacaagcuugguccauggagucccauugauauacaucaucucagcuguccaaacaaucugguuguagaggaugaaggaugcaccaaccuaucaggauucucuuacauggaacucaaaguaggauacaucucagccauaaaagugaacggcuucacuuguacaggugugguuacagaggcagagacuuacaccaacuucguugguuaugucacuaccacguucagaagaaagcacuuccgcccaacacccgaugcguguagggccgcauacaacuggaaaauggcuggcgaccccagauaugaagaguccuuacacaauccauaccccgacuaccauuggcuucggacuguuaaaaccaccaaggagucucuuguuauaauauccccgagcguggcagauuuggacccauaugacaaaucccuccacucgagaguuuuucccggcggaaagugcucaggaauaacaguaucuucuacuuacugcucaacuaaccaugauuacaccaucuggaugccugagaauccaagacucgggacaucuugugacaucuucgucaauagcagagggaagagggcguccaaggggggcaagaccuguggguuuguagaugagagagguuuguauaagucacuaaaaggggcuugcaaacucaaauuauguggggugccuggacuuagacuuauggacggaacgugggucgcgauucagacgucagaugagaccaaauggugucccccugaucaguuagugaaucuacaugacuuucgcucagaugaaaucgaacaucuuguuguggaagagcuggucaagaaaagagaagagugccuagacgcgcuggaguccaucaugaccaccaagucuguaaguuucagacgucucagucaccugaggaaacucgucccuggguuugggaaagcauauacuauauucaacaaaaccuugauggaggcugaugcucacuauaagucgguccggacuuggaacgagaucaucccuucaaaaggguguuuaagaguaggaggaagaugucauccucaugugaaugggguauuuuuuaaugguauaauauugggcccugauggccauguucugaucccagagaugcaaucgucccuccuccaacaacacauggaauuguuggaauccucagucauccccuuaaugcauccauuggcagacccgucaacaguuuucaaggauggugaugaggcggaagacuuuguugagguucaccuuccggaugugcacaaacugaucucaggggucgaccuuggucuucccagcugggggaaguauguguugaugagugcagguauucugacgacacugauguugaugaucuucuugaugacuuguugcaggaggguuaaucaagcaggaucaaaacaacaugggcucgaaggggcagggaggaaaguaucugucaccucccagaccgggaggaucauauccuccugggagucauauaaaagcggaggugaaaccagacuguga

SEQ ID NO: 62788 - RNA, 1575 nt, Artificial Sequence
  derived and/or modified CDS sequence (wt) from glycoprotein__RABV__AB817118.1
auggucccgcaggcccuuuuguuugugccucuucugguguucucauuguguuucgggaaguuccccauuuacacgauaccagacaagcuugguccauggagucccauugauauacaucaucucagcugcccaaacaaucugguuguagaggaugaaggaugcaccaaccuaucaggauucuccuacauggaacucaaaguaggauacaucucagccauaaaagugaacggcuucacuuguacagguguggucacagaagcagagacuuacacuaacuucguugguuaugucacuaccacguucagaagaaagcacuuccgcccaacacccgaugcguguagggccgcauacaacuggaaaauggcuggcgaccccagauaugaagagucccugcacaauccauaccccgacuaccauuggcuucggacuguuaaaaccaccaaggagucucuuguuauaauaucuccgagcguggcagauuuggacccauaugacaaaucccuucacucgagaguuuuucccggcggaaagugcucaggaauaacaguaucuucuacuuacugcucaacgaaccaugauuacaccaucuggaugccugagaauccaagacucgggacaucuugugacaucuucgucaacagcagagggaagagggcguccaaggggggcaagaccuguggguuuguagaugagagagguuuguauaagucacuaaaaggggcuugcaaacucaaauuauguggugugccuggacuuagacuuauggacggaacgugggucgcgauucagacgucagaugagaccaaauggugccccccugaucaguuaguaaaucuacaugacuuucgcucagaugaaaucgaacaucuugucguggaagagcuggucaagaaaagagaagagugccuagacgcgcuggaguccaucaugaccaccaagucuguaaguuucagacgccucagucaccugaggaaacucgucccuggguucgggaaagcauauacuauauucaacaaaacuuugauggaggcugaugcucacuauaagucgguccggacuuggaacgagaucaucccuucaaaaggguguuuaagaguaggaggaagaugucauccucaugugaaugggguauuuuuuaaugguauaauauugggcccugauggccauguucugaucccagagaugcaaucgucccuccuucaacaacacauggaauuguuggaauccucagucauccccuuaaugcauccauuggcagacccgucaacaguuuucaaggauggugaugaggcggaagacuuuguugagguucaccuuccggaugugcacaaacugaucucaggggucgaccuuggucuucccagcugggggaaguauguguugaugagugcagguauucugauaacacugauguugaugaucuucuugaugacuuguugcaggaggguuaaucaagcaggaucaaaacaacaugggcucgaaggggcagggaggaaaguauccgucaccucccagaacgggagggucauauccuccugggagucauacaaaagcggaggugaaaccaggcuguga

SEQ ID NO: 62789 - RNA, 1575 nt, Artificial Sequence
  derived and/or modified CDS sequence (wt) from glycoprotein__RABV__AB817119.1
auggucccgcaggcccuuuuguuugugccucuucugguguucucauuguguuucgggaaguuccccauuuacacgauaccagacaagcuugguccauggagucccauugauauacaucaucucagcuguccaaacaaucugguuguagaggaugaaggaugcaccaaccugucaggauucuccuacauggaacucaaaguaggauacaucucagccauaaaagugaacggcuucacuuguacaggugugguuacagaggcagagacuuauacuaacuuuguugguuaugucacuaccacguucagaagaaagcacuuccgcccaacacccgaugcguguagggccgcauacaacuggaaaauggcuggcgaccccagauaugaagagucccugcacaauccauacccugacuaccauuggcuucggacuguuaaaaccaccaaggagucucuuguuauaauauccccgagcguggcagauuuggacccauaugacaaaucccuucacucgagaguuuuucccggcggaaagugcucaggaauaacaguaucuucuacuuacugcucaacuaaccaugauuacaccaucuggaugccugagaauccaagacucgggacaucuugugacaucuucgucaacagcagagggaagagggcguccaaggggggcaagacuuguggauuuguagaugagagaggucuguauaagucacuaaaaggggcuugcaaacucaaauuauguggggugccuggacuuagacuuauggacggaacgugggucgcgauucagacgucagaugagaccaaauggugccccccugaucaguuaguaaaucuacaugacuuucgcucagaugaaaucgaacaucuugucguggaagagcuggucaagaaaagagaagagugccuagacgcgcuggaguccaucaugaccaccaagucuguaaguuucagacgucucagucaccugaggaaacucgucccuggguuugggaaagcauauacuauauucaacaaaaccuugauggaggcugaugcucacuauaagucgguccggacuuggaacgagaucaucccuucaaaaggguguuugagaguaggaggaagaugucauccucaugugaaugggguauuuuuuaaugguauaauauugggcccugauggccauguucugaucccagagaugcaaucgucccuccuccaacaacacauggaauuguuggaauccucagucauccccuuaaugcauccauuggcagacccgucaacaguuuucaaggauggugaugaggcggaagacuuuguugagguucaccuuccggaugugcacaaacugaucucaggggucgaccuuggucuucccagcugggggaaguauguguugaugagugcagguauucugacaacacugauguugaugaucuucuugaugacuuguugcaggaggguuaaucaagcaggaucaaaacaacaugggcucgaaggggcagggaggaaaguaucugucaccucccagaacgggagggucauauccuccugggagucauauaaaagcggaggugaaaccaggcuguga

SEQ ID NO: 62790 - RNA, 1575 nt, Artificial Sequence
  derived and/or modified CDS sequence (wt) from glycoprotein__RABV__AB817120.1
auggucccgcaggcccuuuuguuugugccucuucugguguucucauuguguuucgggaaguuccccauuuacacgauaccagacaagcuugguccauggagucccauugauauacaucaucucagcuguccaaacaaucugguuguagaggaugaaggaugcaccaaccuaucaggauucuccuacauggaacucaaaguaggauacaucucagccauaaaagugaacggcuucacuuguacagguguggucacagaagcagagacuuacacuaacuucguugguuaugucacuaccacguucagaagaaagcacuuccgcccaacacccgaugcguguagggccgcauacaacuggaaaauggcuggcgaccccagauaugaagagucccugcacaauccauaccccgacuaccauuggcuucggacuguuaaaaccaccaaggagucucuugugauaauaucuccgagcguggcagauuuggacccauaugacaaaucccuucacucgagaguuuuucccggcggaaagugcucaggaauaacaguaucuucuacuuacugcucaacgaaccacgauuacaccaucuggaugccugagaauccaagacucgggacaucuugugacaucuucgucaacagcagagggaagagggcguccaaggggggcaagaccuguggguuuguagaugagagagguuuguauaagucacuaaaaggggcuugcaaacucaaauuauguggugugccuggacuuagacuuauggacggaacgugggucgcgauucagacgucagaugagaccaaauggugccccccugaucaguuaguaaaucuacaugacuuucgcucagaugaaaucgaacaucuugucguggaagagcuggucaagaaaagagaagagugccuagacgcgcuggaguccaucaugaccaccaagucuguaaguuucagacgucucagucaccugaggaaacucgucccuggguucgggaaagcauauacuauauucaacaaaacuuugauggaggcugaugcucacuauaagucggucaggacuuggaacgagaucaucccuucaaaaggguguuuaagaguaggaggaagaugucauccucaugugaaugggguauuuuuuaaugguauaauauugggcccugauggccauguucugaucccagagaugcaaucgucccuccuccaacaacacauggaauuguuggaauccucagucauccccuuaaugcauccauuggcagacccgucaacagucuucaaggauggugacgaggcggaagacuuuguugagguucaccuuccggaugugcacaaacugaucucaggggucgaccuuggucuucccagcugggggaaguauguguugaugagugcagguauucugauaacacugauguugaugaucuucuugaugacuuguugcaggaggguuaaucaagcaggaucaaaacaacaugggcucgaaggggcagggaggaaaguaucugucaccucccagaacgggagggucauauccuccugggagucauauaaaagcggaggugaaaccaggcuguga

SEQ ID NO: 62791 - RNA, 1575 nt, Artificial Sequence
  derived and/or modified CDS sequence (wt) from glycoprotein__RABV__AB817121.1
auggucccgcaggcccuuuuguuugugccucuucugguguucucauuguguuucgggaaguuccccauuuacacgauaccagacaagcuugguccauggagucccauugauauacaucaucucagcuguccaaacaaucugguuguagaggaugaaggaugcaccaaccuaucaggauuuuccuacauggaacucaaaguaggauacaucucagccauaaaagugaacggcuucacuuguacaggugugguuacagaggcagagacuuacacuaacuucguugguuaugucacuaccacguucagaagaaagcacuuccgcccaacacccgaugcguguagggccgcauacaacuggaaaauggcuggcgaccccagauaugaagagucccugcacaauccauaccccgacuaccauuggcuucggacuguuaaaaccaccaaggagucucuuguuauaauauccccgagcguggcagauuuggacccauaugacaaaucccuucacucgagaguuuuucccggcggaaagugcucaggaauaacaguaucuucuacuuacugcucaacgaaccaugauuacaccaucuggaugccugagaauccaagacucgggacaucuugugacaucuucgucaacagcagagggaagagggcguccaaggggggcaagaccuguggguuuguagaugagagagguuuguauaaaucacuaaaaggggcuugcaaacucaaauuauguggggugccugggcuuagacuuauggacggaacgugggucgcgauucagacgucugaugagaccaaauggugccccccugaucaguuaguaaaucuacaugacuuucgcucagaugaaaucgaacaucuugucguggaagagcuggucaagaaaagagaagagugccuagacgcgcuggaguccaucaugaccaccaagucuguaaguuucagacgucucagucaccugaggaaacucgucccuggguuugggaaagcauauacuauauucaacaaaaccuugauggaggcugaugcucacuauaagucgguccggacuuggaaugagaucaucccuucaaaaggguguuuaagaguaggaggaagaugucauccucaugugaaugggguauuuuuuaaugguauaauauugggcccugauggccauguucugaucccagagaugcaaucgucccuccuccaacaacacauggaauuguuggaauccucagucauccccuuaaugcauccauuggcagacccgucaacaguuuucaaggauggugaugaggcggaagacuuuguugagguucaccuuccggaugugcacaaacugaucucaggggucgaccuuggucuucccagcugggggaaguauguguugaugagugcagguauucugauaacacugauguugaugaucuucuugaugacuuguugcaggaggguuaaucaagcaggaucaaaacaacaugggcucgaaggggcagggaggaaaguaucugucaccucccagaacgggagggucauauccuccugggagucauauaaaagcggaggugaaaccaggcuguga

SEQ ID NO: 62792 - RNA, 1575 nt, Artificial Sequence
  derived and/or modified CDS sequence (wt) from glycoprotein__RABV__AB817122.1
auggucccgcaggcccuuuuguuugugccucuucugguguucucauuguguuucgggaaguuccccauuuacacgauaccagacaagcuugguccauggagucccauugauauacaucaucucagcuguccaaacaaucuaguuguagaggaugaaggaugcaccaaccuaucaggauucucuuacauggaacucaaaguaggauacaucucagccauaaaagugaacggcuucacuuguacaggugugguuacagaggcagagacuuacaccaacuucguugguuaugucacuaccacguucagaagaaagcacuuccgcccaacacccgaugcguguagggccgcauacaacuggaaaauggcuggcgaccccagauaugaagaguccuugcacaauccauaccccgacuaccauuggcuucggacuguuaaaaccaccaaggagucucuuguuauaauauccccgagcguggcagauuuggacccauaugacaaaucccuccacucgagaguuuuucccggcggaaagugcucaggaauaacaguaucuucuacuuacugcucaacuaaccaugauuacaccaucuggaugccugagaauccaagacucgggacaucuugugacaucuucgucaauagcagagggaagagggcguccaaggggggcaagaccuguggguuuguagaugagagagguuuguauaagucacuaaaaggggcuugcaaacucaaauuauguggggugccuggacuuagacuuauggacggaacgugggucgcgauucagacgucagaugagaccaaauggugucccccugaucaguuagugaaucuacaugacuuucgcucagaugaaaucgaacaucuuguuguggaagagcuggucaagaaaagagaagagugccuagacgcgcuggaguccaucaugaccaccaagucuguaaguuucagacgucucagucaccugaggaaacucgucccuggguuugggaaagcauauacuauauucaacaaaaccuugauggaggcugaugcucacuauaagucgguccggacuuggaacgagaucaucccuucaaaaggguguuuaagaguaggaggaagaugucauccucaugugaaugggguauuuuuuaaugguauaauauugggcccugauggccauguucugaucccagagaugcaaucgucccuccuccaacaacacauggaauuguuggaauccucagucauccccuuaaugcauccauuggcagacccgucaacaguuuucaaggauggugaugaggcggaagacuuuguugagguucaccuuccggaugugcacaaacugaucucaggggucgaccuuggucuucccagcugggggaaguauguguugaugagugcagguauucugacgacacugauguugaugaucuucuugaugacuuguugcaggaggguuaaucaagcaggaucaaaacaacaugggcucgaaggggcagggaggaaaguaucugucaccucccagaacgggaggaucauauccuccugggagucauauaaaagcggaggugaaaccagacuguga

SEQ ID NO: 62793 - RNA, 1575 nt, Artificial Sequence
  derived and/or modified CDS sequence (wt) from glycoprotein__RABV__AB817123.1
auggucccgcaggcccuuuuguuugugccucuucugguguucucauuguguuucgggaaguuccccauuuacacgauaccagacaagcuugguccauggagucccauugauauacaucaucucagcuguccaaacaaucugguuguagaggaugaaggaugcaccaaccuaucaggauucuccuacauggaacucaaaguaggauacaucucagccauaaaagugaacggcuucacuuguacagguguggucacagaagcagagacuuacacuaacuucguugguuaugucacuaccacguucagaagaaagcacuuccgcccaacacccgaugcguguagggccgcauacaacuggaaaauggcuggcgaccccagauaugaagagucccugcacaauccauaccccgacuaccauuggcuucggacuguuaaaaccaccaaggagucucuuguuauaauaucuccgagcguggcagauuuggacccauaugacaaaucccuucacucgagaguuuuucccggcggaaagugcucaggaauaacaguaucuucuacuuacugcucaacgaaccacgauuacaccaucuggaugccugagaauccaagacucgggacaucuugugacaucuucgucaacagcagagggaagagggcguccaaggggggcaagaccuguggguuuguagaugagagagguuuguauaagucacuaaaaggggcuugcaaacucaaauuauguggugugccuggacuuagacuuauggacggaacgugggucgcgauucagacgucagaugagaccaaauggugccccccugaucaguuaguaaaucuacaugacuuucgcucagaugaaaucgaacaucuugucguggaagagcuggucaagaaaagagaagagugccuagacgcgcuggaguccaucaugaccaccaagucuguaaguuucagacgucucagucaccugaggaaacucguccccggguucgggaaagcauauacuauauucaacaaaacuuugauggaggcugaugcucacuauaagucggucaggacuuggaacgagaucaucccuucaaaaggguguuuaagaguaggaggaagaugucauccucaugugaaugggguauuuuuuaaugguauaauauugggcccugauggccauguucugaucccagagaugcaaucgucccuccuccaacaacacauggaauuguuggaauccucagucauccccuuaaugcauccauuggcagacccgucaacagucuucaaggauggugaugaggcggaagaauuuguugagguucaccuuccggaugugcacaaacugaucucaggggucgaccuuggucuucccagcugggggaaguauguguugaugagugcagguauucugauaacacugauguugaugaucuucuugaugacuuguugcaggaggguuaaucaagcaggaucaaaacaacaugggcucgaaggggcagggaggaaaguaucugucaccucccagaacgggagggucauauccuccugggagucauauaaaagcggaggugaaaccaggcuguga

SEQ ID NO: 62794 - RNA, 1575 nt, Artificial Sequence
  derived and/or modified CDS sequence (wt) from glycoprotein__RABV__AB817124.1
auggucccgcaggcccuuuuguuugugccucuucugguguucucauuguguuucgggaaguucccuauuuacacgauaccagacaagcuugguccauggagucccauugauauacaucaucucagcuguccaaacaaucugguuguagaggaugaaggaugcaccaaucuaucaggauucuccuauauggaacucaaaguaggauacaucucagccauaaaagugaacggcuucacuuguacaggugugguuacagaggcagagacuuacacuaacuucguugguuauguaacuaccacguucagaagaaagcacuuccgcccaacacccgaugcguguagggccgcauacaacuggaaaauggcuggcgaccccagauaugaagagucccugcacaauccauaccccgacuaccauuggcuucggacuguuaaaaccaccaaggagucucuuguuauaauauccccgagcguggcagauuuggacccauaugacaaaucccuucacucgagaguuuuucccggcggaaagugcucaggaauaacaguaucuucuacuuacugcucaacuaaccaugauuacaccaucuggaugccugagaauccaagacucgggacaucuugugacaucuucgucaacagcagagggaagagggcguccaaggggggcaagaccuguggguuuguagaugagagagguuuguauaagucacuaaaaggggcuugcaaacucaaauuauguggggugccuggacuuagacuuauggacggaacgugggucgcgauucagacgucagaugagaccaaauggugccccccugaucaguuaguaaaucuacaugacuuucgcucagaugaaaucgaacaucuugucguggaagaguuggucaagaaaagagaagagugccuagacgcgcuggaguccaucaugaccaccaagucuguaaguuucagacgucucagucaccugaggaaacucgucccuggguuugggaaagcauauacuauauucaacaaaaccuugauggaggcugaugcucacuauaagucgguccggacuuggaacgagaucaucccuucaaaaggguguuuaagaguaggaggaagaugucauccucaugugaaugggguauuuuuuaaugguauaauauugggcccugauggccauguucuuaucccagagaugcaaucgucccuccuccaacaacacauggaauuguuggaauccucagucaucccguuaaugcauccauuggcagacccgucaacaguuuucaaggauggugaugaggcggaagacuuuguugagguucaccuuccggaugugcacaaacugaucucaggggucgaccuuggucuucccagcugggggaaguauguguugaugagugcagguauucugauaacacugauguugaugaucuucuugaugacuuguugcaggaggguuaaucaagcaggaucaaaacaacaugggcucgaaggggcagggaggaaaguaucugucaccucccagaacgggagggucauauccuccugggagucauauaaaagcggaggugaaaccaggcuguga

SEQ ID NO: 62795 - RNA, 1575 nt, Artificial Sequence
  derived and/or modified CDS sequence (wt) from glycoprotein__RABV__AB817125.1
auggucccgcaggcccuuuuguuugugccucuucugguguucucauuguguuucgggaaguuccccauuuacacgauaccagacaagcuugguccauggagucccauugauauacaucaucucagcuguccaaacaaucugguuguagaggaugaaggaugcaccaaccuaucaggauucucuuacauggaacucaaaguaggauacaucucagccauaaaagugaacggcuucacuuguacaggugugguuacagaggcagagacuuacaccaacuucguugguuaugucacuaccacguucagaagaaagcacuuccgcccaacacccgaugcguguagggccgcauacaacuggaaaauggcuggcgaccccagauaugaagaguccuugcacaauccauaccccgacuaccauuggcuucggacuguuaaaaccaccaaggagucucuuguuauaauauccccgagcguggcagauuuggacccauaugacaaaucccuccacucgagaguuuuucccggcggaaagugcucaggaauaacaguaucuucuacuuacugcucaacuaaccaugauuacaccaucuggaugccugagaauccaagacucgggacaucuugugacaucuucgucaauagcagagggaagagggcguccaaggggggcaagaccuguggguuuguagaugagagagguuuguauaagucacuuaaaggggcuugcaaacucaaauuauguggggugccuggacuuagacuuauggacggaacgugggucgcgauucagacgucagaugagaccaaauggugucccccugaucaguuagugaaucuacaugacuuucgcucagaugaaaucgaacaucuugucguggaagagcuggucaagaaaagagaagagugccuagacgcgcuggaguccaucaugaccaccaagucuguaaguuucagacgucucagucaccugaggaaacucgucccuggguuugggaaagcauauacuauauucaacaaaaccuugauggaggcugaugcucacuauaagucgguccggacuuggaacgagaucaucccuucaaaaggguguuuaagaguaggaggaagaugucauccucaugugaaugggguauuuuuuaaugguauaauauugggcccugauggccauguucugaucccagagaugcaaucgucccuccuccaacaacacauggaauuguuggaauccucagucauccccuuaaugcauccauuggcagacccgucaacaguuuucaaggauggugaugaggcggaagacuuuguugagguucaccuuccggaugugcacaaacugaucucaggggucgaccuuggucuucccagcugggggaaguauguguugaugagugcagguauucugacgacacugauguugaugaucuucuugaugacuuguugcaggaggguuaaucaagcaggaucaaaacaacaugggcucgaaggggcagggaggaaaguaucugucaccucccagaacgggaggaucauauccuccugggagucauauaaaagcggaggugaaaccagacuguga

SEQ ID NO: 62796 - RNA, 1575 nt, Artificial Sequence
  derived and/or modified CDS sequence (wt) from glycoprotein__RABV__AB817128.1
auggucccgcaggcccuuuuguuugugccucuucuggcguucucauuguguuucgggaaguucccuauuuacacgauaccagacaagcuugguccauggagucccauugauauacaucaucucagcuguccaaacaaucugguuguagaggaugaaggaugcaccaaucuaucaggauucuccuauauggaacucaaaguaggauacaucucagccauaaaagugaacggcuucacuuguacaggugugguuacagaggcagagacuuacacuaacuucguugguuauguaacuaccacguucagaagaaagcacuuccgcccaacacccgaugcguguagggccgcauacaacuggaaaauggcuggcgaccccagauaugaagagucccugcacaauccauaccccgacuaccauuggcuucggacuguuaaaaccaccaaggagucucuuguuauaauauccccgagcguggcagauuuggacccauaugacaaaucccuucacucgagaguuuuucccggcggaaagugcucaggaauaacaguaucuucuacuuacugcucaacuaaccaugauuacaccaucuggaugccugagaauccaagacucgggacaucuugugacaucuucgucaacagcagagggaagagagcguccaaggggggcaagaccuguggguuuguagaugagagagguuuguauaagucacuaaaaggggcuugcaaacucaaauuauguggggugccuggacuuagacuuauggacggaacgugggucgcgauucagacgucagaugagaccaaauggugccccccugaucaguuaguaaaucuacaugacuuucgcucagaugaaaucgaacaucuugucguggaagaguuggucaagaaaagagaagagugccuagacgcgcuggaguccaucaugaccaccaagucuguaaguuucagacgucucagucaccugaggaaacucgucccuggguuugggaaagcauauacuauauucaacaaaaccuugauggaggcugaugcucacuauaagucgguccggacuuggaacgagaucaucccuucaaaaggguguuuaagaguaggaggaagaugucauccucaugugaaugggguauuuuuuaaugguauaauauugggcccugauggccauguucuuaucccagagaugcaaucgucccuccuccaacaacacauggaauuguuggaauccucagucaucccauuaaugcauccauuggcagacccgucaacaguuuucaaggauggugaugaggcggaagacuuuguugagguucaccuuccggaugugcacaaacugaucucaggggucgaccuuggucuucccagcugggggaaguauguguugaugagugcagguauucugauaacacugauguugaugaucuucuugaugacuuguugcaggaggguuaaucaagcaggaucaaaacaacaugggcucgaaggggcagggaggaaaguaucugucagcucccagaacgggagggucauauccuccugggagucauauaaaagcggaggugaaaccaggcuguga

SEQ ID NO: 62797 - RNA, 1575 nt, Artificial Sequence
  derived and/or modified CDS sequence (wt) from glycoprotein__RABV__AB817129.1
auggucccgcaggcccuuuuguuugugccucuucugguguucucauuguguuucgggaaguuccccauuuacacgauaccagacaagcuugguccauggagucccauugauauacaucaucucagcuguccaaacaaucugguuguagaggaugaaggaugcaccaaccuaucaggauucuccuacauggaacucaaaguaggauacaucucagccauaaaagugaacggcuucacuuguacagguguggucacagaagcagagacuuacacuaacuucguugguuaugucacuaccacguucagaagaaagcacuuccgcccaacacccgaugcguguagggccgcauacaacuggaaaauggcuggcgaccccagauaugaagagucccuacacaauccauaccccgacuaccauuggcuucggacuguuaaaaccaccaaggagucucuuguuauaauauccccgagcguggcagauuuggacccauaugacaaaucccuucacucgagaguuuuucccggcggaaagugcucaggaauaacaguaucuucuacuuacugcucaacgaaccaugauuacaccaucuggaugccugagaauccaagacucgggacaucuugugacaucuucgucaacagcagagggaagagggcguccaaggggggcaagaccuguggguuuguagaugagagagguuuguauaagucacuaaaaggggcuugcaaacucaaauuauguggugugccuggacuuagacuuauggacggaacgugggucgcgauucagacgucagaugagaccaaauggugccccccugaucaguugguaaaucuacaugacuuucgcucagaugaaaucgaacaucuugucguggaagagcuggucaagaaaagagaagagugccuagacgcgcuggaguccaucaugaccaccaagucuguaaguuucagacgucucagucaccugaggaaacucgucccuggguucgggaaagcauauacuauauucaacaaaaccuugauggaggcugaugcucacuauaagucgguccggacuuggaacgagaucaucccuucaaaaggguguuuaagaguaggaggaagaugucauccucaugugaaugggguauuuuuuaaugguauaauauugggcccugauggccauguucugaucccagagaugcaaucgucccuccuccaacaacacauggaauuguuggaauccucagucauccccuuaaugcauccauuggcagacccgucaacaguuuucaaggauggugaugaggcggaagacuuuguugagguucaccuuccggaugugcacaaacugaucucaggggucgaccuuggucuucccagcugggggaaguauguguugaugagugcagguauucugauaacacugauguugaugaucuucuugaugacuuguugcaggaggguuaaucaagcaggaucaaaacaacaugggcucgaaggggcagggaggaaaguaucugucuccucccagaacgggagggucauauccuccugggagucauauaaaagcggaggugaaaccaggcuguga

SEQ ID NO: 62798 - RNA, 1575 nt, Artificial Sequence
  derived and/or modified CDS sequence (wt) from glycoprotein__RABV__AB817130.1
auggucccgcaggcccuuuuguuugugccucuucugguguucucauuguguuucgggaaguuccccauuuacacgauaccagacaagcuugguccauggagucccauugauauacaucaucucagcuguccaaacaaucugguuguagaggaugaaggaugcaccaaccuaucaggauucuccuacauggaacucaagguaggauacaucucagccauaaaagugaacggcuucacuuguacaggugugguuacagaagcagagacuuacacuaacuucguugguuaugucacuaccacguucagaagaaagcacuuccgcccaacacccgaugcguguagggccgcauacaacuggaaaauggcuggcgaccccagauaugaagagucccugcacaauccauaccccgacuaccauuggcuucggacuguuaaaaccaccaaggagucucuuguuauaauauccccgagcguggcagauuuggacccauaugacaaaucccuucacucgagaguuuuucccggcggaaagugcucaggaauaacaguaucuucuacuuacugcucaacgaaccaugauuacaccaucuggaugccugagaauccaagacucgggacaucuugugacaucuucgucaacagcagagggaagagggcguccaaggggggcaagaccuguggguuuguagaugagagagguuuguauaagucacuaaaaggggcuugcaaacucaaauuauguggggugccuggacuuagacuuauggacggaacgugggucgcgauucagacgucagaugagaccaaauggugccccccugaucaguuaguaaaucuacaugacuuucgcucagaugaaaucgaacaucuugucguggaagagcuggucaagaaaagagaagagugccuagacgcgcuggaguccaucaugaccaccaagucuguaaguuuuagacgucucagucaccugaggaaacucgucccuggguuugggaaagcauauacuauauucaacaaaaccuugauggaggcugaugcucacuauaagucaguccggacuuggaaugagaucaucccuucaaaaggguguuuaagaguaggaggaagaugucauccucaugugaaugggguauuuuuuaaugguauaauauugggcccugauggccauguucugaucccagagaugcaaucgucccuccuccaacaacacauggaauuguuggaauccucagucauccccuuaaugcauccauuggcagacccgucaacaguuuucaaggauggugaugaggcggaagacuuuguugagguucaccuuccggaugugcacaaacugaucucaggggucgaccuuggucuucccagcugggggaaguauguguugaugagugcagguauucugauaacacugauguugaugaucuucuugaugacuuguugcaggaggguuaaucaagcaggaucaaaacaacaugggcucgaaggggcagggaggaaagugucugucaccucccagaacgggagggucauauccuccugggagucauauaaaagcggaggugaaaccaggcuguga

SEQ ID NO: 62799 - RNA, 1575 nt, Artificial Sequence
  derived and/or modified CDS sequence (wt) from glycoprotein__RABV__AB817131.1
auggucccgcaggcccuuuuguuugugccucuucugguguucucauuguguuucgggaaguuccccauuuacacgauaccagacaagcuugguccauggagucccauugauauacaucaucucagcugcccaaacaaucugguuguagaggaugaaggaugcaccaaccuaucaggauucuccuacauggaacucaaaguaggauacaucucagccauaaaagugaacggcuucacuuguacagguguggucacagaagcagagacuuacacuaacuucguugguuaugucacuaccacguucagaagaaagcacuuccgcccaacacccgaugcguguagggccgcauacaacuggaaaauggcuggcgaccccagauaugaagagucccugcacaauccauaccccgacuaccauuggcuucggacuguuaaaaccaccaaggagucucuuguuauaauaucuccgagcguggcagauuuggacccauaugacaaaucccuucacucgagaguguuucccggcggaaagugcucaggaauaacaguaucuucuacuuacugcucaacgaaccaugauuacaccaucuggaugccugagaauccaagacucgggacaucuugugacaucuucgucaacagcagagggaagagggcguccaaggggggcaagaccuguggguuuguagaugagagagguuuguauaagucacuaaaaggggcuugcaaacucaaauuauguggugugccuggacuuagacuuauggacggaacgugggucgcgauucagacgucagaugagaccaaauggugccccccugaucaguuaguaaaucuacaugacuuucgcuccgaugaaaucgaacaucuugucguggaagagcuggucaagaaaagagaagagugccuagacgcgcuggaguccaucaugaccaccaagucuguaaguuucagacgccucagucaccugaggaaacucgucccuggguucgggaaagcauauacuauauucaacaaaacuuugauggaggcugaugcucacuauaagucgguccggacuuggaacgagaucaucccuucaaaaggguguuuaagaguaggaggaagaugucauccucaugugaaugggguauuuuuuaaugguauaauauugggcccugauggccauguucugaucccagagaugcaaucgucccuccuucaacaacacauggaauuguuggaauccucagucauccccuuaaugcauccauuggcagacccgucaacaguuuucaaggauggugaugaggcggaagacuuuguugagguucaccuuccggaugugcacaaacugaucucaggggucgaccuuggucuucccagcugggggaaguauguguugaugagugcagguauucugauaacacugauguugaugaucuucuugaugacuuguugcaggaggguuaaucaagcaggaucaaaacaacaugggcucgaaggggcagggaggaaaguauccgucaccucccagaacgggagggucauauccuccugggagucauacaaaagcggaggugaaaccaggcuguga

SEQ ID NO: 62800 - RNA, 1575 nt, Artificial Sequence
  derived and/or modified CDS sequence (wt) from glycoprotein__RABV__AB817132.1
auggucccgcaggcccuuuuguuugugccucuucugguguucucauuguguuucgggaaguuccccauuuacacgauaccagacaagcuugguccauggagucccauugauauacaucaucucagcuguccaaacaaucugguuguagaggaugaaggaugcaccaaccuaucaggauucuccuacauggaacucaaaguaggauacaucucagccauaaaagugaacggcuucacuuguacagguguggucacagaagcagagacuuacacuaacuucguugguuaugucacuaccacguucagaagaaagcacuuccgcccaacacccgaugcguguagggccgcauacaacuggaaaauggcuggcgaccccagauaugaagagucccugcacaauccauaccccgacuaccauuggcuucggacuguuaaaaccaccaaggagucucuuguuauaauaucuccgagcguggcagauuuggacccauaugacaaaucccuucacucgagaguuuuucccggcggaaagugcucaggaauaacaguaucuucuacuuacugcucaacgaaccacgauuacaccaucuggaugccugagaauccaagacucgggacaucuugugacaucuucgucaacagcagagggaagagggcguccaaggggggcaagaccuguggguuuguagaugagagagguuuguauaagucacuaaaaggggcuugcaaacucaaauuauguggugugccuggacuuagacuuauggacggaacgugggucgcgauucagacgucagaugagaccaaauggugccccccugaucaguuaguaaaucuacaugacuuucgcucagaugaaaucgaacaucuugucguggaagagcuggucaagaaaagagaagagugccuagacgcgcuggaguccaucaugaccaccaagucuguaaguuucagacgucucagucaccugaggaaacucgucccuggguucgggaaagcauauacuauauucaacaaaacuuugauggaggcugaugcucacuauaagucggucaggacuuggaacgagaucaucccuucaaaaggguguuuaagaguaggaggaagaugucauccucaugugaaugggguauuuuuuaaugguauaauauugggcccugauggccauguucugaucccagagaugcaaucgucccuccuccaacaacacauggaauuguuggaauccucagucauccccuuaaugcauccauuggcagacccgucaacagucuucaaggauggugacgaggcggaagacuuuguugagguucaccuuccggaugugcacaaacugaucucaggggucgaccuuggucuucccagcugggggaaguauguguugaugagugcagguauucugauaacacugauguugaugaucuucuugaugacuuguugcaggaggguuaaucaagcaggaucaaaacaacaugggcucgaaggggcagggaggaaaguaucugucaccucccagaacgggagggucauauccuccugggagucauauaaaagcggaggugaaaccaggcuguga

SEQ ID NO: 62801 - RNA, 1575 nt, Artificial Sequence
  derived and/or modified CDS sequence (wt) from glycoprotein__RABV__AB817133.1
auggucccgcaggcccuuuuguuugugccucuucugguguucucauuguguuucgggaaguuccccauuuacacgauaccagacaagcuugguccauggagucccauugauauacaucaucucagcuguccaaacaaucugguuguagaggacgaaggaugcaccaaccuaucaggauucuccuacauggaacucaaaguaggauacaucucagccauaaaagugaacggcuucacuuguacaggugugguuacagaggcagagacuuacacuaacuucguugguuaugucacuaccacguucagaagaaagcacuuccgcccaacacccgaugcguguagggccgcauacaacuggaaaauggcuggcgaccccagauaugaagagucccuccacaauccauaccccgacuaccauuggcuucggacuguuaaaaccaccaaggagucucuuguuauaauaucuccgagcguggcagauuuggacccauaugacaaaucccuucacucgagaguuuuucccggcggaaagugcucagggauaacaguaucuucuacuuacugcucaacuaaccaugauuacaccaucuggaugccugagaauccaagacucgggacaucuugugacaucuucgucaacagcagagggaagagggcguccaaggggggcaagaccuguggguuuguagaugagagagguuuguauaagucacuaaaaggggcuugcaaacucaaauuauguggggugccuggacuuagacucauggacggaacgugggucgcgauucagacgucagaugagaccaaauggugccccccugaucaguuaguaaaucuacaugacuuucgcucagaugaaaucgaacaucuugucguggaagagcuggucaagaaaagagaagagugccuagacgcgcuggaguccaucaugaccaccaagucuguaaguuucagacgucucagucaccugaggaaacucgucccuggguuugggaaagcauauacuauauucaacaaaaccuugauggaggcugaugcucacuauaagucgguccggacuuggaacgagaucaucccuucaaaaggguguuuaagaguaggaggaagaugucauccucaugugaaugggguauuuuuuaaugguauaauauugggcccugauggccauguucugaucccagagaugcaaucgucccuccuccaacaacacauggaauuauuggaauccucagucauccccuuaaugcauccauuggcagacccgucaacaguuuucaaggauggugaugaggcggaagacuuuguugagguucaccuuccggaugugcacaaacugaucucaggggucgaccuuggucuucccagcugggggaaguaugcguugaugagugcagguguucugacaacacugauguugaugaucuucuugaugacuuguugcaggaggguuaaucaagcaggaucaaaacaacauggacucgaaggggcagggaggaaaguaucugucaccucccagaacgggagggucauauccuccugggagucauauaaaaguggaggugaaaccaggcuguga

SEQ ID NO: 62802 - RNA, 1575 nt, Artificial Sequence
  derived and/or modified CDS sequence (wt) from glycoprotein__RABV__AB817134.1
auggucccgcaggcccuuuuguuugugccucuucugguguucucauuguguuucgggaaguucccuauuuacacgauaccagacaagcuugguccauggagucccauugauauacaucaucucagcuguccaaacaaucugguuguagaggaugaaggaugcaccaaucuaucaggauucuccuauauggaacucaaaguaggauacaucucagccauaaaagugaacggcuucacuuguacaggugugguuacagaggcagagacuuacacuaacuucguugguuauguaacuaccacguucagaagaaagcacuuccgcccaacacccgaugcguguagggccgcauacaacuggaaaauggcuggcgaccccagauaugaagagucccugcacaauccauaccccgacuaccauuggcuucggacuguuaaaaccaccaaggagucucuuguuauaauauccccgagcguggcagauuuggacccauaugacaaaucccuucacucgagaguuuuucccggcggaaagugcucaggaauaacaguaucuucuacuuacugcucaacuaaccaugauuacaccaucuggaugccugagaauccaagacucgggacaucuugugacaucuuugucaacagcagagggaagagggcguccaaggggggcaagaccuguggguuuguagaugagagagguuuguauaagucacuaaaaggggcuugcaaacucaaauuauguggggugccuggacuuagacuuauggacggaacgugggucgcgauucagacgucagaugagaccaaauggugcaccccugaucaguuaguaaaucuacaugacuuucgcucagaugaaaucgaacaucuugucguggaagaguuggucaagaaaagagaagagugccuagacgcgcuggaguccaucaugaccaccaagucuguaaguuucagacgucucagucaccugaggaaacucgucccuggguuugggaaagcauauacuauauucaacaaaaccuugauggaggcugaugcucacuauaagucgguccggacuuggaacgagaucaucccuucaaaaggguguuuaagaguaggaggaagaugucauccucacgugaaugggguauuuuuuaaugguauaauauugggcccugauggccauguucuuaucccagagaugcaaucgucccuccuccaacaacacauggaauuguuggaaucaucagucaucccauuaaugcauccauuggcagacccgucaacaguuuucaaggauggugaugaggcggaagacuuuguugagguucaccuuccggaugugcacaaacugaucucaggagucgaccuuggucuucccagcugggggaaguauguguugaugagugcagguauucugauaacacugauguugaugaucuucuugaugacuuguugcaggaggguuaaucaagcaggaucaaaacaacaugggcucgaaggggcagggaggaaaguaucugucaccucccagaacgggagggucauauccuccugggagucauauaaaagcggaggugaaaccaggcuguga

SEQ ID NO: 62803 - RNA, 1575 nt, Artificial Sequence
  derived and/or modified CDS sequence (wt) from glycoprotein__RABV__AB817135.1
auggucccgcaggcccuuuuguuugugccucuucugguguucucguuguguuucgggaaguuccccauuuacacgauaccagacaagcuugguccauggagucccauugauauacaucaucucagcuguccaaacaaucugguuguagaggaugaaggaugcaccaaccuaucaggauucuccuacauggaacucaaaguaggauacaucucagccauaaaagugaacggcuucacuuguacagguguggucacagaagcagagacuuacacuaacuucguugguuaugucacuaccacguucagaagaaagcacuuccgcccaacacccgaugcguguagggccgcauacaacuggaaaauggcuggugaccccagauaugaagagucccuacacaauccauaccccgacuaccauuggcuucggacuguuaaaaccaccaaggagucucuuguuauaauauccccgagcguggcagauuuggacccauaugacaaaucccuucacucgagaguuuuucccggcggaaagugcucaggaauaacaguaucuucuacuuacugcucaacgaaccaugauuacaccaucuggaugccugagaauccaagacucgggacaucuugugacaucuucgucaacagcagagggaagagggcguccaaggggggcaagaccuguggguuuguagaugagagagguuuguauaagucacuaaaaggggcuugcaaacucaaauuauguggugugccuggacuuagacuuauggacggaacgugggucgcgauucagacgucagaugagaccaaauggugccccccugaucaguuaguaaaucuacaugacuuucgcucagaugaaaucgaacaucuuguuguggaagagcuggucaagaaaagagaagagugccuagacgcgcuggaguccaucaugaccaccaggucuguaaguuucagacgucucagucaccugaggaaacucgucccuggguucgggaaagcauauacuauauucaacaaaaccuugauggaggcugaugcucacuauaagucgguccggacuuggaacgagaucaucccuucaaaaggguguuuaagaguaggaggaagaugucauccucaugugaaugggguauuuuuuaaugguauaauauugggcccugauggccauguucugaucccagagaugcaaucgucccuccuccaacaacacauggaauuguuggaauccucagucauccccuuaaugcauccauuggcagacccgucaacaguuuucaaggauggugaugaggcggaagacuuuguugagguucaccuuccggaugugcacaaacugaucucaggggucgaccuuggucuucccagcugggggaaguauguguugaugagugcagguauucugauaacacugauguugaugaucuucuugaugacuuguugcaggaggguuaaucaagcaggaucaaaacaacaugggcucgaaggggcagggaggaaaguaucugucaccucccagaacgggagggucauauccuccugggagucauauaaaagcggaggugaaaccaggcuguga

SEQ ID NO: 62804 - RNA, 1575 nt, Artificial Sequence
  derived and/or modified CDS sequence (wt) from glycoprotein__RABV__AB817136.1
auggucccgcaggcccucuuguuugugccucuucugguguucucauuguguuucgggaaguuccccauuuacacgauaccagacaagcuugguccauggagucccauugauauacaucaucucagcuguccaaacaaucugguuguagaggaugaaggaugcaccaaccuaucaggauucucuuacauggaacucaaaguaggauacaucucagccauaaaagugaacggcuucacuuguacaggugugguuacagaggcagagacuuacacuaacuucguugguuaugucacuaccacguucagaagaaagcacuuccgcccaacacccgaugcguguagggccgcauacaacuggaaaauggcuggcgaccccagauaugaagagucccugcacaauccauaccccgacuaccacuggcuucggacuguuaaaaccaccaaggagucucuuguuauaauauccccgagcguggcagauuuggacccauaugacaaaucccuucacucgagaguuuuucccggcggaaagugcucaggaauaacaguauccucuacuuacugcucaacuaaccaugauuacaccaucuggaugccugagaauccaagacucgggacaucuugugacaucuucgucaacagcagagggaagagggcauccaaggggggcaagaccuguggguuuguagaugagagagguuuguauaagucacuaaaaggggcuugcaaacucaaauuauguggggugccuggacuuagacuuauggacggaacguggguagcgauucagacaucagaugagaccaaauggugccccccugaucaguuaguaaaucuacaugacuuucgcucagaugaaaucgaacaucuugucguggaagagcuggucaagaaaagagaagagugccuagacgcgcuggaguccaucaugaccaccaagucuguaaguuuuagacgucucagucaccugaggaaacucgucccuggguuugggaaagcauauacuauauucaacaaaaccuugauggaggcugaugcucacuauaagucgguccggacuuggaacgagaucaucccuucaaaaggguguuuaagaguaggaggaagaugucauccucaugugaaugggguauuuuuuaaugguauaauauugggcccugauggccauguucugaucccagagaugcaaucgucccuccuccaacaacacauggaauuguuggaauccucagucauccccuuaaugcauccauuggcagacccgucaacaguuuucaaggauggugacgaggcggaagacuuuguugagguucaccuuccggaugugcacaaacugaucucaggggucgaccuuggucuucccagcugggggaaguauguguugaugagugcagguauucugacgacacugauguugaugaucuucuugaugacuuguugcaggaggguuaaucaagcaggaucaaaacaacaugggcucgaaggagcagggaggaaaguaucugucaccucccagaacgggagggucauauccuccugggagucauauaaaaguggaggugaaaccaggcuguga

SEQ ID NO: 62805 - RNA, 1575 nt, Artificial Sequence
  derived and/or modified CDS sequence (wt) from glycoprotein__RABV__AB817137.1
auggucccgcaggcucucuuguuugugccucuucugguguucucauuguguuucgggaaguuccccauuuacacgauaccagacaagcuugguccauggagucccauugauauacaucaucucagcuguccaaacaaucugguuguagaggaugaaggaugcaccaaccuaucaggauucucuuacauggaacucaaaguaggauacaucucagccauaaaagugaacggcuucacuuguacaggugugguuacagaggcagagacuuacacuaacuucguugguuaugucacuaccacguucagaagaaagcacuuccgcccaacacccgaugcguguagggccgcauacaacuggaaaauggcuggcgaccccagauaugaagagucccugcacaauccauaccccgacuaccauuggcuucggacuguuaaaaccaccaaggagucucuuguuauaauauccccgagcguggcagauuuggacccauaugacaaaucccuucacucgagaguuuuucccggcggaaagugcucaggaauaacaguaucuucuacuuacugcucaacuaaccaugauuacaccaucuggaugccugagaauccaagacucgggacaucuugugacaucuucgucaacagcagagggaagagggcguccaaggggggcaagaccuguggguuuguagaugagagagguuuguauaagucacuaaaaggggcuugcaaacucaaauuauguggggugccuggacuuagacuuauggacggaacguggguagcgauucagacaucagaugagaccaaauggugccccccugaucaguuaguaaaucuacaugacuuucgcucagaugaaaucgagcaucuugucguggaagagcuggucaagaaaagagaagagugccuagacgcgcuggaguccaucaugaccaccaagucuguaaguuuuagacgucucagucaccugaggaaacucgucccuggguuugggaaagcauauacuauauucaacaaaaccuugauggaggcugaugcucacuauaagucgguccggacuuggaacgagaucaucccuucaaaaggguguuuaagaguaggaggaagaugucauccucaugugaaugggguauuuuuuaaugguauaauauugggcccugauggccauguucugaucccagagaugcaaucgucccuccuccaacaacacauggaauuguuggaauccucagucauccccuuaaugcauccauuggcagacccgucaacaguuuucaaggauggugacgaggcggaagacuuuguugagguucaccuuccggaugugcacaaacugaucucaggggucgaccuuggucuucccagcugggggaaguauguguugaugagugcagguauucugacgacacugauguugaugaucuucuugaugacuuguugcaggaggguuaaucaagcaggaucaaaacaacaugggcucgaaggagcagggaggaaaguaucugucaccucccagaacgggagggucauauccuccugggagucauauaaaagcggaggugaaaccaggcuguga

SEQ ID NO: 62806 - RNA, 1575 nt, Artificial Sequence
  derived and/or modified CDS sequence (wt) from glycoprotein__RABV__AB817138.1
auggucccgcaggcccuuuuguuugugccucuucugguguucucauuguguuucgggaaguuccccauuuacacgauaccagacaagcuugguccauggagucccauugauauacaucaucucagcuguccaaacaaucugguuguagaggaugaaggaugcaccaaccuaucaggauucuccuacauggaacucaaaguaggauacaucucagccauaaaggugaacggcuucacuuguacaggugugguuacagaggcagagacuuacacuaacuucguugguuaugucacuaccacguucagaagaaagcacuuccgcccaacacccgaugcguguagggccgcauacaacuggaaaauggcuggcgaccccagauaugaagagucccugcauaauccauaccccgacuaccauuggcuucggacuguuaaaaccaccaaggagucucuuguuauaauauccccgaguguggcagauuuggacccauaugacaaaucccuucacucgagaguuuuucccggcggaaagugcucaggaauaacaguaucuucuacuuacugcucaacuaaccaugauuacaccaucuggaugccugagaaucaaagacucgggacaucuugugacaucuucgucaacagcagagggaagagggcguccaaggggggcaagacuuguggguuuguagaugagagagguuuguauaagucacuaaaaggggcuugcaaacucaaauuauguggggugccuggacucagacuuauggacggaacgugggucgcgauucagacgucagaugagaccaaauggugccccccugaucaguuaguaaaucuacaugacuuucgcucagaugaaaucgaacaucuugucguggaagagcuggucaagaaaagagaagaaugccuagacgcguuggaguccaucaugaccaccaagucuguaaguuucagacgucucagucaccugaggaaacucgucccuggguuugggaaagcauauacuauauucaacaaaaccuugauggaggcugaugcucacuauaagucgguccggacuuggaacgagaucaucccuucaaaaggguguuugagaguaggaggaagaugucauccucaugugaaugggguauuuuuuaaugguauaauauugggcccugauggccauauucugaucccagagaugcaaucgucccuccuccaacaacacauggaauuguuggaauccucagucauccccuuaaugcauccauuggcagacccgucaacaguuuucaaggauggugaugaggcggaagacuuuguugagguucaccuuccggaugugcauaaacugaucucaggggucgaccuuggucuucccagcugggggaaguauguguugaugagugcagguauucugacaacacugauguugaugaucuucuugaugacuuguugcaggaggguuaaucgaguaggaucaaaacaacaugggcucgaaggggcagggaggaaaguaucugucaccucccagaacgggagggucauauccuccugggagucauauaaaagcggaggugaaaccaggcuguga

SEQ ID NO: 62807 - RNA, 1575 nt, Artificial Sequence
  derived and/or modified CDS sequence (wt) from glycoprotein__RABV__AB817140.1
auggucccgcaggcccuuuuguuugugccucuucugguguucucauuguguuucgggaaguuccccauuuacacgauaccagacaagcuugguccauggagucccauugauauacaucaucucagcuguccaaacaaucugguuguagaggaugaaggaugcaccaaccuaucaggauucuccuacauggaacucaaaguaggauacaucucagccauaaaagugaacggcuucacuuguacagguguggucacagaagcagagacuuacacuaacuucguugguuaugucacuaccacguucagaagaaagcacuuccgcccaacacccgaugcguguagggccgcauacaacuggaaaauggcuggcgaccccagauaugaagagucccugcacaauccauaccccgacuaccauuggcuucggacuguuaaaaccaccaaggagucucuuguuauaauaucuccgagcguggcagauuuggacccauaugacaaaucccuucacucgagaguuuuucccggcggaaagugcucaggaauaacaguaucuucuacuuacugcucaacgaaccacgauuacaccaucuggaugccugagaauccaagacucgggacaucuugugacaucuucgucaacagcagagggaagagggcguccaaggggggcaagaccuguggguuuguagaugagagagguuuguauaagucacuaaaaggggcuugcaaacucaaauuauguggugugccuggacuuagacuuauggacggaacgugggucgcgauucagacgucagaugagaccaaauggugccccccugaucaguuaguaaaucuacaugacuuucgcucagaugaaaucgaacaucuugucguggaagagcuggucaagaaaagagaagagugccuagacgcgcuggaguccaucaugaccaccaagucuguaaguuucagacgucucagucaccugaggaaacuugucccuggguucgggaaagcauauacuauauucaacaaaacuuugauggaggcugaugcucacuauaagucggucaggacuuggaacgagaucaucccuucaaaaggguguuuaagaguaggaggaagaugucauccucaugugaaugggguauuuuuuaaugguauaauauugggcccugauggccauguucugaucccagagaugcaaucgucccuccuccaacagcacauggaauuguuggaaucuucagucauccccuuaaugcauccauuggcagacccgucaacaguuuucaaggauggugaugaggcggaagacuuuguugagguucaccuuccggaugugcacaaacugaucucaggggucgaccuuggucuucccagcuggggaaaguauguguugaugagugcagguauucugauaacacugauguugaugaucuucuugaugacuuguugcaggaggguuaaucaagcaggaucaaaacaacaugggcucgaaggggcagggaggaaaguaucugucaccucccagaacgggagggucauauccuccugggagucauauaaaaacggaggugaaaccaggcuguga

SEQ ID NO: 62808 - RNA, 1575 nt, Artificial Sequence
  derived and/or modified CDS sequence (wt) from glycoprotein__RABV__AB817141.1
auggucccgcaggcccuuuuguuugugccucuucugguguucucauuguguuucgggaaguucccuauuuacacgauaccagacaagcuugguccauggagucccauugauauacaucaucucagcuguccaaacaaucugguuguagaggaugaaggaugcaccaaucuaucaggauucuccuauauggaacucaaaguaggauacaucucagccauaaaagugaacggcuucacuuguacaggugugguuacagaggcagagacuuacacuaacuucguugguuauguaacuaccacguucagaagaaagcacuuccgcccaacacccgaugcguguagggccgcauacaacuggaaaauggcuggcgaccccagauaugaagagucccugcacaauccauaccccgacuaccauuggcuucggacuguuaaaaccaccaaggagucucuuguuauaauauccccgagcguggcagauuuggacccauaugacaaaucccuucacucgagaguuuuucccggcggaaagugcucaggaauaacaguaucuucuacuuacugcucaacuaaccaugauuacaccaucuggaugccugagaauccaagacucgggacaucuugugacaucuuugucaacagcagagggaagagggcguccaaggggggcaagaccuguggguuuguagaugagagagguuuguauaagucacuaaaaggggcuugcaaacucaaauuauguggggugccuggacuuagacuuauggacggaacgugggucgcgauucagacgucagaugagaccaaauggugccccccugaucaguuaguaaaucuacaugacuuucgcucagaugaaaucgaacaucuugucguggaagaguuggucaagaaaagagaagagugccuagacgcgcuggaguccaucaugaccaccaagucuguaaguuucagacgucucagucaccugaggaaacucgucccuggguuugggaaagcauauacuauauucaacaaaaccuugauggaggcugaugcucacuauaagucgguccggacuuggaacgagaucaucccuucaaaaggguguuuaagaguaggaggaagaugucauccucacgugaaugggguauuuuuuaaugguauaauauugggcccugauggccauguucuuaucccagagaugcaaucgucccuccuccaacaacacauggaauuguuggaauccucagucaucccauuaaugcauccauuggcagacccgucaacaguuuucaaggauggugaugaggcggaagacuuuguugagguucaccuuccggaugugcacaaacugaucucaggggucgaccuuggucuucccagcugggggaaguauguguugauaagugcagguauucugauaacacugauguugaugaucuucuugaugacuuguugcaggaggguuaaucaagcaggaucaaaacaacaugggcucgaaggggcaggaaggaaaguaucugucaccucccagaacgggagggucauauccuccugggagucauauaaaaacggaggugaaaccaggcuguga

SEQ ID NO: 62809 - RNA, 1575 nt, Artificial Sequence
  derived and/or modified CDS sequence (wt) from glycoprotein__RABV__AB817142.1
auggucccgcagguccuuuuguuugugccucuucuaguguucucauuguguuucgggaaguuccccauuuacacgauaccagacaagcuugguccauggagucccauugauauacaucaucucagcuguccaaacaaucugguuguagaggaugaaggaugcaccaaccuaucaggauucuccuacauggaacucaaaguaggauacaucucagccauaaaagugaacggcuucacuuguacaggugugguuacagaggcagagacuuacacuaacuucguugguuaugucacuaccacguucagaagaaagcacuuccgcccaacgcccgaugcguguagggccgcauacaacuggaaaauggcuggcgaccccagauaugaagagucccugcacaauccauaccccgacuaccauuggcuucggacuguuaaaaccaccaaggagucucuuguuauaauauccccgagcguggcagauuuggacccauaugacaagucccuucacucgagaguuuuucccggcggaaagugcucaggaauaacaguaucuucuacuuacugcucaacuaaccaugauuacaccaucuggaugccugagaauccaagacucgggacaucuugcgacaucuucgucaacagcagagggaagagggcguccaaggggggcaagaccuguggguuuguagaugagagagguuuguauaagucacuaaaaggggcuugcaaacucaaauuauguggggugccuggacuuagacuuauggacggaacgugggucgcgauucagacgucagaugagaccaaauggugccccccugaucaguuaguaaaucuacaugacuuucgcucagaugaaaucgaacaucuugucguggaagagcuggucaagaaaagagaagagugccuagacgcgcuggaguccaucaugaccaccaagucuguaaguuucagacgucucagucaccugaggaaacucgucccuggguuugggaaagcauauacuauauucaacaaaacccugauggaggcugaugcucacuauaagucgguccggacuuggaacgagaucaucccuucaaaaggguguuuaagaguaggaggaagaugucauccucaugugaaugggguauuuuuuaaugguauaauauugggcccugauggccauguucugaucccagagaugcaaucgucccuccuccaacaacacauggaauuguuggaauccucagucauccccuuaaugcauccauuggcagacccgucaacaguuuucaaggauggugaugaggcggaagacuuuguugagguucaccuuccggaugugcacaaacugaucucaggggucgaccuuggucuucccagcugggggaaguauguguugaugagugcagguauucugacaacacugauguugaugaucuucuugaugacuuguugcaggaggguuaaucaagcaggaucaaaacaacaugggcucgaaggggcagggaggaaaguaucugucaccucccagaacgggagggucauauccuccugggagucauauaagagcggaggugaaaccaggcuguga

SEQ ID NO: 62810 - RNA, 1575 nt, Artificial Sequence
  derived and/or modified CDS sequence (wt) from glycoprotein__RABV__AB817143.1
auggucccgcaggcccuuuuguuugugccucuucugguguucucauuguguuucgggaaguucccuauuuacacgauaccagacaagcuugguccauggagucccauugauauacaucaucucagcuguccaaacaaucugguuguagaggaugaaggaugcaccaaccuaucaggauucuccuacauggaacucaaaguaggauacaucucagccauaaaagugaacggcuucacuuguacaggugugguuacagaggcagagacuuacacuaacuucguugguuauguaacuaccacguucagaagaaagcacuuccgcccaacacccgaugcguguagggccgcauacaacuggaaaauggcuggcgaccccagauaugaagagucccugcacaauccauaccccgacuaccauuggcuucggacuguuaaaaccaccaaggagucucuuguuauaauauccccgagcguggcagauuuggacccauaugacaaaucccuucacucgagaguuuuucccggcggaaagugcucaggaauaacaguaucuucuacuuacugcucaacuaaccaugauuacaccaucuggaugccugagaauccaagacucgggacaucuugugacaucuucgucaacagcagagggaagagggcguccaaggggggcaagaccuguggguuuguagaugagagagguuuguauaagucacugaaaggggcuugcaaacucaaauuauguggggugccuggacuuagacuuauggacggaacgugggucgcgauucagacgucagaugagaccaaauggugccccccugaucaguuaguaaaucuacaugacuuucgcucagaugaaaucgaacaucuugugguggaagagcuggucaagaaaagagaagagugccuagacgcgcuggaguccaucaugaccaccaagucuguaaguuucagacgucucagucaccugaggaaacucgucccuggguuugggaaagcauauacuauauucaacaaaaccuugauggaggcugaugcucacuauaagucgguccggacuuggaacgagaucaucccuucaaaaggguguuuaagaguaggaggaagaugucauccucaugugaaugggguauuuuuuaaugguauaauauugggcccugauggccauguucuuaucccagagaugcaaucgucccuccuccaacaacacauggaauuguuggaauccucagucauccccuuaaugcauccauuggcagacccgucaacaguuuucaaggauggugaugaggcggaagacuuuguugagguucaccuuccggaugugcacaaacugaucucaggggucgaccuuggucuucccagcugggggaaguauguguugaugagugcagguauucugauaacacugauguugaugaucuucuugaugacuuguugcaggagggucaaucaagcaggaucaaaacaacaugggcucgaagggacagggaggaaaguaucugucaccucccagaacgggagggucauauccuccugggagucauauaaaagcggaggugaaaccagacuguga

SEQ ID NO: 62811 - RNA, 1575 nt, Artificial Sequence
  derived and/or modified CDS sequence (wt) from glycoprotein__RABV__AB817144.1
auggucccgcaggcccuuuuguuugugccucuucugguguucucauuguguuucgggaaguuccccauuuacacgauaccagacaagcuugguccauggagucccauugauauacaucaucucagcuguccaaacaaucugguuguagaggaugaaggaugcaccaaccuaucaggauucuccuacauggaacucaaaguaggauacaucucagccauaaaagugaacggcuucacuuguacaggugugguaacagaagcagagacuuacacuaacuucguugguuaugucacuaccacguucagaagaaagcacuuccgcccaacacccgaugcguguagggccgcauacaacuggaaaauggcuggcgaccccagauaugaagagucccuacacaauccauaccccgacuaccauuggcuucggacuguuaaaaccaccaaggagucucuuguuauaauauccccgagcguggcagauuuggacccauaugacaaaucccuucacucgagaguuuuucccggcggaaagugcucaggaauaacaguaucuucuacuuacugcucaacgaaccaugauuacaccaucuggaugccugagaauccaagacucgggacaucuugugacaucuucgucaacagcagagggaagagggcguccaaggggggcaagaccuguggguuuguagaugagagagguuuguauaagucacuaaaaggggcuugcaaacucaaauuauguggugugccuggacuuagacuuauggacggaacgugggucgcgauucagacgucagaugagaccaaauggugccccccugaucaguugguaaaucuacaugacuuucgcucagaugaaaucgaacaucuugucguggaagagcuggucaagaaaagagaagagugccuagacgcgcuggaguccaucaugaccaccaagucuguaaguuucagacgucucagucaccugaggaaacucgucccuggguucgggaaagcauauacuauauucaacaaaaccuugauggaggcugaugcucacuauaagucgguccggacuuggaacgagaucaucccuucaaaaggguguuuaagaguaggaggaagaugucauccucaugugaaugggguauuuuuuaaugguauaauauugggcccugauggccauguucugaucccagagaugcaaucgucccuccuccaacaacacauggaauuguuggaauccucagucauccccuuaaugcauccauuggcagacccgucaacaguuuucaaggauggugaugaggcggaagacuuuguugagguucaccuuccggaugugcacaaacugaucucaggggucgaccuuggucuucccagcugggggaaguauguguugaugagugcagguauucugauaacacugauguugaugaucuucuugaugacuuguugcaggaggguuaaucaagcaggaucaaaacaacaugggcucgaaggggcagggaggaaaguaucugucaccucccagaacgggagggucauauccuccugggagucauauaaaagcggaggugaaaccaggcuguga

SEQ ID NO: 62812 - RNA, 1575 nt, Artificial Sequence
  derived and/or modified CDS sequence (wt) from glycoprotein__RABV__AB817146.1
auggucccgcaggcccuuuuguuugugccucuucugguguucucauuguguuucgggaaguuccccauuuacacgauaccagacaagcuugguccauggagucccauugauauacaucaucucagcuguccaaacaaucugguuguagaggaugaaggaugcaccaaccuaucaggauucucuuacauggaacucaaaguaggauacaucucagccauaaaagugaacggcuucacuuguacaggugugguuacagaggcagagacuuacaccaacuucguugguuaugucacuaccacguucagaagaaagcacuuccgcccaacacccgaugcguguagggccgcauacaacuggaaaauggcuggcgaccccagauaugaagaguccuugcacaauccauaccccgacuaccauuggcuucggacuguuaaaaccaccaaggagucucuuguuauaauauccccgagcguggcagauuuggacccauaugacaaaucccuccacucgagaguuuuucccggcggaaagugcucaggaauaacaguaucuucuacuuacugcucaacuaaccaugauuacaccaucuggaugccugagaauccaagacucgggacaucuugugacaucuucgucaauagcagagggaagagggcguccaaggggggcaagaccuguggguuuguagaugagagagguuuguauaagucacuaaaaggggcuugcaaacucaaauuauguggggugccuggacuuagacuuauggacggaacgugggucgcgauucagacgucagaugagaccaaauggugucccccugaucaguuagugaaucuacaugacuuucgcucagaugaaaucgaacaucuuguuguggaagagcuggucaagaaaagagaagagugccuagacgcgcuggaguccaucaugaccaccaagucuguaaguuucagacgucucagucaccugaggaaacucgucccuggguuugggaaagcauauacuauauucaacaaaaccuugauggaggcugaugcucacuauaagucgguccggacuuggaacgagaucaucccuucaaaaggguguuuaagaguaggaggaagaugucauccucaugugaaugggguauuuuuuaaugguauaauauugggcccugauggccauguucugaucccagagaugcaaucgucccuccuccaacaacacauggaauuguuggaauccucagucauccccuuaaugcauccauuggcagacccgucaacaguuuucaaggauggugaugaggcggaagacuuuguugagguucaccuuccggaugugcacaaacugaucucaggggucgaccuuggucuucccagcugggggaaguauguguugaugagugcagguauucugacgacacugauguugaugaucuucuugaugacuuguugcaggaggguuaaucaagcaggaucaaaacaacaugggcucgaaggggcagggaggaaaguaucugucaccucccagaacgggaggaucauauccuccugggagucauauaaaagcggaggugaaaccagacuguga

SEQ ID NO: 62813 - RNA, 1575 nt, Artificial Sequence
  derived and/or modified CDS sequence (wt) from glycoprotein__RABV__AB838709.1
augauuccucaggcucuuuuguuuguaccccuucuggucuuuucauuguguuucggaaaauuucccaucuacacgauaccggacaaacuuggucccuggagccccauugauauacaucaucucagcuguccgaacaauuugguuguggaggaugaaggauguaccaaccugucagguuucucguacauggaacucaagguaggauacauuucagccaucaaaguaaacggguucacuuguacggguguagugacagaagcagagaccuacaccaacuuuguuggcuaugucacuaccacguuuaagagaaagcacuuccgcccaacgccggaugcaugcagagccgcauauaacuggaagauggcuggugaccccagauaugaagaaucucugcauaauccuuacccugauuaucauuggcuccgaacugugaagaccaccaaagaaucucuuguuaucauauguccaaguguggcagauuuggacccauaugauaaaucccuucacucgagagucuuuccuagcggaaaaugcucaggcauaacggugucuucuaccuacugcucuacuaaccacgacuauaccaucuggaugccugagaauccuaggcuagggaccucuugugacauuuucaccaauagcagagggaagagagcauccaaagggagcaagaccuguggauuuguagaugagaggggccuguacaagucucugaaaggagcaugcaaacugaaacuaugugggguucugggacucagacuuauggauggaacaugggccgcgauccagacaucagaugagaccaaauggugcccuccugaucaguuagugaaccugcaugacuuucgcucggaugaaauugaacaucuuguuguggaggagcuggucaagaaaagggaagagugucuagaugcacuggaguccaucaugaccaccaagucugugaguuucagacgucucagucacuugaggaaacuugugcccggguuuggaaaagcauauaccauauucaauaaaaccuugauggaggcugaugcucacuacaaaucaguccggacuuggaaugagaucauccccucuaaaggguguuuaagagucggggggagaugucacccucaugugaacgggguguucuucaaugguaucaucuuaggcccugacggccaugugcuaaucccggagaugcagucgucucuccuccagcagcacauggaguuguuggaauccucagucaucccuuuaaugcaucccuuggcagauccaucaacaguuuuuaaagaugaugacgaggcggaagauuuuguugagguucaccuuccagaugugcacaagcaggucucaggggucgaucucggucuuccaagcugggggaaguauguguugaugagcgcaggcgucuugaccgcauuaauguugaugaucuucuuaacgacguguuguagaagggccaauagagcagaaucggcgcaacacagucuuggagagagggggaggaaagugucgguaaccucccaaagcgggcggguuauauccucaugggagucauacaaaaguggaggugagaccaagcuguaa

SEQ ID NO: 62814 - RNA, 1575 nt, Artificial Sequence
  derived and/or modified CDS sequence (wt) from glycoprotein__RABV__AB838710.1
augauuccucaggcucuuuuguuuguaccccuucuggucuuuucauuguguuucgggaaauuccccaucuacacgauaccugacaaacuuggucccuggagccccauugauauacaucaucucagcuguccgaacaauuugguuguagaggaugaaggauguaccaaccugucagguuucucauacauggaacucaaaguaggauacauuucagccaucaaagugaacggguucaccuguacggguguggugacagaggcagaaaccuacaccaacuuuguuggcuauguuacuaccacguuuaagagaaagcacuuccgcccgaugccggaugcgugcagagccgcauauaacuggaagauggcuggugaccccagauaugaagagucucugcauaauccuuacccugauuaucauuggcuccggacugugaagaccaccaaagaaucucuuguuaucauaucuccaaguguggcagauuuggacccauacgacaaaucccuucacucgagaguuuuuccuagcggaaaaugcucaggcauaacagugucuucuaccuacugcucuacuaaccaugacuauaccaucuggaugccugagaauccuagacuagggaccucuugugacauuuucaccaauagcagggggaagagagcauccaaagggagcaagaccuguggauuuguagaugagagaggccuauacaaaucucugaaaggagcuugcaaacugaaacuaugugggguucuuggacucagacuuauggauggaacaugggcagcaauccagacaucagaugagaccaaauggugcccuccugaucaguuggugaaccuacaugacuuucguucggaugaaauugaacaucuuguuguggaggagcuggucaagaaaagggaagagugucuagaugcacuggaguccaucaugaccaccaaguccgugaguuucagacgucucagucacuugaggaaacuugugccuggguuuggaaaagcguauaccauauucaauaagaccuugauggaggcugaugcucauuacaaaucaguccggacuuggaaugagaucaucccaucuaaaggguguuuaagagucggggggagaugucacccucaugugaacgggguuuucuucaaugguaucaucuuaggcccugacggccaugugcuaaucccggagaugcagucgucucuccuccagcagcauauggaguuguuggaauccucaguuauccccuugaugcauccccuggcagauccaucaacaguuuucaaagaugaugacgaggcggaagauuuuguugagguucaccuuccagaugugcacaagcaggucucaggggucgaucucggucucccaagcugggggaaguaugugcugaugagcgcaggcgucuugaccguauuaauguugaugauuuucuucaugacguguuguagaagggccaauagaguggaaucagcacaacacagucuuggagagagggggaggaaagugucgguaaccucccaaagcgggcgggucauauccucaugggagucauacaaaaguggaggugagaccaaacuguaa

SEQ ID NO: 62815 - RNA, 1575 nt, Artificial Sequence
  derived and/or modified CDS sequence (wt) from glycoprotein__RABV__AB905545.1
augaucccucaggcccuucuguuugugccucuccuaaucucuucgucgugucucggaaaauuccccaucuacacaauaccagacaagcuugguccuuggagccccaucgauauacaucaccucagcuguccaaauaauuuaguuguggaagacgaggggugcaccaaucuaucaggguucucuuacauggaauuaaaggugggauacaucucugccauaaaggugaacggguucacuuguacugggguugugacagaggcugaaaccuauaccaacuuuguugguuaugucaccaccacauucaagaggaaacauuuucgcccuauaccggaugcaugcagggcugcauacaacuggaagauggcuggugauccuagauaugaggagucucuucaaaauccuuauccugauuaccacuggcuacggaccguaaagaccacuaaggagucucuuaucaucauaucuccgaguguggcugauuuagacccauaugacaaaucccuucauucuaggguauucccuggcgggaaguguuugggaauaacgguuucuuccaccuacugcucaaccaaccaugauuacaccaucuggaugcccgaggaaccaagacucgggacaucuugcgacauuuuuaccagcagcaaagggaaaaaggcaucuaagggaggcaagacuugcggauuuguggaugaaaggggcuuguacaagucucuaaaaggagcauguaaacucaagcugugcggaguucucggacuuagacucauggauggaaccuggguuucaauucaaacaucagacgauaccaaauggugcccuccggaucaauuggugaaucugcaugacuuucacucagaugaaauagagcaucucgucguggaggaguuggucaagaagagggaagaguguuuggacgcauuggaguccaucaugaccaccaaaucuguaaguuuuagacgucucagcuaucugagaaaacuugucccuggguuuggaaaggcauacacuauauucaacaagacuuugauggaggcugaugcccacuacaagucaguucggacuuggaacgagaucauccccucaaaaggguguuugaaagucagagagaggugucauccuccuguggacggaguguuuuucaauggcauaauccuggguccggacgggaauguccugauaccagagaugcaaucgucucuacuucaacaacauauggagcuguuggagucuucuguaauccccuuaaugcaucccuuggcggauccgucaacagucuucaaggaaggggaugaagcggaggacuuugucgaaguucaccuuccggauguucacaaacagaucucagggguugaccuuggucucccgaguugggggaaauaucuccugaugauugcagguggucuagcgacacuaguucugauaaucugcucgauggcaugcuguagaagaaccaagcgaacagagucaagaagacgaggcucuggagagucaggaaagaaaguaacggcaaccccccagacuaagaaagucguaucuucaugggaguuguacaagagugaaggugaugccaggcuguga

SEQ ID NO: 62816 - RNA, 1575 nt, Artificial Sequence
  derived and/or modified CDS sequence (wt) from glycoprotein__RABV__AB981663.1
augauuccucaggcucuuuuguuuguaccccuuuugguuuucucauugugcuucgggaaauuccccaucuacacgauaccagacaaacuuggcccuuggaguccuauugauauacaucaucucaguugcccuaacaauuuaguuguggaggaugaggggugcaccaaccugucaggauucuccuacauggaacucaaaguaggguacauuucagccauaaaagugaacggauucacuugcacggguguggugacagaagcagagaccuacacaaacuuugucggcuacgucaccaccacguuuaagagaaagcacuuccgcccgacaccagaugccugcagagcagcauauaacuggaagauggcaggugaccccagauaugaggaaucucugcauaauccguauccugauuaucauuggcuucggacuguaaagaccaccaaggaaucucuuguuaucauaucuccaagugugucggacuuagacccguacgauaaaucucuucauuccagaguuuuucccagcgguaaaugcucaggaauaacagugucuucuaccuauugucccacuaaccaugacuauacuaucuggaugccggaaaauccgagacuagggaccucuugugacauuuucaccaauagcagagggaagagagcauccaaagggagcaagaccuguggauuuguggacgaaagaggcuuguacaagucccuaaaaggggcaugcaaauugaagcuauguggaguucuuggacuuagacuuauggacggaacaugggcugcgauucaaacaucugaugaggccaaauggugcccucccgaucaguuagugaauauacaugauuuucgcucggaugagauugaacaucuuguuguggaagaguuaguaaagaaaagggaagagugucuagaugcacuggagucuaucaugaccaccaaguccguaaguuucagacgucucagucaccugaggaagcuuguccccggguuugggaaagcauauaccauauucaacaaaaccuugauggaggcugaugcucacuacaaaucaguccguacauggaaugagaucauccccucuaaaggguguuuaagaguuggggggagaugucacccccaugugaacgggguguuuuuuaaugguaucauccuggguccugauggacauguucuaaucccagagaugcagucgucucuccuucaacagcauauggaguuguuggaauccucgguaaucccgcugaugcaucccuuggcagaucccucaacaguuuuuaaggacggugacgaggcggaggauuuugucgagguucaccuuccggauguccacaagcaggucucggggguugaucucggucucccaagcugggggaaguaugugcugaugaguguaggcgcuaugauugcacuaauguugacgauuuucuugacgacguguugcagaaaaacuaacggagcagggucaauacaacaccgucccggagagacgggaaggaaagugucggucaccucccaaagcgggagggucauaucuuccugggagucguauaaaagcgggggugagaccaagcuguag

SEQ ID NO: 62817 - RNA, 1575 nt, Artificial Sequence
  derived and/or modified CDS sequence (wt) from glycoprotein__RABV__AB981664.1
augauuccucaggcucuuuuguuuguaccccuuuugguuuucucauugugcuucgggaaauuccccaucuacacgauaccagacaaacuuggcccuuggagucccauugauauacaucaucucaguugcccuaacaauuuaguuguggaggaugaagggugcaccaaccugucaggauucuccuacauggagcucaaaguaggguacauuucagccauaaaagugaacggguucacuugcacggguguggugacagaagcagagaccuacacaaauuuugucggcuacgucaccaccacguuuaagagaaagcacuuccgcccgacacccgaugccugcagagcagcauauaacuggaagauggcaggugaccccagauaugaggaaucucugcauaauccguaucccgauuaucacuggcuccggacuguaaagaccaccaaggagucucuuguuaucauauccccaagugugucggacuuagacccguacgauaaaucucuucauuccagaguuuuccccagcgguaaaugcucaggaauaacagugucuucuaccuauugucccacuaaccaugacuauaccaucuggaugccggaaaauccgagacuagggaccucuugugacauuuucaccaauagcagagggaagagagcauccaaagggagcaagaccuguggauuuguggacgaaagaggcuuguacaagucucuaaaaggggcaugcaaauugaagcuauguggaguucuuggacuuagacuuauggacggaacaugggcugcgauucaaacaucugaugaggucaaauggugcccucccgaucaguuagugaauauacaugauuuucgcucggaugagauugaacaucuuguuguggaagaguuaguaaagaaaagggaagagugucuagaugcacuggagucuaucaugaccuccaagucaguaaguuucagacgccucagucacuugaggaagcuuguccccggguuugggaaagcauauaccauauucaacaaaaccuugauggaggcugaugcucacuacaaaucaguccguacauggaaugagaucauccccucuaaagggugcuuaagaguuggggggagaugucacccccaugugaacgggguguuuuucaaugguaucauccuggguccugauggacauguucuaaucccagaaaugcagucgucucuccuucaacagcauauggaguuguuggaauccucgguaaucccgcuaaugcaucccuuggcagaucccucaacaguuuuuaaggacggugacgaggcggaagauuuugucgagguucaccuuccggauguccacaagcaggucucgggaguugaucucggucucccaagcugggggaaguaugugcugaugaguguaggcgcuaugauugcacugauguugaugauuuucuugaugacguguugcagaaaagcuaauggagcagaaucaauacaacaccgucucggagagacuggaaggaaagugucagucaccucucaaagcgggagggucauaucuuccugggagucauauaaaagcgggggugagaccaagcuguag

SEQ ID NO: 62818 - RNA, 1575 nt, Artificial Sequence
  derived and/or modified CDS sequence (wt) from glycoprotein__RABV__AF344305.1
augguuccucaggcucuuuugguuguaccccuucuggguuuuucauuguguuucgggaaauucccuauuuacacgauaccagacaaacuuggucccuggagcccgauugacauacaucaucucagcuguccaaacaaucugguuguggaggacgaaggaugcaccaaccugucaggguuuuccuacauggaacuuaaaguuggauacaucucagccauaaaagugaacggguucacuugcacaggaguugugacagaggcagagaccuacaccaacuuuguugguuaugucacaaccacguucaaaagaaagcauuuccgcccaacaccagaugaauguagagccgcacacaacuggaagauggccggugaccccagauaugaggagucucuacacaauccauacccugacuaccauuggcuucgaacuguaaaaaccaccaaagagucucuuguuaucauaucuccaaguguggcagauuuggacccauaugacaaaucccuucacucgagggucuucccuagcggaaaaugcucaggaauaacggugucuucuaccuacuguucaacuaaccaugauuacaccauuuggaugcccgagaauccgagauuagggacgucuugugacauuuuuaccaauagcagagggaagagagcauccaaagggaguaagacuugcggcuuuguagacgaaaggggccuguacaagucucuaaaaggagcaugcaaacucaaguuauguggaguucuaggacuuaaacuuauggaugggacaugggucgcgaugcaaacaucagaugagaccaaauggugcccucccgaucaguuggugaaucugcaugaccuucgcucggaugaaauugagcaccucguuguagaagaguuggucaagaaaagagaggagugucuggaugcacuagaguccaucaugaccaccaagucagugaguuucagacgucucagucauuuaagaaaacuugucccuggguucggaaaagcauacaccauauucaacaagaccuugauggaggcagaugcucacuacaagucaguucggaccuggaaugagaucaucccuucaaaaggguguuuaaaagugggggggaggugucauccucaugugaacggaguguuuuucaacggugucauauuagggccggacggccauguucugauccccgagaugcaaucaucccuccuccagcaacauauggaguuguuggaauccucaguuaucccuuugaugcacccccuggcagacccgucuacaguuuucaaggacggugaugaggccgaggauuucguugaaguucaccugcccgaugugcacaaacaggucucagggguugaccugggucucccgaacugggggaaguauauaucacugagugcaggggccuugauagccuugauguugauaauucuccuaaugacauguuguagaaagguuaaucgaccagaaccuacacaacguagucucgaagggaaaaagaggaaaguaucggucacuucucaaagcgggaaggucauaucuucaugggagucauauaaaagugggggugagaccagacuguga

SEQ ID NO: 62819 - RNA, 1575 nt, Artificial Sequence
  derived and/or modified CDS sequence (wt) from glycoprotein__RABV__AF344307.1
augguuccucaggcucuuuugguuguaccccuucuggguuuuucauuguguuucgggaaauucccuauuuacacgauaccagacaaacuuggucccuggagcccgauugacauacaucaucucagcuguccaaacaaucugguuguggaggacgaaggaugcaccaaccugucaggguuuuccuacauggaacuuaaaguuggauacaucucagccauaaaagugaacggguucacuugcacaggaguugugacagaggcagagaccuacaccaacuuuguugguuaugucacaaccacguucaaaagaaagcauuuccgcccaacaccagaugaauguagagccgcauacaacuggaagauggccggugaccccagauaugaggagucucuacacaauccauacccugacuaccauuggcuucgaacuguaaaaaccaccaaagagucucuuguuaucauaucuccaaguguggcagauuuggacccauaugacaaaucccuucacucgagggucuucccuagcggaaaaugcucaggaauaacggugucuucuaccuacuguucaacuaaccaugauuacaccauuuggaugcccgagaauccgagauuagggacgucuugugacauuuuuaccaauagcagagggaagagagcauccaaagggaguaagacuugcggcuuuguagacgaaaggggccuguacaagucucuaaaaggagcaugcaaacucaaguuauguggaguucuaggacuuaaacuuauggaugggacaugggucgcgaugcaaacaucagaugagaccaaauggugcccucccgaucaguuggugaaucugcaugaccuucgcucggaugaaauugagcaccucguuguagaagaguuggucaagaaaagagaggagugucuggaugcacuagaguccaucaugaccaccaagucagugaguuucagacgucucagucauuuaagaaaacuugucccuggguucggaaaagcauacaccauauucaacaagaccuugauggaggcagaugcucacuacaagucaguucggaccuggaaugagaucaucccuucaaaaggguguuuaaaaguggaggggaggugccacccgcaugugaacggaguguuuuucaacggugucauauuagggccggacggccauguucugauccccgagaugcaaucaucccuccuccagcaacauauggaguuguuggaauccucaguuaucccuuugaugcacccccuggcagacccgucuacaguuuucaaggacggugaugaggccgaggauuucguugaaguucaccugcccgaugugcacaaacaggucucagggguugaccugggucucccgaacugggggaaguauauaucacugagugcaggggccuugauagccuugauguugauaauucuccuaaugacauguuguagaaagguuaaucgaccagaaccuacgcaacguagucucgaagggaaaaagaggaaaguaucggucacuucucaaagcgggaaggucauaucuucaugggagucauauaaaagugggggugagaccagacuguga

SEQ ID NO: 62820 - RNA, 1575 nt, Artificial Sequence
  derived and/or modified CDS sequence (wt) from glycoprotein__RABV__AF499686.2
augguuccucaggcucuccuguuuguaccccuucugguuuuuccauuguguuuugggaaauucccuauuuacacgauaccagacaagcuuggucccuggaguccgauugacauacaucaccucagcugcccaaacaauuugguaguggaggacgaagaaugcaccaaccugucaggguucuccuacauggaacuuaaaguuggauacaucuuagccauaaaagugaacggguucacuugcacaggcguugugacggaggcugaaaccuacacuaacuucguugguuaugucacaaccacguucaaaagaaagcauuuccgcccaacaccagaugcauguagagccgcguacaacuggaagauggccggugaccccagauaugaagagucucuacacaauccguacccugacuaccgcuggcuucgaacuguaaaaaccaccaaggagucucucguuaucauaucuccaaguguggcagauuuggacccauaugacagaucccuucacucgagggucuucccuagcgggaagugcucaggaguagcggugucuucuaccuacugcuccacuaaccacgauuacaccauuuggaugcccgagaauccgagacuagggaugucuugugacauuuuuaccaauaguagagggaagagagcauccaaagggagugagacuugcggcuuuguagaugaaagaggccuauauaagucuuuaaaaggagcaugcaaacucaaguuauguggaguucuaggacuuagacuuauggauggaacaugggucucgaugcaaacaucaaaugaaaccaaauggugcccucccgauaaguuggugaaccugcacgacuuucgcucagacgaaauugagcaccuuguuguagaggaguuggucaggaagagagaggagugucuggaugcacuagaguccaucauggcaaccaagucagugaguuucagacgucucagucauuuaagaaaacuugucccuggguuuggaaaagcauauaccauauucaacaagaccuugauggaagccgaugcucacuacaagucagucagcacuuggaaugagguccucccuucaaaaggguguuuaagaguuggggggaggugucauccucaugugaacgggguguuuuucaaugguauaauauuaggaccugacggcaaugucuuaaucccagagaugcaaucaucccuccuccagcaacauauggaguuguuggaauccucgguuaucccccuugugcacccccuggcagacccgucuaccguuuucaaggacggugacgaggcugaggauuuuguugaaguucaccuucccgaugugcacaaucaggucucaggaguugacuugggucucccgaacugggggaaguauguauuacugagugcaggggcccugacugccuugauguugauaauuuuccugaugacauguuguagaagagucaaucgaucagaaccuacgcaacacaaucucagagggacagggagggaggugucagucacuccccaaagcgggaagaucauaucuucaugggaaucacacaagagugggggugagaccagacuguaa

SEQ ID NO: 62821 - RNA, 1575 nt, Artificial Sequence
  derived and/or modified CDS sequence (wt) from glycoprotein__RABV__AJ871962.1
augguuccucaggcucuccuguuuguaccccuucuggguuuuucguuguguuucgggaaguuccccauuuacacgauaccagacgaacuuggucccuggagcccuauugacauacaccaucucagcuguccaaauaaccugguuguggaggaugaaggauguaccaaccuguccgaguucuccuacauggaacucaaagugggauacaucucagccaucaaagugaacggguucacuugcacagguguugugacagaggcagagaccuacaccaacuuuguugguuaugucacaaccacauucaagagaaagcauuuccgccccaccccagacgcauguagagccgcguauaacuggaagauggccggugaccccagauaugaagagucccuacacaauccauaccccgacuaccacuggcuucgaacuguaagaaccaccaaagagucccucauuaucauauccccaagugugacagauuuggacccauaugacaaaucccuucacucaagggucuucccuggcggaaagugcucaggaauaacgguguccucuaccuacugcucaacuaaccaugauuacaccauuuggaugcccgagaauccgagaccaaggacaccuugugacauuuuuaccaauagcagagggaagagagcauccaaagggaacaagacuugcggcuuuguggaugaaagaggccuguauaagucucuaaaaggagcaugcaggcucaaguuauguggaguucuuggacuuagacuuauggauggaacaugggucgcgaugcaaacaucagaugagaccaaauggugcccuccagaucaguuggugaauuugcacgacuuucgcucagacgagauugagcaucucguuguggaggaguuagucaagaaaagagaggaaugucuggaugcauuagaguccaucaugaccaccaagucaguaaguuucagacgucucagucaccugagaaaacuugucccaggguuuggaaaagcauauaccauauucaacaaaaccuugauggaggcugaugcucacuacaagucaguccggaccuggaaugagaucauccccucaaaaggguguuugaaaguuggaggaaggugccauccucaugugaacgggguguuuuucaaugguauaauauuagggccugacggccauguccuaaucccagagaugcaaucaucccuccuccagcaacauauggaguuguugaaaucuucaguuaucccccugaugcacccccuggcagacccuucuacaguuuucaaagaaggugaugaggcugaggauuuuguugaaguucaccuccccgauguguacaaacagaucucagggguugaccugggucucccgaacuggggaaaguauguauugaugacugcaggggccaugauuggccugguguugauauuuucccuaaugacauggugcagaagagccaaucgaccagaaucgaaacaacgcaguuuuggagggacagggaggaaugugucagucacuucccaaagcggaaaagucauaccuucaugggaaucauauaagagugggggucagaccagacuguga

SEQ ID NO: 62822 - RNA, 1575 nt, Artificial Sequence
  derived and/or modified CDS sequence (wt) from glycoprotein__RABV__AY683208.1
augguuccucaggcucuuuuguuuguacccuuucuggguuuuucauuguguuucgggaaauucccuauuuacacgauaccggacaaacuuggucccuggagcccgauugauauacaucaucucaguugcccaaacaauuuggucguggaggaugaaggaugcaccaaccugucaggguucuccuaccuggaacuuaaaguuggacacaucucugcuauaaaggugaacggauucacuugcacaggcguugugacagaggcagagaccuacacuaacuuuguugguuaugucaccaccacguucaaaagaaagcauuuccgcccgacaccagaugcauguagagccgcauacaacuggaagacggcuggugaucccagauaugaagagucuuuacaaaauccguacccugacuaccaguggcuccgaacuguaagaaccaccaaggagucucucguuaucauauccccaagugcggcagauuuggacccauaugacaaaucccuucacucgagggucuucccuagcggaaagugcucaggaauaacgguguccucuguuuacugcucaacaaaccacgauuacaccauuuggaugccugagaauccgagacaagggaugucuugugacauuuucaccaauaguagagggaagagagcauccaaggagagaaagaccugcggcuuuguggaugaaagaggccuguauaagucucuaagaggcucaugcaaacucaaguuauguggaguucuuggacuuagacuuauggauggaacaugggucgcgaugcagacaucaaaugagaccaaaugguguuccccugaucaguugguuaaucugcacgacuuucacucagaugaaauugagcaucuuguuguagaggaguuggucaagaaaagagaggagugucuggaugcacuagaguccaucaugaccaccaagucaguaaguuucagacgucucagucauuuaagaaaacuugucccuggguucggaaaagcauauaccauaaucaacaagacuuugauggaggcugaggcucacuacaagucaguccggacuuggaaugagaucguccccucaaaaggguguuuaagagucgaagggaggugucauccucauguaaacgggguauuuuucaaugguauaauauuagggccugacggccauguucuaaucccagagaugcaaucaucccuccuccagcaacauauggaguuauuggaauccucaguuauuccccugaugcacccccuugcagacccguccacgguuuucaaggaaggcgaugaggcggaggacuuuguagaaguucacuuuccagaugugcauaaaaaggucucagagguugaccugggucucccgaacuggggagaguauguauuacugagugcagggacccugauugccuugauguugauaauuuuccuaaugauaugucguagaagagucaauagaccagaaucuacgcaacgcagucucagagggacagagaugaaggugucggucaccccccaaagcgggaaauucaaaucuucaugggaaucauauaaaaguggggaugaagcuagacuguga

SEQ ID NO: 62823 - RNA, 1575 nt, Artificial Sequence
  derived and/or modified CDS sequence (wt) from glycoprotein__RABV__AY705373.1
augaucccccaggcucuucuguuugugccucuccugauucccucgcugugucucgggaaguuccccaucuacacgauaccagacaagcuuggccccuggagcccgauagacauacaucaucucagcugucccaacaauuugguuguggaagacgaagggugcaccagucugucaggguuuuccuauauggaacugaaggugggauacaucucagccaugaaggugaacggguucacuuguaccgguguugugacagaagccgagaccuacaccaacuuugucgguuaugucaccaccacauuuaagagaaaacacuuccgcccgaugccagaugccugcagagcugcacacgacuggaagauagccggcgauccuagauaugaagauucucuucaaaauccuuauccugauuaccauuggcuacggaccguaaagaccaccaaggagucucucguuauuauaucuccgaguguggcugauuuggaccccuacgacaaaucccuucauucaagaguuuuccccagugggaaguguuuggggauaacagucuccucuaccuacugcccaacuaaccacgauuacaccaucuggaugcccguagaagcaagacuugggacaucuugugauauuuucaccaauagcagagggaagaaagcaucuaaggggggcaggacuugcggauuuguagaugaaaggggcuuguacaagucucugaaaggagcaugcaaacucaagcuaugcggaguccccgggcuccggcugaugaauggaaccugggucucaauccagacaucagaugauauuaaauggugcccuccugaucaauuggugaaucuacaugacuuucacucagaugaaauagaacaucucgucguagaggaauugaucaagaaaagggaaggauguuuagaugcacuggaguccauaaugaccacuaaaucagugagcuucagacgucucagccacuugagaaagcuuguuccuggguuugggaaggcauacaccauauucaauaauaccuuaauggaagcugaugcucauuacaagucaguucggacuuggaacgaagucauccccucaaaagguugccuaaaagucggagggaggugucaucccccugugaacggaguauucuucaaugguauaauuuuggguccagaugggaauguucugaucccugagaugcaaucgucccugcuccaacaacauauggaacuguuggagucuucuguuaucccucugaugcaccccuuggcagacccaucaacagucuucaaggacggugaugaggcggaagacuuuguugagguucaucuuccggauguucacaaacaggucucggauguugaccuuggucuuccgaguugggggaaguaucuguugaugagcgcaggugcucuggcaacacugauucuggcgaucuucuuaauaacauguuguagaagggccaauaggacaaaaucaacacagagaggucauagggagucaggagggaaagugucaguagccccucaaaacgggaaaaucauauccucaugggaguuguacaaaagugaaagugagaccgggauguga

SEQ ID NO: 62824 - RNA, 1575 nt, Artificial Sequence
  derived and/or modified CDS sequence (wt) from glycoprotein__RABV__AY956319.1
augguuccucaggcucuuuuguuuguaccccuucugguugucucaauguguuucgggaaauucccuaucuauacgguaccggacaaacuuggucccuggagcccgauugauauacaucaccucagcuguccaaacaaccugguuguggaagaugaaggaugcacuaacuugucggguuucuccuacauggaacuuaaggugggauacaucucggccauaaaaguaaacggguucacgugcacggguguggugacagaggcagagacuuacaccaacuuugucgguuauguuaccaccacguucaaaagaaagcauuuccgcccaacaccagaugcaugucgagcugcuuacaacuggaagauggccggugaccccagguaugaagaaucgcugcacaauccguacccugauuaccacuggcuucgaaccgugaaaaccacaaaggagucccucgucaucauauccccaaguguagcggaccuggacccauaugacaaaucccuucauucgagggucuuuccuagcgggaagugcucgggaauaacaauaucaucuacuuacugcucuacuaaccacgauuacacaaucuggaugcccgagaauccgagacuggggacaucuugugacaucuuuaccaacaguagagggaagagagcauccaaagggggcaaaacuugcggauuuguugaugaaagaggcuuguacaagucuuugaaaggggcaugcaaacucaaauugugugguguucuuggccuuagacuuauggauggaacguggguugcgaugcaaacaucggacgaaaccaagugguguccuccugaucaguugguaaaucuacacgacuuucgcucggacgagaucgaacaucuuguuguggaggaguuggucaagaaaagagaggagugucuggaugcacuagaguccaucaugacuaccaagucggugaguuucagacgucucagccacuugagaaaacuugucccuggguucggaaaagcauacaccauauucaacaaaacccugauggaagcagaugcccauuacaagucaguccgaaccuggaaugagaucauccccuccaaaggguguuugagaguuggagggaggugucauccucacguaaacgggguguuuuuuaacgguauaauacuggguccugacggccauguucugaucccagagaugcaaucaucccuccuucagcagcauauggaguuguuggaauccucaguuaucccccugaugcacccuuuagcagacccgucuacaguuuucaaggacggcgaugaagcagaggauuuuguugagguccaccuucccgacgugcacaaacaaguuucagguguugaccugggucuccccagcuggggaaaguauguuuuggugagugcagggguccugguuguccugauguugacaauuuucauaaugacauguugcagaagaguccaucgacccaagucuacacaacacggucucggagggacagggaggaaggugucggucacuucccaaagcgggaaggucauaucuucaugggagucuuauaagagcgggggugagaccagacuguga

SEQ ID NO: 62825 - RNA, 1575 nt, Artificial Sequence
  derived and/or modified CDS sequence (wt) from glycoprotein__RABV__DQ074978.1
augguuccucaggcucuccuguuuguaccccuucugguuuuuccauuguguuuugggaaauucccuauuuacacgauaccagacaagcuuggucccuggagcccgauugacauacaucaccucagcugcccaaacaauuugguaguggaggacgaaggaugcaccaaccugucaggguucuccuacauggaacuuaaaguuggauacaucucagccauaaaaaugaacggguucacuugcacaggcguugugacggaggcugaaaccuacacuaacuucguugguuaugucacaaccacguucaaaagaaagcauuuccgcccaacaccagaugcauguagagccgcguacaacuggaagauggccggugaccccagauaugaagagucucuacacaauccguacccugacuaccacuggcuucgaacuguaaaaaccaccaaggagucucucguuaucauaucuccaaguguggcagauuuggacccauaugacauaucccuucacucgagggucuucccuggcgggaauugcucaggaguagcggugucuucuaccuacugcuccacuaaccacgauuacaccauuuggaugcccgagaauccgagacuagggaugucuugugacauuuuuaccaauaguagagggaagagagaauccaaagggagugagacuugcggcuuuguagaugaaagaggccuauauaagucuuuaaaaggagcaugcaaacucaaguuauguggaguucucggacuuagacuuauggauggaacaugggucgcgaugcaaacaucaaaugaaaccaaauggugcccucccggucaguuggugaauuugcacgacuuucgcucagacgaaauugagcaccuuguuguagaggaguuggucaggaagagagaggagugucuggaugcacuagaguccaucaugacaaccaagucagugaguuucagacgucucagucauuuaagaaaacuugucccuggguuuggaaaagcauauaccauauucaacaagaccuugauggaagccgaugcucacuacaagucagucagaacuuggaaugagaucaucccuucaaaaggguguuuaagaguuggggggaggugucauccucauguaaacgggguauuuuucaaugguauaauauuaggaccugacggcaaugucuuaaucccagagaugcaaucaucccuccuccagcaacauauggaguuguugguauccucgguuaucccccuuaugcacccccuggcagacccgucuaccguuuucaagaacggugacgaggcugaggauuuuguugaaguucaccuucccgaugugcacgaacggaucucaggaguugacuugggucucccgaacugggggaaguauguauuacugagugcaggggcccugacugccuugauguugauaauuuuccugaugacaugcuggagaagagucaaucgaucggaaccuacacaacacaaucucagagggacagggagggaggugucagucacuccccaaagcgggaagaucauaucuucaugggaaucacacaagagcgggggugagaccagacuguga

SEQ ID NO: 62826 - RNA, 1575 nt, Artificial Sequence
  derived and/or modified CDS sequence (wt) from glycoprotein__RABV__DQ076093.1
augguuccucaggcucuuuuguucguaccucuucugguuuuuucaauguguuucgggaaauuccccaucuacacgauaccagacaaacuugguccuuggagcccaauugacauacaucaucucagcuguccaaacaacuugguuguagaggaugaaggaugcaccaacuugucagguuuuuccuacauggaacuuaaagugggauacauuucggccauaaaagugaacggguucacgugcacagguguggugacagaggcagaaacuuauacuaacuuuguugguuaugucaccacuacguucaaaagaaagcauuuccgcccgacaccggaugcaugucgagccgcuuacaacuggaaaauggccggugaccccagauaugaagaaucucugcacaauccuuacccugacuaccacuggcuucgaacugucaaaaccacgaaggaaucccuagucaucauauccccaaguguagcggaccuggacccauacgauaaaucccuucacucuagagucuuuccuaacggaaagugcucaggaauaacgauauccucuaccuacugcccuaccaaccaugauuacacuaucuggcucccugagaauccaagacuggggacaucuugugacaucuuuaccaauaguagagggaagagagcauccaaagggagcaagacuugcggguuuguugaugaaagagguuuguauaagucauugaaaggggcaugcaaacuuaaguugugugggguccuuggacuuagacuuauggauggaacgugggucgcaaugcaagcgucggacgagaccaaauggugccccccagaucagcugguaaaucuacacgacuuucgcucggacgagaucgaacaucucguuguggaggaguuggucaagaagagagaagagugucuggaugcacuagaguccaucaugacuacuaagucagugaguuucagacgucucagccacuugagaaagcuugucccuggguucggaaaagcauacaccauauucaacaaaaccuugauggaagcugaugcucacuacaagucaguccgaaccuggaaugagaucauccccucaaaaggguguuugagagucggggggaggugucauccucauguaaacgggguguuuuucaacgguauaauccuggguccugauggccauguucuaaucccagagaugcaaucgucccuccuucagcaacauauggaguuguuggaauccucaguuaucccccugaugcacccuuuagcagacccgucuacaguuuucaaggauggugaugaagcagagaauuuuguggagguucaccuuccugauguacacaaacagaucucgggaguugaccugggucucccuaacugggggaaguauguuuugguaagugcagggguccugaucgccuugauguugauaauuuuucuaaugacauguugcggaagagucaaucgaccaaaguccacacaacacaaucuuggcgggacagggaggaaggugucaguaacuccccaaagcggaaagguuauaucuucaugggagucauacaaaagcggaggugggaccagacuguga

SEQ ID NO: 62827 - RNA, 1575 nt, Artificial Sequence
  derived and/or modified CDS sequence (wt) from glycoprotein__RABV__DQ076096.1
augguuccucaggcucuuuuguucguaccucuucugguuuuuucaauguguuucgggaaauuccccaucuacacgauaccagacaaacuugguccuuggagcccaauugacauacaucaucucagcuguccaaacaacuugguuguagaggaugaaggaugcaccaacuugucagguuuuuccuacauggaacuuaaagugggauacauuucggccauaaaagugaacggguucacgugcacagguguggugacagaggcagaaacuuauacuaacuuuguugguuaugucaccacuacguucaaaagaaagcauuuccgcccgacaccggaugcaugucgagccgcuuacaacuggaaaauggccggugaccccagauaugaagaaucucugcacaauccuuacccugacuaccacuggcuucgaacugucaaaaccacgaaggaaucccuagucaucauauccccaaguguagcggaccuggacccauacgauaaaucccuucacucuagagucuuuccuaacggaaagugcucaggaauaacgauauccucuaccuacugcccuaccaaccaugauuacacuaucuggcucccugagaauccaagacuggggacaucuugugacaucuuuaccaauaguagagggaagagagcauccaaagggagcaagacuugcggguuuguugaugaaagagguuuguauaagucauugaaaggggcaugcaaacuuaaguugugugggguccuuggacuuagacuuauggauggaacgugggucgcaaugcaagcgucggacgagaccaaauggugccccccagaucagcugguaaaucuacacgacuuucgcucggacgagaucgaacaucucguuguggaggaguuggucaagaagagagaagagugucuggaugcacuagaguccaucaugacuacuaagucagugaguuucagacgucucagccacuugagaaagcuugucccuggguucggaaaagcauacaccauauucaacaaaaccuugauggaagcugaugcucacuacaagucaguccgaaccuggaaugagaucauccccucaaaaggguguuugagagucggggggaggugucauccucauguaaacgggguguuuuucaacgguauaauccuggguccugauggccauguucuaaucccagagaugcaaucgucccuccuucagcaacauauggaguuguuggaauccucaguuaucccccugaugcacccuuuagcagacccgucuacaguuuucaaggauggugaugaagcagagaauuuuguggagguucaccuuccugauguacacaaacagaucucgggaguugaccugggucucccuaacugggggaaguauguuuugguaagugcagggguccugaucgccuugauguugacaauuuuucuaaugacauguugcggaagagucaaucgaccaaaguccacacaacacaaucuuggcgggacagggaggaaggugucaguaacuccccaaagcggaaagguuauaucuucaugggagucauacaaaagcggaggugggaccagacuguga

SEQ ID NO: 62828 - RNA, 1575 nt, Artificial Sequence
  derived and/or modified CDS sequence (wt) from glycoprotein__RABV__DQ076097.1
augguuccucaggcucuuuuguucguaccucuucugguuuuuucaauguguuucgggaaauuccccaucuacacgauaccagacaaacuugguccuuggagcccaauugacauacaucaucucagcuguccaaacaacuugguuguagaggaugauggaugcaccaacuugucagguuuuuccuacauggaacuuaaagugggauacauuucggccauaaaagugaacggguucacgugcacagguguggugacagaggcagaaacuuauacuaacuuuguugguuaugucaccacuacguucaaaagaaagcauuuccgcccgacaccggaugcaugucgagccgcuuacaacuggaaaauggccggugaccccagauaugaagaaucucugcacacucccuacccugacuaccacuggcuucgaacugucaaaaccacgaaggaaucccuagucaucauauccccaaguguagcggaccuggacccauacgauaaaucccuucacucuagagucuuuccuaacggaaagugcucaggaauaacgauauccucuaccuacugcccuaccaaccaugauuacacuaucuggcucccugagaauccaagacuggggacaucuugugacaucuuuaccaauaguagagggaagagagcauccaaagggagcaagacuugcggguuuguugaugaaagaggucuguauaagucauugaaaggggcaugcaaacuuaaguugugugggguccuuggacuuagacuuauggauggaacgugggucgcaaugcaagcgucggacgagaccaaauggugccccccagaucagcugguaaaucuacacgacuuucgcucggacgagaucgaacaucucguuguggaggaguuggucaagaagagagaagagugucuggaugcacuagaguccaucaugacuacuaagucagugaguuucagacgucucagccacuugagaaagcuugucccuggguucggaaaagcauacaccauauucaacaaaaccuugauggaagcugaugcucacuacaagucaguccgaaccuggaaugagaucauccccucaaaaggguguuugagagucggggggaggugucauccucauguaaacgggguguuuuucaacgguauaauccuggguccugacggccauguucuaaucccagagaugcaaucgucccuccuucagcaacauauggaguuguuggaauccucaguuaucccccugaugcacccuuuagcagacccgucuacaguuuucaaggauggugaugaagcagagaauuuuguggagguucaccuuccugauguacacaaacagaucucgggaguugaccugggucucccuaacuggggaaaguauguuuugguaagugcagggguccugaucgccuugauguugauaauuuuucuaaugacauguugcggaagagucaaucgaccaaaguccacacaacacaaucuuggcgggacagggaggaaggugucaguaacuccccaaagcggaaagguuauaucuucaugggagucauacaaaagcggaggugggaccagacuguga

SEQ ID NO: 62829 - RNA, 1575 nt, Artificial Sequence
  derived and/or modified CDS sequence (wt) from glycoprotein__RABV__DQ076098.1
augguuccucaggcucuuuuguucguaccucuucugguuuuuucaauguguuucgggaaauuccccaucuacacgauaccagacaaacuugguccuuggagcccaauugacauacaucaucucagcuguccaaacaacuugguuguagaggaugaaggaugcaccaacuugucagguuuuuccuacauggaacuuaaagugggauacauuucggccauaaaagugaacggguucacgugcacagguguggugacagaggcagaaacuuauacuaacuuuguugguuaugucaccacuacguucaaaagaaagcauuuccgcccgacaccggaugcaugucgagccgcuuacaacuggaaaauggccggugaccccagauaugaagaaucucugcacaauccuuacccugacuaccacuggcuucgaacugucaaaaccacgaaggagucccuagucaucauauccccaaguguagcggaccuggacccauacgauaaaucccuucacucuagagucuuuccuaacggaaagugcucaggaauaacgauauccucuaccuacugcccuaccaaccaugauuacacuaucuggcucccugagaauccaagacuggggacaucuugugacaucuuuaccaauaguagagggaagagagcauccaaagggagcaagacuugcggguuuguugaugaaagaggucuguauaagucauugaaaggggcaugcaaacuuaaguugugugggguccuuggacuuagacuuauggauggaacgugggucgcaaugcaagcgucggacgagaccaaauggugccccccagaucagcugguaaaucuacacgacuuucgcucggacgagaucgaacaucucguuguggaggaguuggucaagaagagagaagagugucuggaugcacuagaguccaucaugacuaccaagucagugaguuucagacgucucagccacuugagaaagcuugucccuggguucggaaaagcauacaccauauucaacaaaaccuugauggaagcugaugcucacuacaagucaguccgaaccuggaaugagaucauccccucaaaaggguguuugagagucggggggaggugucauccucauguaaacgggguguuuuucaacgguauaauccuggguccugacggccauguucuaaucccagagaugcaaucgucccuccuucagcaacauauggaguuguuggaauccucaguuaucccccugaugcacccuuuagcagacccgucuacaguuuucaaggauggugaugaagcagagaauuuuguggagguucaccuuccugauguacacaaacagaucucgggaguugaccugggucucccuaacugggggaaguauguuuugguaagugcagggguccugaucgcuuugauguuaauaauuuuucuaaugacauguugcggaagagucaaucgaccaaaguccacacaacacaaucuuggcgggacagggaggaaggugucaguaacuccccaaagcggaaagguuauaucuucaugggagucauacaaaagcggaggugggaccagacuguga

SEQ ID NO: 62830 - RNA, 1575 nt, Artificial Sequence
  derived and/or modified CDS sequence (wt) from glycoprotein__RABV__DQ076099.1
augguuccucaagcucuuuuguucauaccucuucugguuuuuccaauguguuucgggaaauuccccaucuacacgauaccagacaaacuugguccuuggagcccaauugacauacaucaucucagcuguccaaacaacuugguuguagaggaugaagaaugcaccaacuugucggguuuuuccuacauggaacuuaaagugggauacauuucggccauaaaagugaacggguucacgugcacagguguggugacagaggcagaaacuuauacuaacuuuguugguuaugucaccacuacguucaaaagaaagcauuuccgcccaacaccggaugcaugucgagccgcuuacaacuggaaaauggccggugaccccagauaugaagaaucucugcacaauccuuacccugacuaccacuggcuucgaacuguaaaaaccacgaaggaaucccuagucaucauauccccaaguguagcggaccuggacccauacgauaaaucccuucacucuagagucuuuccuaacggaaagugcucaggaauaacgauauccucuaccuacugcccuaccaaccaugauuacacuaucuggcucccugagaauccaagacuggggacaucuugugacaucuuugccaauaguagagggaagagagcauccaaagggagcaagacuugcggguuuguugaugaaagagguuuguauaagucauugaaaggggcaugcaaacuuaaguugugugggguccuuggacuuagacuuauggauggaacgugggucgcaaugcaaacgucggacgagaccaaauggugccccccagaucagcugguaaaucuacacgacuuucgcucggacgagaucgaacaucucguuguggaggaguuggucaagaagagagaagagugucuggaugcacuagaguccaucaugacuacuaagucagugaguuucagacgucucagccacuugagaaagcuugucccuggguucggaaaagcauacaccauauucaacaaaaccuugauggaagcugaugcucacuacaagucaguccgaaccuggaaugagaucauccccucaaaaggguguuugagagucggggggaggugucauccucauguaaacgggguguuuuucaacgguauaauccugggucaugauggccauguucuaaucccagagaugcaaucgucccuccuucagcaacauauggaguuguuggaauccucaguuaucccccugaugcacccuuuagcagacccgucuacaguuuucaaggauggugaugaagcagaggacuuuguggagguucaccuuccugauguacacaaacagaucucgggaguugaccugggucucccuaacugggggaaguauguuuugguaagugcagggguccugaucgccuugauguugauaauuuuucuaaugacauguugcggaagagucaaucgaccaaaguccacacaacacaaucuuggcgagacagggaggaaggugucaguaacuucucaaagcggaaagguuauaucuucaugggagucauacaaaagcggaggugggaccagacuguga

SEQ ID NO: 62831 - RNA, 1575 nt, Artificial Sequence
  derived and/or modified CDS sequence (wt) from glycoprotein__RABV__DQ076100.1
augguuccucaggcucuuuuguucguaccucuucugguuuuuucaauguguuucgggaaauuccccaucuacacgauaccagacaaacuugguccuuggagcccaauugacauacaucaucucagcuguccaaacaacuugguuguagaggaugaaggaugcaccaacuugucggguuuuuccuacauggaacuuaaagugggauacauuucggccauaaaagugaacggguucacgugcacagguguggugacagaggcagaaacuuauacuaacuuuguugguuaugucaccacuacguucaaaagaaagcauuuccgcccaacaccggaugcaugucgagccgcuuacaacuggaaaauggccggugaccccagauaugaagagucucugcacaauccuuacccugacuaccacuggcuucgaacuguaaagaccacaaaggaaucccuagucaucauauccccaaguguagcggaccuggacccauacgauaaaucccuucacucuagagucuuuccuaacggaaagugcucaggaauaacaauauccucuaccuacugcccuaccaaccaugauuacacuaucuggcucccugagaauccgagacuggggacaucuugugacaucuuuaccaauaguagagggaagagagcauccaaagggagcaagacuugcggguuuguugaugaaagagguuuguauaagucauugaaaggggcaugcaaacuuaaguugugugggguccuuggacuuaggcuuauggauggaacgugggucgcaaugcaaacgucggacgagaccaaauggugccccccagaucagcugguaaaucugcacgacuuucgcucggacgagaucgaacaucucguuguggaggaguuggucaagaagagagaagagugucuggaugcacuagaguccauuaugacuacuaagucagugaguuuuagacgucucagccacuugagaaagcuugucccuggguucggaaaagcauacaccauauucaacaaaaccuugauggaagcugaugcucacuacaagucaguccgaaccuggaaugagaucauccccucaaaaggguguuugagagucggggggaggugucauccucauguaaacgggguguuuuucaacgguauaauccuggguccugauggccauguucuaaucccagagaugcaaucgucccuccuucagcagcauauggaguuguuggaauccucaguuaucccccugaugcacccuuuagcagacccgucuacaguuuucaaggauggugaugaagcagaggauuuuguggagguucaccuuccugauguacacaaacagaucucgggaguugaccugggucucccuaacugggggaaguauguuuugguaagugcagggguccugaucgccuugauguugauaauuuuucuaaugacauguugcggaagagucaaucgaccaaaguccacacaacacaaucuuggagggacagggaggaaggugucgguaacuucccaaagcggaaagguuauaucuucaugggagucauacaaaagcggaggugagaccagacuguga

SEQ ID NO: 62832 - RNA, 1575 nt, Artificial Sequence
  derived and/or modified CDS sequence (wt) from glycoprotein__RABV__DQ076102.1
augguuccucaggcucuuuuguuuguaccucuucugguuuuuucaauguguuucgggaaauuccccaucuacacgauaccagacaaacuugguccuuggagcccaauuggcauacaucaucucagcuguucaaacaacuugguuguagaggaugaaggaugcaccaacuugucggguuuuuccuacauggaacuuaaagugggauacauuucggccauaaaagugaacggguucacgugcacagguguggugacagaggcagaaacuuauacuaacuuuguugguuaugucaccacuacguucaaaagaaagcauuuccgcccaacaccggaugcaugucgagccgcuuacaacuggaaaauggccggugaccccagauaugaagagucucugcacaauccuuacccugacuaccacuggcuucgaacuguaaagaccacaaaggaaucccuagucaucauauccccaaguguagcggaccuggacccauacgauaaaucccuucacucuagagucuuuccuaacggaaagugcucaggaauaacaauauccucuaccuacugcccuaccaaccaugauuacacuaucuggcucccugagaauccgagacuggggacaucuugugacaucuuuaccaauaguagagggaagagagcauccaaagggagcaagacuugcggguuuguugaugaaagagguuuguauaagucauugaaaggggcaugcaaacuuaaguugugugggguccuuggacuuaggcuuauggauggaacgugggucgcaaugcaaacgucggacgagaccaaauggugccccccagaucagcugguaaaucugcacgacuuucgcucggacgagaucgaacaucucguuguggaggaguuggucaagaagagggaagagugucuggaugcacuagaguccauuaugacuacuaagucagugaguuuuagacgucucagccacuugagaaagcuugucccuggguucggaaaagcauacaccauauucaacaaaaccuugauggaagcugaugcucacuacaagucaguccgaaccuggaaugagaucauccccucaaaaggguguuugagagucggggggaggugucauccucauguaaacgggguguuuuucaacgguauaauccuggguccugauggccauguucuaaucccagagaugcaaucgucccuccuucagcagcauauggaguuguuggaauccucaguuaucccccugaugcacccuuuagcagacccgucuacaguuuucaaggauggugaugaagcagaggauuuuguggagguucaccuuccugauguacacaaacagaucucgggaguugaccugggucucccuaacugggggaaguauguuuugguaagugcagggguccugaucgccuugauguugauaauuuuucuaaugacauguugcggaagagucaaucgaccaaaguccacacaacacaaucuuggagggacagggaggaaggugucgguaacuucccaaagcggaaagguuauaucuucaugggagucauacaaaagcggaggugagaccagacuguga

SEQ ID NO: 62833 - RNA, 1575 nt, Artificial Sequence
  derived and/or modified CDS sequence (wt) from glycoprotein__RABV__DQ076103.1
augguuccucaggcucuuuuguucguaccucuucugguuuucucaauguguuucgggaaauuccccaucuacacgauaccagacaaacuugguccuuggagcccaauugacauacaucaucucagcuguccaaacaacuugguuguagaggaugaaggaugcaccaacuugucggguuuuuccuacauggaacucaaagugggauacauuucggccauaaaagugaacggguucacgugcacagguguggugacagaggcagaaacuuauacuaacucuguugguuaugucaccacuacguucaaaagaaagcauuuccgcccaacaccggaugcaugucgagccgcuuacaacuggaaaauggccggugaccccagauaugaagagucucugcacaauccuuacccugacuaccacuggcuucgaacuguaaagaccacaaaggaaucccuagucaucauauccccaaguguagcggaccuggacccauacgauaaaucccuucacucuagagucuuuccuaacggaaagugcucaggaauaacaauauccucuaccuacugcccuaccaaccaugauuacacuaucuggcucccugagaauccgagacuggggacaucuugugacaucuuuaccaauaguagagggaagagagcauccaaagggagcaagacuugcggguuuguugaugaaagagguuuguauaagucauugaaaggggcaugcaaacuuaaguugugugggguccuuggacuuaggcuuauggauggaacgugggucgcaaugcaaacgucggacgagaccaaauggugccccccagaucagcugguaaaucugcacgacuuucgcucggacgagaucgaacaucucguuguggaggaguuggucaagaagagagaagagugucuggaugcacuagaguccauuaugacuacuaagucagugaguuuuagacgucucagccacuugagaaagcuugucccuggguucggaaaagcauacaccauauucaacaaaaccuugauggaagcugaugcucacuacaagucaguccgaaccuggaaugagaucauccccucaaaaggguguuugagagucggggggaggugucauccucauguaaacgggguguuuuucaacgguauaauccuggguccugauggccauguucuaaucccagagaugcaaucgucccuccuucagcagcauauggaguuguuggaauccucaguuaucccccugaugcacccuuuagcagacccgucuacaguuuucaaggauggugaugaagcagaggauuuuguggagguucaccuuccugauguacacaaacagaucucgggaguugaccugggucucccuaacugggggaaguauguuuugguaagugcagggguccugaucgccuugauguugauaauuuuucuaaugacauguugcggaagagucaaucgaccaaaguccacacaacacaaucuuggagggacagggaggaaggugucgguaacuucccaaagcggaaagguuauaucuucaugggagucauacaaaagcggaggugagaccagacuguga

SEQ ID NO: 62834 - RNA, 1575 nt, Artificial Sequence
  derived and/or modified CDS sequence (wt) from glycoprotein__RABV__DQ076104.1
augguuccucaggcucuuuuguucguaccucuucugguuuuuucaauguguuucgggaaauuccccaucuacacgauaccagacaaacuugguccuuggaguccaauugacauacaucaucucagcuguccaaacaacuugguuguagaggaugaaggaugcaccaacuugucggguuuuuccuacauggaacuuaaagugggauacauuucggccauaaaagugaacggguucacgugcacagguguggugacagaggcagaaacuuauacuaacuuuguugguuaugucaccacuacguucaaaagaaagcauuuccgcccaacaccggaugcaugucgaaccgcuuacaacuggaaaauggccggugaccccagauaugaagaaucucugcacaauccuuacccugacuaccacuggcuucgaacuguaaagaccacaaaggaaucccuagucaucauauccccaaguguagcggaccuggacccauacgauaaaucccuucacucuagagucuuuccuaacggaaagugcucaggaauaacaauauccucuaccuacugcccuaccaaccaugauuacacuaucuggcucccugagaauccgagacuggggacaucuugugacaucuuuaccaauaguagagggaagagagcauccaaagggagcaagacuugcggguuuguugaugaaagagguuuguauaagucauugaaaggggcaugcaaacuuaaguugugugggguccucggacuuaggcuuauggauggaacgugggucgcaaugcaaacgucggacgagaccaaauggugccccccagaucagcugguaaaucugcacgacuuucgcucggacgagaucgaacaucucguuguggaggaguuggucaagaagagagaagagugucuggaugcacuagaguccauuaugacuacuaagucagugaguuuuagacgucucagccacuugagaaagcuugucccuggguucggaaaagcauacaccauauucaacaaaaccuugauggaagcugaugcucacuacaagucaguccgaaccuggaaugagaucauccccucaaaaggguguuugagagucggggggaggugucauccucauguaaacgggguguuuuucaacgguauaauccuggguccugauggccauguucuaaucccagagaugcaaucgucccuccuucagcagcauauggaguuguuggaauccucaguuaucccccugaugcacccuuuggcagacccgucuacaguuuucaaggauggugaugaagcagaggauuuuguggagguucaccuuccugauguacacaaacagaucucgggaguugaccugggucucccuaacugggggaaguauguuuugguaagugcagggguccugaucgccuugauguugauaauuuuucuaaugacauguugcggaagagucaaucgaccaaaguccacacaacacaaucuuggagggacagggaggaaggugucgguaacuucccaaagcggaaagguuauaucuucaugggagucauacaaaagcggaggugagaccagacuguga

SEQ ID NO: 62835 - RNA, 1575 nt, Artificial Sequence
  derived and/or modified CDS sequence (wt) from glycoprotein__RABV__DQ076105.1
augguuccucaggcucuuuuguucguaccucuucugguuuuuucaauguguuucgggagauuccccaucuacacgauaccagacaaacuugguccuuggagcccaauugacauacaucaucucagcuguccaaacaacuugguuguagaggaugaaggaugcaccaacuugucggguuuuuccuacauggaacuuaaagugggauacauuucggccauaaaagugaacggguucacgugcacagguguggugacagaggcagaaacuuauacuaacuuuguugguuaugucaccacuacguucaaaagaaagcauuuccgcccaacaccggaugcaugucgagccgcuuacaacuggaaaauggccggugaccccagauaugaagaaucucugcacaauccuuacccugacuaccacuggcuucgaacuguaaagaccacaaaggaaucccuaguuaucauauccccaaguguagcggaccuagacccauacgauaaaucccuucacucuagagucuuuccuaacggaaagugcucaggaauaacaauauccucuaccuacugcccuaccaaccaugauuacacuaucuggcucccugagaauccgagacuggggacaucuugugacaucuuuaccaauaguagagggaagagagcauccaaagggagcaagacuugcggguuuguugaugaaagagguuuguauaagucauugaaaggggcaugcaaacuuaaguugugugggguccuuggacuuaggcuuauggauggaacgugggucgcaaugcaaacgucggacgagaccaaauggugccccccagaucagcugguaaaucugcacgacuuucgcucggacgagaucgaacaucucguuguggaggaguuggucaagaagagagaagagugucuggaugcacuagaguccaucaugacuacuaagucagugaguuuuagacgucucagccacuugagaaagcuugucccuggguucggaaaagcauacaccauauucaacaaaaccuugauggaagcugaugcucacuacaagucaguccgaaccuggaaugagaucauccccucaaaaggguguuugagagucggggggaggugucauccucauguaaacgggguguuuuucaacgguauaauccuggguccugauggccauguucuaaucccagagaugcaaucgucccuccuucagcagcauauggaguuguuggaauccucaguuaucccccugaugcacccuuuagcagacccgucuacaguuuucaaggauggugaugaagcagaggauuuuguggagguucaccuucccgauguacacaaacagaucucgggaguugaccugggucucccuaacugggggaaguauguuuugguaagugcagggguccugaucgccuugauguugaugauuuuucuaaugacauguugcggaagagucaaucgaccaaaguccacacaacacaaucuuggagggacagggaggaaggugucggugacuucccaaagcggaaagguuauaucuucaugggagucauacaaaagcggaggugagaccagacuguga

SEQ ID NO: 62836 - RNA, 1575 nt, Artificial Sequence
  derived and/or modified CDS sequence (wt) from glycoprotein__RABV__DQ849044.1
augauuccucaaguucuuuuguuuguuccccuucuaguuuucucgucguguuuugggaaauuccccauuuacacgauaccagacaaacuugguccauggagucccaucgauauacaucaucucagcuguccgaacaaucugguuguggaagaugaaggaugcaccaaucugucuggauuuuccuacauggaacucaaagugggauauauuucagccauaaaagugaacggauucaccuguacagguguggugacagaagcagaaaccuacacgaacuuuguugguuaugucaccaccacguuuaagagaaagcacuuucgcccuacgccggaugcgugcagagccgcguacaacuggaagauggcuggugaccccagguaugaagagucucugcacaauccguacccugauuaucacuggcuccgaacugucaagaccuccaaggagucccuugucaucauaucuccgagcguugcagauuuggacccguacgauaaaucccuucacucgagaguuuuuccuggcggaaaaugcucaggaauaaccguguccuccacuugcugcucuacuaaccacgacuacaccaucuggaugccugaaaauccuagacugggaacuucgugugacauuuucaccaauaguagggggaagagggcaucaaaagggggcaagacuuguggauuuguggaugaaagaggcuuguacaagucuauaaagggagcaugcaagcugaagcuaugugggguucuaggacuuagacuuauggacggaacaugggucgcaauucagacaucagaugagaucaaauggugcucuccugaucagcuaguaaaucuacacgacuuucacucagaugagauugaacaucuuguuguggaggaguuggucaaaaagagggaagagugucuggacgcacuggagacuauuaugaccacaaaguccgugaguuucaggcgucuuagucauuugaggaagcuagucccuggguuuggaaaggcguauaccauauucaacaaaaccuugauggaggcugaugcucacuauaaaucaauccggacuuggaaugaaaucauccccucuaaaggguguuuaagaguuggggggagaugucauccucaugugaacgggguguucuucaacggcauuauacuggguccugacggacauguucuaaucccagagaugcaaucgucccuccuccaccagcauauggaauuguuggaguccucagucaucccuuugaugcaucccuuagcagacccgucaacaguuuuuaaagacggcgacgaggcagaggacuuuguugagguucaccuuccggaugugcacaagcagaucucggggguugaucuuggucucccaaacugggggaaguacgugcugguaagugcaggugcucugacugcauuaauguugaugauuuucuuaaugacguguugcagaaagacuaauagagcagagucaauacaacacaguccuggagagacagggaggaaagugucgguaacuucucacaacggaagggucauaucuucaugggaaucauauaaaaguggaggugagaccaagcuguga

SEQ ID NO: 62837 - RNA, 1575 nt, Artificial Sequence
  derived and/or modified CDS sequence (wt) from glycoprotein__RABV__DQ849045.1
augauuccucaaguucuuuuguuuguuccccuucuaguuuuuucgucguguuuugggaaauuccccauuuacacgauaccagacaaacuugguccauggagucccaucgauauacaucaucucagcuguccgaacaaucugguuguggaagaugaaggaugcaccaaucugucuggauuuuccuacauggaacucaaagugggauauauuucagccauaaaagugaacggauucaccuguacagguguggugacagaagcagaaaccuacacgaacuuuguugguuaugucaccaccacguuuaagagaaagcacuuucgcccuacgccggaugcgugcagagccgcguacaacuggaagauggcuggugaccccagguaugaagagucucugcacaauccguacccugauuaucacuggcuccgaacugucaagaccuccaaggagucccuugucaucauaucuccgagcguugcagauuuggacccguacgauaaaucccuucacucgagaguuuuuccuggcggaaaaugcucaggaauaaccguguccuccacuugcugcuuuacuaaccacgacuacaccaucuggaugccugaaaauccuagacugggaacuucgugugacauuuucaccaauaguagagggaagagggcaucaaaagggggcaagacuuguggauuuguggaugaaagaggcuuguacaagucucuaaagggagcaugcaagcugaagcuaugugggguucuaggacuuagacuuauggacggaacaugggucgcaauucagacaucagaugagaucaaauggugcucuccugaucagcuaguaaaucuacacgacuuucacucagaugagauugaacaucuuguuguggaggaguuggucaaaaagagggaagagugucuggacgcacuggagacuauuaugaccacaaaguccgugaguuucaggcgucuuagucauuugaggaagcuagucccuggguuuggaaaggcguauaccauauucaacaaaaccuugauggaggcugaugcucacuauaaaucaauccggacuuggaaugaaaucauccccucuaaaggguguuuaagaguuggggggagaugucauccucaugugaacgggguguucuucaacggcaucauacuggguccugacggacauguucuaaucccagagaugcaaucgucccuccuccaccagcauauggaauuguuggaguccucagucaucccuuugaugcaucccuuagcagacccgucaacaguuuuuaaagacggcgacgaggcagaggacuuuguugagguucaccuuccggaugugcacaagcagaucucggggguugaucuuggucucccaaacugggggaaguacgugcugguaagugcaggugcucugacugcauuaauguugaugauuuucuuaaugacguguugcagaaagacuaauagagcagagucaauacaacacaguccuggagagacagggaggaaagugucgguaacuucucacaacggaagggucauaucuucaugggaaucauauaaaaguggaggugagaccaagcuguga

SEQ ID NO: 62838 - RNA, 1575 nt, Artificial Sequence
  derived and/or modified CDS sequence (wt) from glycoprotein__RABV__DQ849046.1
augauuccucaaguucuuuuguuuguuccccuucuaguuuucucgucguguuuugggaaauuccccauuuacacgauaccagacaaacuugguccauggagucccaucgauauacaucaucucagcuguccgaacaaucugguuguggaagaugaaggaugcaccaaucugucuggauuuuccuacauggaacucaaagugggauauauuucagccauaaaagugaacggauucaccuguacagguguggugacagaagcagaaaccuacacgaacuuuguugguuaugucaccaccacguuuaagagaaagcacuuucgcccuacgccggaugcgugcagagccgcguacaacuggaagauggcuggugaccccagguaugaagagucucugcacaauccguacccugauuaucacuggcuccgaacugucaagaccuccaaggagucccuugucaucauaucuccgagcguugcagauuuggacccguacgauaaaucccuucacucgagaguuuuuccuggcggaaagugcucaggaauaaccguguccuccacuugcugcuuuacuaaccacgaauacaccaucuggaugccugaaaauccuagacugggaaccucgugugacauuuucaccaauaguagagggaagagggcaucaaaagggggcaagacuuguggauuuguggaugaaagaggcuuguacaagucucuaaagggagcaugcaagcugaagcuaugugggguucuaggacuuagacuuauggacggaacaugggucgcaauucagacaucagaugagaucaaauggugcucuccugaucagcuaguaaaucuacacgacuuucacucagaugagauugaacaucuuguuguggaggaguuggucaaaaagagggaagagugucuggacgcacuggagacuauuaugaccacaaaguccgugaguuucaggcgucuuagucauuugaggaagcuagucccuggguuuggaaaggcguauaccauauucaacaaaaccuugauggaggcugaugcucacuauaaaucaauccggacuuggaaugaaaucauccccucuaaaggguguuuaagaguuggggggagaugucauccucaugugaacgggguguucuucaacggcauuauacuggguccugacggacauguucuaaucccagagaugcaaucgucccuccuccaccagcauauggaauuguuggaguccucagucaucccuuugaugcaucccuuagcagacccgucaacaguuuuuaaagacggcgacgaggcagaggacuuuguugagguucaccuuccggaugugcacaagcagaucucggggguugaucuuggucucccaaacugggggaaguacgugcugguaagugcaggugcucugacugcauuaauguugaugauuuucuuaaugacguguugcagaaagacuaauagagcagagucaauacaacacaguccuggagagacagggaggaaagugucgguaacuucucacaacggaagggucauaucuucaugggaaucauauaagaguggaggugagaccaagcuguga

SEQ ID NO: 62839 - RNA, 1575 nt, Artificial Sequence
  derived and/or modified CDS sequence (wt) from glycoprotein__RABV__DQ849047.1
augauuccucaaguucuuuuguuuguuccccuucuaguuuucucgucguguuuugggaaauuccccauuuacacgauaccagacaaacuugguccauggagucccaucgauauacaucaucucagcuguccgaacaaucugguuguggaagaugaaggaugcaccaaucugucuggauuuuccuacauggaacucaaagugggauauauuucagccauaaaagugaacggauucaccuguacagguguggugacagaagcagaaaccuacacgaacuuuguugguuaugucaccaccacguuuaagagaaagcacuuucgcccuacgccggaugcgugcagagccgcauacaacuggaagauggcuggugaccccagguaugaagagucucugcacaauccguacccugauuaccacuggcuccgaacugucaagaccuccaaggagucccuugucaucauaucuccgagcguugcagauuuggacccguacgauaaaucccuucacucgagaguuuuuccuggcggaaaaugcucaggaauaaccguguccuccacuugcugcucuacuaaccacgacuacaccaucuggaugccugaaaauccuagacugggaacuucgugugacauuuucaccaacaguagagggaagagggcaucaaaagggggcaagacuuguggauuuguggaugaaagaggcuuguacaagucccuaaagggagcaugcaagcugaagcuaugugggguucuaggacuuagacuuauggacggaacaugggucgcaauucagacaucagaugagaucaaauggugcucuccugaucagcuaguaaaucuacacgacuuucacucagaugagauugaacaucuuguuguggaggaguuggucaaaaagagggaagagugucuggacgcacuggagacuauuaugaccacaaaguccgugaguuucaggcgucuuagucauuugaggaagcuagucccuggguuuggaaaggcguauaccauauucaacaaaaccuugauggaggcugaugcucacuauaaaucaauccggacuuggaaugaaaucauccccucuaaaggguguuuaagaguuggggggagaugucauccucaugugaacgggguguucuucaacggcauuauacuggguccugacggacauguucuaaucccagagaugcaaucgucccuccuccaccagcauauggaauuguuggaguccucagucaucccuuugaugcaucccuuagcagacccgucaacaguuuuuaaagacggcgacgaggcagaggacuuuguugagguucaccuuccggaugugcacaagcagaucucggggguugaucuuggucucccaaacugggggaaguacgugcugguaagugcaggugcucugacugcauuaauguugaugauuuucuuaaugacguguugcagaaagacuaauagagcagagucaauacaacacaguccuggagagacagggaggaaagugucgguaacuucucacaacggaagggucauaucuucaugggaaucauauaaaaguggaggugagaccaagcuguga

SEQ ID NO: 62840 - RNA, 1575 nt, Artificial Sequence
  derived and/or modified CDS sequence (wt) from glycoprotein__RABV__DQ849048.1
augauuccucaaguucuuuuguuuguuccccuucuaguuuucucgucguguuuugggaaauuccccauuuacacgauaccagacaaacuugguccauggagucccaucgauauacaucaucucagcuguccgaacaaucugguuguggaagaugaaggaugcaccaaucugucuggauuuuccuacauggaacucaaagugggauauauuucagccauaaaagugaacggauucaccuguacagguguggugacagaagcagaaaccuacacgaacuuuguugguuaugucaccaccacguuuaagagaaagcacuuucgcccuacgccggaugcgugcagagccgcauacaacuggaagauggcuggugaccccagguaugaagagucucugcacaauccguacccugauuaucacuggcuccgaacugucaagaccuccaaggagucccuugucaucauaucuccgagcguugcagauuuggacccguacgauaaaucccuucacucgagaguuuuuccuggcggaaaaugcucaggaauaaccguguccuccacuugcugcucuacuaaccacgacuacaccaucuggaugccugaaaauccuagacugggaacuucgugugacauuuucaccaauaguagagggaagagggcaucaaaagggggcaagacuuguggauuuguggaugaaagaggcuuguacaagucucuaaagggagcaugcaagcugaagcuaugugggguucuaggacuuagacuuauggacggaacaugggucgcaauucagacaucagaugagaucaaauggugcucuccugaucagcuaguaaaucuacacgacuuucacucagaugagauugaacaucuuguuguggaggaguuggucaaaaagagggaagagugucuggacgcacuggagacuauuaugaccacaaaguccgugaguuucaggcgucuuagucauuugaggaagcuagucccuggguuuggaaaggcguauaccauauucaacaaaaccuugauggaggcugaugcucacuauaaaucaauccggacuuggaaugaaaucauccccucuaaaggguguuuaagaguuggggggagaugucauccucaugugaacgggguguucuucaacggcauuauacuggguccugacggacauguucuaaucccagagaugcaaucgucccuccuccaccagcauauggaauuguuggaguccucagucaucccuuugaugcaucccuuagcagacccgucaacaguuuuuaaagacggcgacgaggcagaggacuuuguugagguucaccuuccggaugugcacaagcagaucucggggguugaucuuggucucccaaacugggggaaguacgugcugguaagugcaggugcucugacugcauuaauguugaugauuuucuuaaugacguguugcagaaagacuaauagagcagagucaauacaacacaguccuggagagacagggaggaaagugucgguaacuucucacaacggaagggucauaucuucaugggaaucauauaaaaguggaggugagaccaagcuguga

SEQ ID NO: 62841 - RNA, 1575 nt, Artificial Sequence
  derived and/or modified CDS sequence (wt) from glycoprotein__RABV__DQ849049.1
augauuccucaaguucuuuuguuuguuccccuucuaguuuucuugucguguuuugggaaauuccccauuuacacgauaccagacaaacuugguccauggagucccaucgauauacaucaucucagcuguccgaacaaucugguuguggaagaugaaggaugcaccaaucugucuggauuuuccuacauggaacucaaagugggauauauuucagccauaaaagugaacggauucaccuguacagguguggugacagaagcagaaaccuacacgaacuuuguugguuaugucaccaccacguuuaagagaaagcacuuucgcccuacgccggaugcgugcagagccgcguacaacuggaagauggcuggugaccccagguaugaagagucucugcacaauccguacccugauuaucacuggcuccgaacugucaagaccuccaaggagucccuugucaucauaucuccgagcguugcagauuuggacccguacgauaaaucccuucacucgagaguuuuuccuggcggaaagugcucaggaauaaccguguccuccacuugcugcucuacuaaccacgacuacaccaucuggaugccugaaaauccuagacugggaaccucgugugacauuuucaccaauaguagagggaagagggcaucaaaagggggcaagacuuguggauuuguggaugaaagaggcuuguacaagucucuaaagggagcaugcaagcugaagcuaugugggguucuaggacuuagacuuauggacggaacaugggucgcaauucagacaucagaugagaucaaauggugcucuccugaucagcuaguaaaucuacacgacuuucacucagaugagauugaacaucuuguuguggaggaguuggucaaaaagagggaagagugucuggacgcacuggagacuauuaugaccacaaaguccgugaguuucaggcgucuuagucauuugaggaagcuagucccuggguuuggaaaggcguauaccauauucaacaaaaccuugauggaggcugaugcucacuauaaaucaauccggacuuggaaugaaaucauccccucuaaaggguguuuaagaguuggggggagaugucauccucaugugaacgggguguucuucaacggcauuauacuggguccugacggacauguucuaaucccagagaugcaaucgucccuccuccaccagcauauggaauuguuggaguccucagucaucccuuugaugcaucccuuagcagacccgucaacaguuuuuaaagacggcgacgaggcagaggacuuuguugagguucaccuuccggaugugcacaagcagaucucggggguugaucuuggucucccaaacugggggaaguacgugcugguaagugcaggugcucugacugcauuaauguugaugauuuucuuaaugacguguugcagaaagacuaauagagcagagucaauacaacacaguccuggagagauagggaggaaagugucgguaacuucucacaacggaagggucauaucuucaugggaaucauauaaaaguggaggugagaccaagcuguga

SEQ ID NO: 62842 - RNA, 1575 nt, Artificial Sequence
  derived and/or modified CDS sequence (wt) from glycoprotein__RABV__DQ849050.1
augauuccucaaguucuuuuguuuguuccccuucuaguuuucucgucguguuuugggaaauuccccauuuacacgauaccagacaaacuugguccauggagucccaucgauauacaucaucucagcuguccgaacaaucugguuguggaagaugaaggaugcaccaaucugucuggauuuuccuacauggaacucaaagugggauauauuucagccauaaaagugaacggauucaccuguacagguguggugacagaagcagaaaccuacacgaacuuuguugguuaugucaccaccacguuuaagagaaagcacuuucgcccuacgccggaugcgugcagagccgcguacaacuggaagauggcuggugaccccagguaugaagagucucuccacaauccguacccugauuaucacuggcuccgaacugucaagaccuccaaggagucccuugucaucauaucuccgagcguugcagauuuggacccguacgauaaaucccuucacucgagaguuuuuccuggcggaaaaugcucaggaauaaccguguccuccacuugcugcucuacuaaccacgacuacaccaucuggaugccugaaaauccuagacugggaacuucgugugacauuuucaccaauaguagagggaagagggcaucaaaagggggcaagacuuguggauuuguggaugaaagaggcuuguacaagucucuaaagggagcaugcaagcugaagcuaugugggguucuaggacuuagacuuauggacggaacaugggucgcaauucagacaucagaugagaucaaauggugcucuccugaucagcuaguaaaucuacacgacuuucacucagaugagauugaacaucuuguuguggaggaguuggucaaaaagagggaagagugucuggacgcacuggagacuauuaugaccacaaaguccgugaguuucaggcgucuuagucauuugaggaagcuagucccuggguuuggaaaggcguauaccauauucaacaaaaccuugauggaggcugaugcucacuauaaaucaauccggacuuggaaugaaaucauccccucuaaaggguguuuaagaguuggggggagaugucauccucaugugaacgggguguucuucaacggcauuauacuggguccugacggacauguucuaaucccagagaugcaaucgucccuccuccaccagcauauggaauuguuggaguccucagucaucccuuugaugcaucccuuagcagacccgucaacaguuuuuaaagacggcgacgaggcagaggacuuuguugagguucaccuuccggaugugcacaagcagaucucggggguugaucuuggucucccaaacugggggaaguacgugcugguaagugcaggugcuuugacugcauuaauguugaugauuuucuuaaugacguguugcagaaagacuaauagagcagagucaauacaacacaguccuggagagacagggaggaaagugucgguaacuucucacaacggaagggucauaucuucaugggaaucauauaaaaguggaggugagaccaagcuguga

SEQ ID NO: 62843 - RNA, 1575 nt, Artificial Sequence
  derived and/or modified CDS sequence (wt) from glycoprotein__RABV__DQ849051.1
augauuccucaaguucuuuuguuuguuccccuucuaguuuucucgucguguuuugggaaauuccccauuuacacgauaccagacaaacuugguccauggagucccaucgauauacaucaucucagcuguccgaacaaucugguuguggaagaugaaggaugcaccaaucugucuggauuuuccuacauggaacucaaagugggauauauuucagccauaaaagugaacggauucaccuguacagguguggugacagaagcagaaaccuacacgaacuuuguugguuaugucaccaccacguuuaagagaaagcacuuucgcccuacgccggaugcgugcagagccgcauacaacuggaagauggcuggugaccccagguaugaagagucucugcacaauccguacccugauuaccacuggcuccgaacugucaagaccuccaaggagucccuugucaucauaucuccgagcguugcagauuuggacccguacgauaaaucccuucacucgagaguuuuuccuggcggaaaaugcucaggaauaaccguguccuccacuugcugcucuacuaaccacgacuacaccaucuggaugccugaaaauccuagacugggaacuucgugugacauuuucaccaauaguagagggaagagggcaucaaaagggggcaagacuuguggauuuguggaugaaagaggcuuguacaagucucuaaagggagcaugcaagcugaagcuaugugggguucuaggacuuagacuuauggacggaacaugggucgcaauucagacaucagaugagaucaaauggugcucuccugaucagcuaguaaaucuacacgacuuucacucagaugagauugaacaucuuguuguggaggaguuggucaaaaagagggaagagugucuggacgcacuggagacuauuaugaccacaaaguccgugaguuucaggcgucuuagucauuugaggaagcuagucccuggguuuggaaaggcguauaccauauucaacaaaaccuugauggaggcugaugcucacuauaaaucaauccggacuuggaaugaaaucauccccucuaaaggguguuuaagaguuggggggagaugucauccucaugugaacgggguguucuucaacggcauuauacuggguccugacggacauguucuaaucccagagaugcaaucgucccuccuccaccagcauauggaauuguuggaguccucagucaucccuuugaugcaucccuuagcagacccgucaacaguuuuuaaagacggcgacgaggcagaggacuuuguugagguucaccucccggaugugcacaagcagaucucggggguugaucuuggucucccaaacugggggaaguacgugcugguaagugcaggugcucugacugcauuaauguugaugauuuucuuaaugacguguugcagaaagacuaauagagcagagucaauacaacacaguccuggagagacagggaggaaagugucgguaacuucucacaacggaagggucauaucuucaugggaaucauauaaaaguggaggugagaccaagcuguga

SEQ ID NO: 62844 - RNA, 1575 nt, Artificial Sequence
  derived and/or modified CDS sequence (wt) from glycoprotein__RABV__DQ849052.1
augauuccucaaguucuuuuguuuguuccccuucuaguuuucucgucguguuuugggaaauuccccauuuacacgauaccagacaaacuugguccauggagucccaucgauauacaucaucucagcuguccgaacaaucugguuguggaagaugaaggaugcaccaaucugucuggauuuuccuacauggaacucaaagugggauauauuucagccauaaaagugaacggauucaccuguacagguguggugacagaagcagaaaccuacccgaacuuuguugguuaugucaccaccacguuuaagagaaagcacuuucgcccuacgccggaugcgugcagagccgcauacaacuggaagauggcuggugaccccagguaugaagagucucugcacaauccguacccugauuaccacuggcuccgaacugucaagaccuccaaggagucccuugucaucauaucuccgagcguugcagauuuggacccguacgauaaaucccuucacucgagaguuuuuccuggcggaaaaugcucaggaauaaccguguccuccacuugcugcuuuacuaaccacgacuacacuaucuggaugccugaaaauccuagacugggaacuucgugugacauuuucaccaauaguagagggaagagggcaucaaaagggggcaagacuuguggauuuguggaugaaagaggcuuguacaagucucuaaagggagcaugcaagcugaagcuaugugggguucuaggacuuagacuuauggacggaacaugggucgcaauucagacaucagaugagaucaaauggugcucuccugaucagcuaguaaaucuacacgacuuucacucagaugagauugaacaucuuguuguggaggaguuggucaaaaagagggaagagugucuggacgcacuggagacuauuaugaccacaaaguccgugaguuucaggcgccuuagucauuugaggaagcuagucccuggguuuggaaaggcguauaccauauucaacaaaaccuugauggaggcugaugcucacuauaaaucaauccggacuuggaaugaaaucauccccucuaaaggguguuuaagaguuggggggagaugucauccucaugugaacgggguguucuucaacggcauuauacuggguccugacggacauguucuaaucccagagaugcaaucgucccuccuccaccagcauauggaauuguuggaguccucagucaucccuuugaugcaucccuuagcagacccgucaacaguuuuuaaagacggcgacgaggcagaggacuuuguugagguucaccuuccggaugugcacaaacagaucucggggguugaucuuggucucccaaacugggggaaguacgugcugguaagugcaggugcucugacugcauuaauguugaugauuuucuuaaugacguguugcagaaagacuaauagagcagagucaauacaacacaguccuggagagacagggaggaaagugucgguaacuucucacaacggaagggucauaucuucaugggaaucauauaaaaguggaggugagaccaagcuguga

SEQ ID NO: 62845 - RNA, 1575 nt, Artificial Sequence
  derived and/or modified CDS sequence (wt) from glycoprotein__RABV__DQ849053.1
augauuccucaaguucuuuuguuuguuccccuucuaguuuucucgucguguuuugggaaauuccccauuuacacgauaccagacaaacuugguccauggagucccaucgauauacaucaucucagcuguccgaacaaucugguuguggaagaugaaggaugcaccaaucugucuggauuuuccuacauggaacucaaagugggauauauuucagccauaaaagugaacggauucaccuguacagguguggugacagaagcagaaaccuacacgaacuuuguugguuaugucaccaccacguuuaagagaaagcacuuucgcccuacgccggaugcgugcagagccgcauacaacuggaagauggcuggugaccccagguaugaagagucucugcacaauccguacccugauuaccacuggcuccgaacugucaagaccuccaaggagucccuugucaucauaucuccgagcguugcagauuuggacccguacgauaaaucccuucacucgagaguuuuuccuggcggaaaaugcucaggaauaaccguguccuccacuugcugcucuacuaaccacgacuacaccaucuggaugccugaaaauccuagacugggaacuucgugugacauuuucaccaauaguagagggaagagggcaucaaaagggggcaagacuuguggauuuguggaugaaagaggcuuguacaagucucuaaagggagcaugcaagcugaagcuaugugggguucuaggacuuagacuuauggacggaacaugggucgcaauucagacaucagaugagaucagauggugcucuccugaucagcuaguaaaucuacacgacuuucacucagaugagauugaacaucuuguuguggaggaguuggucaaaaagagggaagagugucuggacgcacuggagacuauuaugaccacaaaguccgugaguuucaggcgucuuagucauuugaggaagcuagucccuggguuuggaaaggcguauaccauauucaacaaaaccuugauggaggcugaugcucacuauaaaucaauccggacuuggaaugaaaucauccccucuaaaggguguuuaagaguuggggggagaugucauccucaugugaacgggguguucuucaacggcauuauacuggguccugacggacauguucuaaucccagagaugcaaucgucccuccuccaccagcauauggaauuguuggaguccucagucaucccuuugaugcaucccuuagcagacccgucaacaguuuuuaaagacggcgacgaggcagaggacuuuguugagguucaccuuccggaugugcacaagcagaucucggggguugaucuuggucucccaaacugggggaaguacgugcugguaagugcaggugcucugacugcauuaauguugaugauuuucuuaaugacguguugcagaaagacuaauagagcagagucaauacaacacaguccuggagagacagggaggaaagugucgguaacuucucacaacggaagggucauaucuucaugggaaucauauaaaaguggaggugagaccaagcuguga

SEQ ID NO: 62846 - RNA, 1575 nt, Artificial Sequence
  derived and/or modified CDS sequence (wt) from glycoprotein__RABV__DQ849054.1
augauuccucaaguucuuuuguuuguuccccuucuaguguucucgucguguuuugggaaauuccccauuuacccgauaccagacaaacuugguccauggagucccaucgauauacaucaucucagcuguccgaacaaucugguuguggaagaugaaggaugcaccaaucugucuggauuuuccuacauggaacucaaagugggauauauuucagccauaaaagugaacggauucaccuguacagguguggugacagaagcagaaaccuacccgaacuuuguugguuaugucaccaccacguuuaagagaaagcacuuucgcccuacgccggaugcgugcagagccgcauacaacuggaagauggcuggugaccccagguaugaagagucucugcacaauccguacccugauuaucacuggcuccggacugucaagaccuccaaggagucccuugucaucauaucuccgagcguugcagauuuggacccguacgauaaaucccuucacucgagaguuuuuccuggcggaaaaugcucaggaauaaccguguccuccacuugcugcuuuacuaaccacgacuacaccaucuggaugccugaaaauccuagacugggaacuucgugugacauuuucaccaauaguagagggaagagggcaucaaaagggggcaagacuuguggauuuguggaugaaagaggcuuguacaagucucuaaagggagcaugcaagcugaagcuaugugggguucuaggacuuagacuuauggacggaacaugggucgcaauucagacaucagaugagaucaaauggugcucuccugaucagcuaguaaaucuacacgacuuucacucagaugagauugaacaucuuguuguggaggaguuggucaaaaagagggaagagugucuggacgcacuggagacuauuaugaccacaaaguccgugaguuucaggcgucuuagucauuugaggaagcuagucccuggguuuggaaaggcguauaccauauucaacaaaaccuugauggaggcugaugcucacuauaaaucaauccggacuuggaaugaaaucauccccucuaaaggguguuuaagaguuggggggagaugucauccucaugugaacgggguguucuucaacggcauuauacuggguccugacggacauguucuaaucccagagaugcaaucgucccuccuccaccagcauauggaauuguuggaguccucagucaucccuuugaugcaucccuuagcagacccgucaacaguuuuuaaagacggcgacgaggcagaggacuuuguugagguucaccuuccggaugugcacaagcagaucucggggguugaucuuggucucccaaacugggggaaguacgugcugguaagugcaggugcucugacugcauuaauguugaugauuuucuuaaugacguguugcagaaagacuaauagagcagagucaauacaacacaguccuggagagacagggaggaaagugucgguaacuucucacaacggaagggucauaucuucaugggaaucauauaaaaguggaggugagaccaagcuguga

SEQ ID NO: 62847 - RNA, 1575 nt, Artificial Sequence
  derived and/or modified CDS sequence (wt) from glycoprotein__RABV__DQ849055.1
augauuccucaaguucuuuuguuuguuccccuucuaguuuucucgucguguuuugggaaauuccccauuuacacgauaccagacaaacuugguccauggagucccaucgauauacaucaucucagcuguccgaacaaucugguuguggaagaugaaggaugcaccaaucugucuggauuuuccuacauggaacucaaagugggauauauuucagccauaaaagugaacggauucaccuguacagguguggugacagaagcagaaaccuacacgaacuuuguugguuaugucaccaccacguuuaagagaaagcacuuucgcccuacgccggaugcgugcagagccgcauacaacuggaagauggcuggugaccccagguaugaagagucucugcacaauccguacccugauuaccacuggcuccgaacugucaagaccuccaaggagucccuugucaucauaucuccgagcguugcagauuuggacccguacgauaaaucccuucacucgagaguuuuuccuggcggaaaaugcucaggaauaaccguguccuccacuugcugcuuuacuaaccacgacuacaccaucuggaugccugaaaauccuagacugggaacuucgugugacauuuucaccaauaguagagggaagagggcaucaaaagggggcaagacuuguggauuuguggaugaaagaggcuuguacaagucucuaaagggagcaugcaagcugaagcuaugugggguucuaggacuuagacuuauggacggaacaugggucgcaauucagacaucagaugagaucaaauggugcucuccugaucagcuaguaaaucuacacgacuuucacucagaugagauugaacaucuuguuguggaggaguuggucaaaaagagggaagagugucuggacgcacuggagacuauuaugaccacaaaguccgugaguuucaggcgucuuagucauuugaggaagcuagucccuggguuuggaaaggcguauaccauauucaacaaaaccuugauggaggcugaugcucacuauaaaucaauccggacuuggaaugaaaucauccccucuaaaggguguuuaagaguuggggggagaugucauccucaugugaacgggguguucuucaacggcauuauacuggguccugacggacauguucuaaucccagagaugcaaucgucccuccuccaccagcauauggaauuguuggaguccgcagucaucccuuugaugcaucccuuagcagacccgucaacaguuuuuaaagacggcgacgaggcagaggacuuuguugagguucaccuuccggaugugcacaagcagaucucggggguugaucuuggucucccaaacugggggaaguacgugcugguaagugcaggugcucugacugcauuaauguugaugauuuucuuaaugacguguugcagaaagacuaauagagcagagucaauacaacacaguccuggagagacagggaggaaagugucgguaacuucucacaacggaagggucauaucuucaugggaaucauauaaaaguggaggugagaccaagcuguga

SEQ ID NO: 62848 - RNA, 1575 nt, Artificial Sequence
  derived and/or modified CDS sequence (wt) from glycoprotein__RABV__DQ849056.1
augauuccucaaguucuuuuguuuguuccccuucuaguuuucucgucguguuuugggaaauuccccauuuacacgauaccagacaaacuugguccauggagucccaucgauauacaucaucucagcuguccgaacaaucugguuguggaagaugaaggaugcaccaaucugucuggauuuuccuacauggaacucaaagugggauauauuucagccauaaaagugaacggauucaccuguacagguguggugacagaagcagaaaccuacacgaacuuuguugguuaugucaccaccacguuuaagagaaagcacuuucgcccuacgccggaugcgugcagagccgcguacaacuggaagauggcuggugaccccagguaugaagagucucugcacaauccguacccugauuaucacuggcuccgaacugucaagaccuccaaggagucccuugucaucauaucuccgagcguugcagauuuggacccguacgauaaaucccuucacucgagaguuuuuccuggcggaaaaugcucaggaauaaccguguccuccacuuggugcucuacuaaccacgacuacaccaucuggaugccugaaaauccuagacugggaacuucgugugacauuuucaccaauaguagagggaagagggcaucaaaagggggcaagacuuguggauuuguggaugaaagaggcuuguacaagucucuaaagggagcaugcaagcugaagcuaugugggguucuaggacuuagacuuauggacggaacaugggucgcaauucagacaucagaugagaucaaauggugcucuccugaucagcuaguaaaucuacacgacuuucacucagaugagauugaacaucuuguuguggaggaguuggucaaaaagagggaagagugucuggacgcacuggagacuauuaugaccacaaaguccgugaguuucaggcgucuuagucauuugaggaagcuagucccuggguuuggaaaggcguauaccauauucaacaaaaccuugauggaggcugaugcucacuauaaaucaauccggacuuggaaugaaaucauccccucuaaaggguguuuaagaguuggggggagaugucauccucaugugaacgggguguucuucaacggcauuauacuggguccugacggacauguucuaaucccagagaugcaaucgucccuccuccaccagcauauggaauuguuggaguccucagucaucccuuugaugcaucccuuagcagacccgucaacaguuuuuaaagacggcgacgaggcagaggacuuuguugagguucaccuuccggaugugcacaagcagaucucggggguugaucuuggucucccaaacugggggaaguacgugcugguaagugcaggugcucugacugcauuaauguugaugauuuucuuaaugacguguugcagaaagacuaauagagcagagucaauacaacacaguccuggagagacagggaggaaagugucgguaacuucucacaacggaagggucauaucuucaugggaaucauauaaaaguggaggugagaccaagcuguga

SEQ ID NO: 62849 - RNA, 1575 nt, Artificial Sequence
  derived and/or modified CDS sequence (wt) from glycoprotein__RABV__DQ849057.1
augauuccucaaguucuuuuguuuguuccccuucuaguuuucucgucguguuuugggaaauuccccauuuacacgauaccagacaaacuugguccauggagucccaucgauauacaucaucucagcuguccgaacaaucugguuguggaagaugaaggaugcaccaaucugucuggauuuuccuacauggaacucaaagugggauauauuucagccauaaaagugaacggauucaccuguacagguguggugacagaagcagaaaccuacacgaacuuuguugguuaugucaccaccacguuuaagagaaagcacuuucgcccuacgccggaugcgugcagagccgcauacaacuggaagauggcuggugaccccagguaugaagagucucugcacaauccguacccugauuaccacuggcuccgaacugucaagaccuccaaggagucccuugucaucauaucuccgagcguugcagauuuggacccguacgauaaaucccuucacucgagaguuuuuccuggcggaaaaugcucaggaauaaccguguccuccacuugcugcucuacuaaccacgacuacaccaucuggaugccugaaaauccuagacugggaacuucgugugacauuuucaccaauaguagagggaagagggcaucaaaagggggcaagacuuguggauuuguggaugaaagaggcuuguacaagucucuaaagggagcaugcaagcugaagcuaugugggguucuaggacuuagacuuauggacggaacaugggucgcaauucagacaucagaugagaucaaauggugcucuccugaucagcuaguaaaucuacacgacuuucacucagaugagauugaacaucuuguuguggaggaguuggucaaaaagagggaagagugucuggacgcacuggagacuauuaugaccacaaaguccgugaguuucaggcgucuuagucauuugaggaagcuagucccuggguuuggaaaggcguauaccauauucaacaaaaccuugauggaggcugaugcucacuauaaaucaauccggacuuggaaugaaaucauccccucuaaaggguguuuaagaguuggggggagaugucauccucaugugaacgggguguucuucaacggcaucauacuggguccugacggacauguucuaaucccagagaugcaaucgucccuccuccaccagcauauggaauuguuggaguccucagucaucccuuugaugcaucccuuagcagacccgucaacaauuuuuaaagacggcgacgaggcagaggacuuuguugagguucaccuuccggaugugcacaagcagaucucggggguugaucuuggucucccaaacugggggaaguacgugcugguaagugcaggugcucugacugcauuaauguugaugauuuucuuaaugacguguugcagaaagacuaauagagcagagucaauacaacacaguccuggagagacagggaggaaagugucgguaacuucucacaacggaagggucauaucuucaugggaaucauauaaaaguggaggugagaccaagcuguga

SEQ ID NO: 62850 - RNA, 1575 nt, Artificial Sequence
  derived and/or modified CDS sequence (wt) from glycoprotein__RABV__DQ849058.1
augauuccucaaguucuuuuguuuguuccccuucuaguuuucucgucguguuuugggaaauuccccauuuacacgauaccagacaaacuugguccauggagucccaucgauauacaucaucucagcuguccgaacaaucugguuguggaagaugaaggaugcaccaaucugucuggauuuuccuacauggaacucaaagugggauauauuucagccauaaaagugaacggauucaccuguacagguguggugacagaagcagaaaccuacacgaacuuuguugguuaugucaccaccacguuuaagagaaagcacuuccgcccuacgccggaugcgugcagagccgcguacaacuggaagauggcuggugaccccagguaugaagagucucugcacaauccguacccugauuaucacuggguccgaacugucaagaccuccaaggagucccuugucaucauaucuccgagcguugcagauuuggacccguacgauaaaucccuucacucgagaguuuuuccuggcggaaaaugcucaggaauaaccguguccuccacuugcugcucuacuaaccacgacuacaccaucuggaugccugaaaauccuagacugggaacuucgugugacauuuucaccaauaguagagggaagagggcaucaaaagggggcaagacuuguggauuuguggaugaaagaggcuuguacaagucucuaaagggagcaugcaagcugaagcuaugugggguucuaggacuuagacuuauggacggaacaugggucgcaauucagacaucagaugagaucaaauggugcucuccugaucagcuaguaaaucuacacgacuuucacucagaugagauugaacaucuuguuguggaggaguuggucaaaaagagggaagagugucuggacgcacuggagacuauuaugaccacaaaguccgugaguuucaggcgucuuagucauuugaggaagcuagucccuggguuuggaaaggcguauaccauauucaacaaaaccuugauggaggcugaugcucacuauaaaucaauccggacuuggaaugaaaucauccccucuaaaggguguuuaagaguuggggggagaugucauccucaugugaacgggguguucuucaacggcaucauacuggguccugacggacauguucuaaucccagagaugcaaucgucccuccuccaccagcauauggaauuguuggaguccucagucaucccuuugaugcaucccuuagcagacccgucaacaguuuuuaaagacggcgacgaggcagaggacuuuguugagguucaccuuccggaugugcacaagcagaucucggggguugaucuuggucucccaaacugggggaaguacgugcugguaagugcaggugcucugacugcauuaauguugaugauuuucuuaaugacguguugcagaaagacuaauagagcagagucaauacaacacaguccuggagagacagggaggaaagugucgguaacuucucacaacggaagggucauaucuucaugggaaucauauaaaaguggaggugagaccaagcuguga

SEQ ID NO: 62851 - RNA, 1575 nt, Artificial Sequence
  derived and/or modified CDS sequence (wt) from glycoprotein__RABV__DQ849059.1
augauuccccaaguucuuuuguuuguuccccuucuaguuuucucgucguguuuugggaaauuccccauuuacacgauaccagacaaacuugguccauggagucccaucgauauacaucaucucagcuguccgaacaaucugguuguggaagaugaaggaugcaccaaucugucuggauuuuccuacauggaacuuaaagugggauauauuucagccauaaaagugaacggauucaccuguacagguguggugacagaagcagaaaccuacacuaacuuuguugguuaugucacaaccacguuuaagagaaagcacuuucgcccuaugccggaugcgugcagagccgcauauaacuggaagauggcuggugaccccagguaugaagagucucugcacaauccguacccugacuaccacuggcuccgaacugucaagaccaccaaggagucccuugucaucauaucuccgagcguugcagauuuggacccguacgauaagucccuucacucgagaguuuuuccuggcggaaaaugcucaggaauaaccguguccuccacuugcugcucuacuaaccacgacuacaccaucuggaugccugaaaacccuagacugggaacuucgugugacauuuucaccaauaguagagggaagagggcaucaaaagggggcaagacuuguggauuuguggaugaaagaggcuuguacaagucucuaaagggagcaugcaagcugaagcugugugggguucuaggacuuagacuuauggacggaacauggguugcaauucagacgucagaugagaucaaauggugcucuccugaucagcuaguaaaucuacacgacuuucacucggaugagauugaacaucuuguuguggaggagcuggucaaaaagagagaagagugucuggacgcacuggagacuauuaugaccacaaaguccgugaguuucagacgucuuagucauuugaggaagcuagucccuggguuuggaaaggcguauaccauauucaacaaaaccuugauggaggcugaugcucacuauaaaucaauccggacuuggaaugaaaucauccccucuaaaggguguuuaagaguuggggggagaugucauccucaugugaacgggguguucuucaacggcauuauacuggguccugacggacauguucuaaucccagagaugcaaucgucccuccuccaccagcauauggaauuguuggaguccucagucaucccuuugaugcaucccuuagcagacccgucaacagucuuuaaagacggcgacgaggcagaggacuuuguugagguucaccuuccagaugugcacaagcagauuucggggguugaucuuggucucccaaacugggggaaguaugugcugauaagugcaggugcucugacugcauuaaugucgaugauuuucuuaaugacguguugcagaaagacuaauagagcagagucaauacaacacaguccuggagagacagggaggaaagugucgguaacuucucacaacggaagggucauaucuucaugggaaucauauaaaagcggaggugagaccaagcuguga

SEQ ID NO: 62852 - RNA, 1575 nt, Artificial Sequence
  derived and/or modified CDS sequence (wt) from glycoprotein__RABV__DQ849060.1
augauuccucaaguucuuuuguuuguuccccuucuaguuuucucgucguguuuugggaaauuccccauuuacacgauaccagacaaacuugguccauggagucccaucgauauacaucaucucagcuguccgaacaaucugguuguggaagaugaaggaugcaccaaucugucuggauuuuccuacauggaacucaaagugggauauauuucagccauaaaagugaacggauucaccuguacagguguggugacagaagcagaaaccuacacuaacuuuguugguuaugucacaaccacguuuaagagaaagcacuuucgcccuaugccggaugcgugcagagccgcauacaacuggaagauggcuggugaccccagguaugaagagucucugcacaauccguacccugacuaccacuggcuccgaacugucaagaccaccaaggagucccuugucaucauaucuccgagcguugcagauuuggacccguacgauaagucccuucacucgagaguuuuuccuggcggaaaaugcucaggaauaaccguguccucuacuugcugcucuacuaaccacgacuacaccaucuggaugccugaaaacccuagacugggaacuucgugugacauuuucaccaauaguagagggaaaagggcaucaaaagggggcaagacuuguggauuuguggaugaaagaggcuuguacaagucucuaaagggagcaugcaagcugaagcuaugugggguucuaggacuuagacuuauggacggaacaugggucgcaauucagacgucagaugagaucaaauggugcucuccugaucagcuaguaaaucuacacgacuuucacucggaugagauugaacaucuuguuguggaggaguuggucaaaaagagagaagagugucuggacgcacuggagacuauuaugaccacaaaguccgugaguuucagacgucuuagucauuugaggaagcuagucccuggguuuggaaaggcguauaccauauucaacaaaaccuugauggaggcugaugcucacuauaaaucaauccggacuuggaaugaaaucauccccucuaaaggguguuuaagaguuggggggagaugucauccucaugugaacgggguguucuucaacggcauuauacuggguccugacggacauguucuaaucccagagaugcaaucgucccuccuccaccagcauauggaauuguuggaguccucagucaucccuuugaugcaucccuuagcagacccgucaacagucuuuaaagacggcgacgaggcagaggacuuuguugagguucaccuuccagaugugcacaagcaaauuucggggguugaucuuggucucccaaacugggggaaguaugugcugauaagugcaggugcucugacugcauugaugucgaugauuuucuuaaugacguguugcagaaagacuaauagagcagagucaauacaacacaguccuggagagacagggaggaaagugucgguaacuucucacaacggaagggucauaucuucaugggaaucauauaaaagcggaggugagaccaagcuguga

SEQ ID NO: 62853 - RNA, 1575 nt, Artificial Sequence
  derived and/or modified CDS sequence (wt) from glycoprotein__RABV__DQ849061.1
augauuccucaaguucuuuuguuuguuccccuucuaguuuucucgucguguuuugggaaauuccccauuuauacgauaccagacaaacuugguccauggagucccaucgauauacaucaucucagcuguccgaacaaucugguuguggaagaugaaggaugcaccaaucugucugguuuuuccuacauggaacucaaagugggauauauuucagccauaaaagugaacggauucaccuguacagguguggugacagaagcagaaaccuacacuaacuuuguugguuaugucaccaccacguuuaagagaaagcacuuucgcccuaugccggaugcaugcagagccgcauacaauuggaagauggcuggugaccccagguaugaagagucucugcacaauccguacccugacuaccacuggcuccgaacugucaagaccaccaaggagucccuugucaucauaucuccgagcguugcagauuuggacccguacgauaaaucccuucacucgagaguuuuuccuggcggaaaaugcucaggaauaaccguguccuccacuugcugcucuaccaaccacgauuacaccaucuggaugccugaaaauccuagacugggaacuucgugugacauuuucaccaauaguagagggaagagggcaucaaaagggggcaagacuuguggauuuguggaugaaagaggcuuguacaagucucuaaagggagcaugcaagcugaagcuaugugggguucuaggacuuagacuuauggacggaacaugggucgcaauucagacaucagaugagaucaaauggugcucuccugaucagcuaguaaaucuacacgacuuucacucggaugagauugaacaucuuguuguggaggaguuggucaaaaagagggaagagugucuggacgcacuggagacuauuaugaccacaaaguccgugaguuucagacgucuuagucauuugaggaagcuagucccuggguuuggaaaggcguauaccauauucaacaaaacccugauggaggcugaugcucacuauaaaucaauccggacuuggaaugaaaucauccccucuaaaggguguuugagaguuggggggagaugucauccucaugugaacgggguguucuucaacggcauuauacuggguccugacggacauguucuaaucccagagaugcaaucgucccuccuccaccagcauauggaauuguuggaguccucagucaucccuuugaugcaucccuuagcagacccgucaacagucuuuaaagacggcgacgaggcagaggacuuuguugagguucaccuuccggaugugcacaagcagaucucggggguugaucuuggucucccaaacugggggaaguaugugcugauaaguguaggugcucugacugcauuaauguugaugauuuucuuaaugacguguugcagaaagacuaauagagcagagucaacacaacacaguccuggagagacagggaggaaagugucgguaacuucucacaacggaagggucauaucuucaugggaaucauauaaaagcggaggugagaccaagcuguga

SEQ ID NO: 62854 - RNA, 1575 nt, Artificial Sequence
  derived and/or modified CDS sequence (wt) from glycoprotein__RABV__DQ849062.1
augauuccucaaguucuuuuguuuguuccccuucuaguuuucucgucguguuuugggaaauuccccauuuauacgauaccagacaaacuugguccauggagucccaucgauauacaucaucucagcuguccgaacaaucugguuguggaagaugaaggaugcaccaaucugucugguuuuuccuacauggaacucaaagugggauauauuucagccauaaaagugaacggauucaccuguacagguguggugacagaagcagaaaccuacacuaacuuuguugguuaugucaccaccacguuuaagagaaagcacuuucgcccuaugccggaugcaugcagagccgcauacaauuggaagauggcuggugaccccagguaugaagagucucugcacaauccguacccuggcuaccacuggcuccgaacugucaagaccaccaaggagucccuugucaucauaucuccgagcguugcagauuuggacccguacgauaaaucccuucacucgagaguuuuuccuggcggaaaaugcucaggaauaaccguguccuccacuugcugcucuaccaaccacgauuacaccaucuggaugccugaaaauccuagacugggaacuucgugugacauuuucaccaauaguagagggaagagggcaucaaaagggggcaagacuuguggauuuguggaugaaagaggcuuguacaagucucuaaagggagcaugcaagcugaaacuaugugggguucuaggacuuagacuuauggacggaacaugggucgcaauucagacaucagaugagaucaaauggugcucuccugaucagcuaguaaaucuacacgacuuucacucggaugagauugaacaucuuguuguggaggaguuggucaaaaagagggaagagugucuggacgcacuggagacuauuaugaccacaaaguccgugaguuucagacgucuuagucauuugaggaagcuagucccuggguuuggaaaggcguauaccauauucaacaaaacccugauggaggcugaugcucacuauaaaucaauccggacuuggaaugaaaucauccccucuaaaggguguuugagaguuggggggagaugucauccucaugugaacgggguguucuucaacggcauuauacuggguccugacggacauguucuaaucccagagaugcaaucgucccuccuccaccagcauauggaauuguuggaguccucagucaucccuuugaugcaucccuuagcagacccgucaacagucuuuaaagacggcgacgaggcagaggacuuuguugagguucaccuuccggaugugcacaagcagaucucggggguugaucuuggucucccaaacugggggaaguaugugcugauaagugcaggugcucugacugcauuaauguugaugauuuucuuaaugacguguugcagaaagacuaauagagcagagucaauacaacacaguccuggagagacagggaggaaagugucgguaacuucucacaacggaagggucauaucuucaugggaaucauauaaaagcggaggugagaccaagcuguga

SEQ ID NO: 62855 - RNA, 1575 nt, Artificial Sequence
  derived and/or modified CDS sequence (wt) from glycoprotein__RABV__DQ849063.1
augauuccucaaguucuuuuguuuguuccccuucuaguuuucucgucauguuuugggaaauuccccauuuauacgauaccagacaaacuugguccauggagucccaucgauauacaucaucucagcuguccgaacaaucugguuguggaagaugaaggaugcaccaaucugucugguuuuuccuacauggaacucaaagugggauauauuucagccauaaaagugaacggauucaccuguacagguguggugacagaagcagaaaccuacacuaacuuuguugguuaugucaccaccacguuuaagagaaagcacuuucgcccuaugccggaugcaugcagagccgcauacaauuggaagauggcuggugaccccagguaugaagagucucugcacaauccguacccugacuaccacuggcuccgaacugucaagaccaccaaggagucccuugucaucauaucuccgagcguugcagauuuggacccguacgauaaaucccuucacucgagaguuuuuccuggcggaaaaugcucaggaauaaccguguccuccacuugcugcucuaccaaccacgauuacaccaucuggaugccugaaaauccuagacugggaacuucgugugacauuuucaccaauaguagagggaagagggcaucaaaagggggcaagacuuguggauuuguggaugaaagaggcuuguacaagucuuuaaagggagcaugcaagcugaaacuaugugggguucuaggacuuagacuuauggacggaacaugggucgcaauucagacaucagaugagaucaaauggugcucuccugaucagcuaguaaaucuacacgacuuucacucggaugagauugaacaucuuguuguggaggaguuggucaaaaagagggaagagugucuggacgcacuggagacuauuaugaccacaaaguccgugaguuucagacgucuuagucauuugaggaagcuagucccuggguuuggaaaggcguauaccauauucaacaaaacccugauggaggcugaugcucacuauaaaucaauccggacuuggaaugaaaucauccccucuaaaggguguuugagaguuggggggagaugucauccucaugugaacgggguguucuucaacgguauuauacuggguccugacggacauguucuaaucccagagaugcaaucgucccuccuccaccagcauauggaauuguuggaguccucagucaucccuuugaugcaucccuuagcagacccgucaacagucuuuaaagacggcgacgaggcagaggacuuuguugagguucaccuuccggaugugcacaagcagaucucagggguugaucuuggucucccaaacugggggaaguaugugcugauaagugcaggugcucugacugcauuaauguugaugauuuucuuaaugacguguugcagaaagacuaauagagcagagucaauacaacacaguccuggagagacagggaggaaagugucgguaacuucucacaacggaagggucauaucuucaugggaaucauauaaaagcggaggugagaccaagcuguga

SEQ ID NO: 62856 - RNA, 1575 nt, Artificial Sequence
  derived and/or modified CDS sequence (wt) from glycoprotein__RABV__DQ849064.1
augauucuucaaguucuuuuguuugcuccccuucuaguuuucucgucguguuucgggaaauuccccauuuacacgauaccagacaaacuugguccauggagucccaucgauauacaucaucucagcuguccgaacaaucugguuguggaagaugaaggaugcaccaaucugucuggauuuuccuacauggaacucaaagugggauauauuucagccauaaaagugaacggauucaccuguacagguguggugacagaagcagaaaccuacacuaacuuuguugguuaugucaccaccacguuuaagagaaagcacuuucgcccuaugccggaugcgugcagagccgcauacaacuggaagauggcuggugaccccagguaugaagagucucugcacaauccguacccugacuaccacuggcuccgaacugucaagaccaccaaggagucccuugucaucauaucuccgagcguugcagauuuggacccguacgauaaaucccuucacucgagaguuuuuccuggcggaaaaugcucaggaauaaccguguccuccacuugcugcucgaccaaccacgacuacaccaucuggaugccugaaaauccuagacugggaacuucgugugacauuuuuaccaauaguagagggaagagggcaucaaaagggggcaagacuuguggauuuguggaugaaagaggcuuguacaagucucuaaagggagcaugcaagcugaagcuauguggaguucuaggacuuagacuuauggacggaacaugggucgcaauucagacaucagaugagaucaaauggugcccuccugaucagcuaguaaaucuacacgacuuucacucggaugagauugagcaucuuguuguagaggaguuggucaaaaagagggaagagugucuggacgcacuggagacuauuaugacaacaaaauccgugaguuucagacgucucagucauuugaggaagcuagucccuggguuuggaaaggcguauaccauauucaacaaaaccuugauggaggcugaugcucacuauaaaucaauccggacuuggaaugaaaucauccccucuaaaggguguuuaagaguuggggggagaugucauccucaugugaacggaguguucuucaacggcauuauacuggguccugacggacauguucuaaucccagagaugcaaucgucccuccuccaccagcauauggaauuguuggaauccucagucaucccuuugaugcaucccuuagcagacccgucaacagucuuuaaagacggcgacgaggcagaggacuuuguugagguucaccuuccggaugugcacaagcagaucucggggguugaucuuggucucccaaacugggggaaguaugugcugauaagugcaggugcucugacugcauuaauguugaugauuuucuuaaugacguguugcagaaagaauaauagagcagagucaauacaacacaguccuggagagacagggaggaaagugucgguaacuucucauaacggaagggucauaucuucaugggaaucauauaaaagcggaggugagaccaagcuguga

SEQ ID NO: 62857 - RNA, 1575 nt, Artificial Sequence
  derived and/or modified CDS sequence (wt) from glycoprotein__RABV__DQ849065.1
augauuccucaaguucuuuuguuuguuccccuucuaguuuucucgucguguuuugggaaauuccccauuuacacgauaccagacaaacuugguccauggagucccaucgauauacaucaucucagcuguccgaacaaucugguuguggaagaugaaggaugcaccaauuugucuggauuuuccuacauggaacucaaagugggauauauuucagccauaaaagugaacggauucaccuguacagguguggugaccgaagcagagaccuacacuaacuuuguugguuaugucaccaccacguuuaagagaaagcacuuucgcccuaugccggaugcgugcagagccgcauacaacuggaagauggcuggugaccccagguaugaagagucucugcacaauccguaccccgacuaccacuggcuccgaacugucaagaccaccaaggagucccuugucaucauaucuccgagcguugcagauuuggacccguacgauaaaucccuucacucgagaguuuuuccuggcggaaaaugcucaggaauaaccguguccuccacuugcugcucuacuaaccacgacuacaccaucuggaugccugaaaauccuagacugggaacuucaugugacauuuucaccaauaguagagggaagagggcaucaaaagggggcaagacuuguggauuuguggaugaaagaggcuuguacaagucucuaaagggagcaugcaagcugaagcuaugugggguucuaggacuuagacuuauggacggaacaugggucgcgauucagacaucagaugagaucaaauggugcucuccugaucagcuaguaaaucuacacgacuuucacucggaugagauugaacaucuuguuguggaggaguuggucaaaaagagggaagagugucuggacgcacuggagacuauuaugaccacaaaguccgugaguuucagacgucuuagucauuugagaaagcuagucccuggguuuggaaaggcguauaccauauucaacaaaaccuugauggaggcugaugcucacuacaaaucaauccggacuuggaaugaaaucauccccuccaaaggguguuuaagaguuggggggagaugucauccucaugugaacgggguguucuucaacggcauuauacuggguccugacggacauguucuaaucccagagaugcagucgucccuccuccaccagcauauggaauuguuggaguccucagucaucccuuugaugcaucccuuagcagacccgucaacagucuuuaaagacggcgacgaggcagaggacuuuguugagguucaccuuccggaugugcacaagcagaucucggggguugaucuuggucucccaaacugggggaaguaugugcugauaagugcaggugcuuugacugcauuaauguugacgauuuucuuaaugacguguugcagaaagacuaauagagcagagucaauacaacacaguccuggagagacagggaggaaagugucggugacuucucacaacggaagggucauaucuucaugggaaucauauaaaagcggaagugagaccaagcuguga

SEQ ID NO: 62858 - RNA, 1575 nt, Artificial Sequence
  derived and/or modified CDS sequence (wt) from glycoprotein__RABV__DQ849066.1
augauuccucaaguucuuuuguuuguuccccuucuaguuuucucgucguguuuugggaaauuccccauuuacacgauaccagacaaacuugguccauggagucccaucgauauacaucaucucagcuguccgaacaaucugguuguggaagaugaaggaugcaccaauuugucuggauuuuccuacauggaacucaaagugggauauauuucagccauaaaagugaacggauucaccuguacagguguggugaccgaagcagaaaccuacacuaacuuuguugguuaugucaccaccacguuuaagagaaagcacuuucgcccuaugccggaugcgugcagagccgcauacaacuggaagauggcuggugaccccagguaugaagagucucugcacaauccguaccccgacuaccacuggcuccgaacugucaagaccaccaaggagucccuugucaucauaucuccgagcguugcagauuuggacccguacgauaaaucccuucacucgagaguuuuuccuggcggaaaaugcucaggaauaaccguguccuccacuugcugcucuacuaaccacgacuacaccaucuggaugccugaaaauccuagacugggaacuucaugugacauuuucaccaauagcagagggaagagggcaucaaaagggggcaagacuuguggauuuguggaugaaagaggcuuguacaagucucuaaagggagcaugcaagcugaagcuaugugggguucuaggacuuagacuuauggacggaacaugggucgcgauucagacaucagaugagaucaaauggugcucuccugaucagcuaguaaaucuacacgacuuucacucggaugagauugaacaucuuguuguggaggaguuggucaaaaagagggaagagugucuggacgcacuggagacuauuaugaccacaaaguccgugaguuucagacgucuuagucauuugaggaagcuagucccuggguuuggaaaggcguauaccauauucaacaaaaccuugauggaggcugaugcucacuacaaaucaauccggacuuggaaugaaaucauccccuccaaaggguguuuaagaguuggggggagaugucauccucaugugaacgggguguucuucaacggcauuauacuggguccugacggacauguucuaaucccagagaugcagucgucccuccuccaccagcauauggaauuguuggaguccucagucaucccuuugaugcaucccuuagcagacccgucaacagucuuuaaagacggcgacgaggcagaggacuuuguugagguucaccuuccggaugugcacaagcagaucucggggguugaucuuggucucccaaacugggggaaguaugugcugauaagugcaggugcuuugacugcauuaauguugacgauuuucuuaaugacguguugcagaaagacuaauagagcagggucaauacaacacaguccuggagagacagggaggaaagugucggugacuucucacaacggaagggucauaucuucaugggaaucauauaaaagcggaagugagaccaagcuguga

SEQ ID NO: 62859 - RNA, 1575 nt, Artificial Sequence
  derived and/or modified CDS sequence (wt) from glycoprotein__RABV__DQ849067.1
augauuccucaaguucuuuuguuuguuccccuucuaguuuucucgucguguuuugggaaauuccccauuuacacgauaccagacaaacuugguccauggagucccaucgauauacaucaucucagcuguccgaacaaucugguuguggaagaugaaggaugcaccaauuugucuggauuuuccuacauggaacucaaagugggauauauuucagccauaaaagugaacggauucaccuguacagguguggugaccgaagcagaaaccuacacuaacuuuguugguuaugucaccaccacguuuaagagaaagcacuuucgcccuaugccggaugcgugcagagccgcauacaacuggaagauggcuggugaccccagguaugaagagucucugcacaauccguaccccgacuaccacuggcuccgaacugucaagaccaccaaggagucccuugucaucauaucuccgagcguugcagauuuggacccguacgauaaaucccuucacucgagaguuuuuccuggcggaaaaugcuccggaauaaccguguccuccacuugcugcucuacuaaccacgacuacaccaucuggaugccugaaaauccuagacugggaacuucaugugacauuuucaccaauaguagagggaagagggcaucaaaagggggcaagacuuguggauuuguggaugaaagaggcuuguacaagucucuaaagggagcaugcaagcugaagcuaugugggguucuaggacuuagacuuauggacggaacaugggucgcgauucagacaucagaugagaucaaauggugcucuccugaucagcuaguaaaucuacacgacuuucacucggaugagauugaacaucuuguuguggaggaguuggucaaaaagagggaagagugucuggacgcacuggagacuauuaugaccacaaaguccgugaguuucagacgucuuagucauuugaggaagcuagucccuggguuuggaaaggcguauaccauauucaacaaaaccuugauggaggcugaugcucacuacaaaucaauccggacuuggaaugaaaucauccccuccaaaggguguuuaagaguuggggggagaugucauccucaugugaacgggguguucuucaacggcauuauacuggguccugacggacauguucuaaucccagagaugcagucgucccuccuccaccagcauauggaauuguuggaguccucagucaucccuuugaugcaucccuuagcagacccgucaacagucuuuaaagacggcgacgaggcagaggacuuuguugagguucaccuuccggaugugcacaagcagaucucggggguugaucuuggucucccaaacugggggaaguaugugcugauaagugcaggugcuuugacugcauuaauguugacgauuuucuuaaugacguguugcagaaagacuaauagagcagggucaauacaacacaguccuggagagacagggaggaaagugucggugacuucucacaacggaagggucauaucuucaugggaaucauauaaaagcggaagugagaccaagcuguga

SEQ ID NO: 62860 - RNA, 1575 nt, Artificial Sequence
  derived and/or modified CDS sequence (wt) from glycoprotein__RABV__DQ849068.1
augauuccucaaguucuuuuguuuguuccccuucuaguuuucucgucguguuuugggaaauuccccauuuacacgauaccagacaaacuugguccauggagucccaucgauauacaucaucucagcuguccgaacaaucugguuguggaagaugaaggaugcaccaauuugucuggauuuuccuacauggaacucaaagugggauauauuucagccauaaaagugaacggauucaccuguacagguguggugaccgaagcagaaaccuacacuaacuuuguugguuaugucaccaccacguuuaagagaaagcacuuucgcccuaugccggaugcgugcagagccgcauacaacuggaagauggcuggugaccccagguaugaagagucucugcacaauccguaccccgacuaccacuggcuccgaacugucaagaccaccaaggagucccuugucaucauaucuccgagcguugcagauuuggacccguacgauaaaucccuucacucgagaguuuuuccuggcggaaaaugcucaggaauaaccguguccuccacuugcugcucuacuaaccacgacuacaccaucuggaugccugaaaauccuagacugggaacuucaugugacauuuucaccaauaguagagggaagagggcaucaaaagggggcaagacuuguggauuuguggaugaaagaggcuuguacaagucucuaaagggagcaugcaagcugaagcuaugugggguucuaggacuuagacuuauggacggaacaugggucgcgauucagacaucagaugagaucaaauggugcucuccugaucagcuaguaaaucuacacgacuuucacucggaugagauugaacaucuuguuguggaggaguuggucaaaaagagggaagagugucuggacgcacuggagacuauuaugaccacaaaguccgugaguuucagacgucuuagucauuugaggaagcuagucccuggguuuggaaaggcguauaccauauucaacaaaaccuugauggaggcugaugcucacuacaaaucaauccggacuuggaaugaaaucauccccuccaaaggguguuuaagaguuggggggagaugucauccucaugugaacgggguguucuucaacggcauuauacuggguccugacggacauguucuaaucccagagaugcagucgucccuccuccaccagcauauggaauuguuggaguccucagucaucccuuugaugcaucccuuagcagacccgucaacagucuuuaaagacggcgacgaggcagaggacuuuguugagguucaccuuccggaugugcacaagcagaucucggggguugaucuuggucucccaaacugggggaaguaugugcugauaagugcaggugcuuugacugcauuaauguugacgauuuucuuaaugacguguugcagaaagacuaauagagcagagucaauacaacacaguccuggagagacagggaggaaagugucggugacuucucacaacggaagggucauaucuucaugggaaucauauaaaagcggaagugagaccaagcuguga

SEQ ID NO: 62861 - RNA, 1575 nt, Artificial Sequence
  derived and/or modified CDS sequence (wt) from glycoprotein__RABV__DQ849069.2
augauuccucaggcucuuuuguuuguaccccuuuugguuuucucauucugcuucgggaaauuccccaucuacacgauaccagacaaacuuggcccuuggaguccuauagauauacaccaucucaguugcccuaacaauuuaguuguggaggaugaggggugcaccaaccugucaggauucuccuacauggaacucaaaguaggguacauuucagccauaaaagugaacggguucacuugcacggguguggugacagaagcagaaaccuacacaaacuuugucggcuacgucaccaccacauuuaagagaaagcacuuccgcccgacaccagaugccugcagagcagcauauaacuggaagauggcaggugaccccagauaugaggaaucucugcauaauccguaucccgauuaucacuggcuccggacuguaaaaaccaccaaggagucucuuguuauaauaucuccaagugugucggacuuagacccguacgauaaaucucuucauuccagaguuuuucccagcgguaaaugcucacgaauaacagugucuucuaccuauugucccaccaaccaugacuauaccaucuggaugccggaaaauccgagacuagggaccucuugugacauuuucaccaauagcagagggaagagagcauccaaagggagcaagaccuguggauuuguggacgaaagaggcuuguacaagucucuaaaaggggcaugcaaauugaagcuauguggaguucuuggacuuacacuuauggacggaacauggguugcgauucaaacaucugaugaggcuaaauggugcccuccugaucaguuagugaauauacaugauuuucgcucggaugagauugaacaucuuguuguggaagaguuaguaaagaaaagggaagagugucuagaugcacuggagucuaucaugaccaccaaguccgugaguuucagacgccucagucacuugaggaagcucguucccggguuugggaaagcauauaccauauucaacaaaaccuugauggaggcugaugcucacuacaaaucaguccguacauggaaugagaucauccccucuaaaggguguuuaagaguuggggggagaugucacccccaugugaacgggguguuuuucaaugguaucauccugggcccugauggacauguucuaaucccagagaugcagucaucucuccuucaacagcauauggaguuguuggaauccucgguaaucccgcuaaugcaucccuuggcagaucccucaacaguuuuuaaggaagaugacgaggcggaagauuuugucgagguucaccuuccggauguccacaagcaggucucgggaguugaucucggucucccaagcugggggaaguaugugcugaugaguguaggcgcuaugauugcacugauguugaugauuuucuugaugacguguugcagaagagcuaauggagcagaaucaauacaacacagucucggggagacaggaaggaaaguaucggucaccucccaaagcgggagggucauaucuuccugggagucguacaaaagcgggggugagaccaagcuguag

SEQ ID NO: 62862 - RNA, 1575 nt, Artificial Sequence
  derived and/or modified CDS sequence (wt) from glycoprotein__RABV__DQ849070.1
augauuccucaaguucuuuuguuuguuccccuucuaguuuucucgucauguuucgggaaauuccccauuuacacgauaccagacaaacuugguccauggagucccaucgauauacaucaucucagcuguccgaacaaucuuguuguggaagaugaagggugcaccaaucugucuggauuuuccuacauggaacucaaagugggauauauuucagccauaaaagugaacggauucaccuguacagguguggugacagaagcagaaaccuacacgaacuuuguugguuaugucaccaccacguuuaagagaaagcacuuucgcccuaugccggaugcgugcagagccgcauacaacuggaagauggcuggugaccccagguaugaagagucucugcacaauccguacccugacuaccacuggcuccgaacugucaagaccaccaaggagucccuugucaucauaucuccgagcguugcagauuuggacccguacgauaaaucccuucacucgagaguuuuuccuggcggaaaaugcucaggaauaaccguguccuccacuugcugcucuacuaaccacgacuacaccaucuggaugccugaaaauccuagacugggaacuucgugugacauuuucaccaauaguagagggaagagggcaucaaaagggggcaagacuuguggauuuguggaugaaagaggcuuguacaagucucuaaagggagcaugcaagcugaagcuaugugggguucuaggacuuagacuuauggacggaacauggguugcaauucagacaucugaugagaucaaauggugcucuccugaucagcuaguaaaucuacacgacuuucacucggaugagauugaacaucuuguuguggaggaguuggucaaaaagagggaagagugucuggacgcacuggagacuauuaugaccacaaaguccgugaguuucagacgucuuagucauuugaggaagcuagucccuggguuuggaaaggcguauaccauauucaacaaaaccuugauggaggcugaugcucacuauaaaucaauccggacuuggaaugaaaucauccccucuaaaggguguuuaagaguuggggggagaugucauccucaugugaacgggguguucuucaacggcauuauacuggguccugacggacauguucuaaucccagagaugcaaucgucccuccuccaccagcauauggaauuguuggaguccucagucaucccguugaugcaucccuuagcagacccgucaacagucuuuaaagacggcgacgaggcagaggacuuuguugauguucaccuuccggaugugcacaagcagaucucggggguugaucuuggucucccaaacugggggaaguaugugcugauaagugcaggugcucugacugcauuaauguugaugauuuucuuaaugacguguugcagaaaggcuaauagagcagagucaauacaacacaauccuggagagacagggaggaaagugucgguaacuucucacaacggaagggucauaucuucaugggaaucauauaaaagcggaggugagaccaagcuguga

SEQ ID NO: 62863 - RNA, 1575 nt, Artificial Sequence
  derived and/or modified CDS sequence (wt) from glycoprotein__RABV__DQ849071.1
augguuccucaagcccuucuguuuguaccccuucuggccauuccauuguguuuugggaaauuccccauuuacacgauaccagacaaacucggucccuggagucccauugauauacaucaccucagcuguccgaauaauuugguuguggaggaugaaggauguaccaaucugucaggauucucauacauggaacuuaaaguaggauacauuucagccauaaaggugaacggguucacuuguacggguguggugacggaagcagaaaccuacacuaacuuuguuggcuaugucaccaccacguuuaagagaaagcacuuucgaccaacaccggaugcaugcagauccgcauacaauuggaagauggcuggugaccccagauacgaagagucucugcacaaucccuauccugauuaucauuggcuccggacuguaaaaaccaccaaagaguccuuuguuaucauaucuccaaguguggcagaucuagauccguacgauaaaucccuucauucgagaguuuuuccuagaggaaaaugcucaggaauaacggugucuucuaccuacugcucuacuaaccaugacuacaccaucuggaugccugaaaaucccagacuggggaccucuugugauauuuucaccaauagcagagggaagagagcauccaaagggagcaagaccuguggauuuguagaugagagaggcuuguacaaaucucuaaaaggagcaugcaaacugaagcugugugggguucuuggacuuagacuuauggauggaacaugggucgcgauucagacaucagacgagaccaaguggugcccuccugaccaguuagugaaucuacaugacuuucauucggaugagauugaacaucuuguuguggaggaguuggucaagaaaagggaagagugccuagaugcacuggaguccaucaugaccaccaaguccgugaguuuccgacgucucagucacuugaggaaacuugugccuggguucggaaaagcauacaccauauucaauaagaccuugauggaggcugaugcucacuacaaaucgguccggacuuggaacgagaucauccccucuaaaggguguuugagaguuggaggcagaugucauccccaugugaacgggguguuuuuuaaugguauuauccuaggcccugacggccaugucuuaaucccggaaaugcagucaucucuccuucagcagcauauggaguuguuggaauccucggucauccccuuaaugcauccuuuggcagauccaucaacgguuuuuaaagauggugacgaggcggaggauuuuguugagguucaccuuccagaugugcauaagcaggucucaggggucgaucucggucucccaagcugggggaaguauguguugaugagugcaggcauuuugacugcacugauguugaugaucuucuuaaugacguguugccgaaggacuaauagagcagagucaauacaacacagucuuggagagacagggaggaaagugucgguaaccucccaaagcgggagggucauaucuucaugggagucauacaaaagcggaggugagaccaagcuguaa

SEQ ID NO: 62864 - RNA, 1575 nt, Artificial Sequence
  derived and/or modified CDS sequence (wt) from glycoprotein__RABV__DQ849072.1
augauuccccaagcucuucuguuugugccccuccuagucuucucguuguguuucgggaaauuccccaucuauacgauacccgacaaacucgguccauggagucccauugacauacaucaucucagcuguccaaacaauuugguuguggaggaugaaggaugcaccaaucugucuggauuuuccuacauggaacucaaaguaggauacaucucagccauuaaagugaauggauucaccuguacagguguggugacggaagcagagaccuacacuaacuuugucgguuacgucaccaccacguuuaagagaaagcacuuccgcccaacgccagaugcgugcagagccgcauacaacuggaagauggcuggugaccccagguaugaggagucucuacacaauccguacccugacuaccauuggcuucggacuguaaagaccaccaaggagucccuuguuaucauaucuccaaguguggcagauuuagacccguacgauaaaucccuucacucgagaguuuuuccuagcggaaaaugcucaggaauaacaguguccucuaccuacugcucuacuaaccacgacuacaccaucuggaugccugagaaucccagacuggggacuuccugugacauuuucgucaauagcagagggaagagagcaucaaaagggagcaagacuuguggguuuguggaugagagaggccuguacaagucucuaaaaggggcaugcaaacuaaaacuaugugggguucuugggcuuagacuuauggauggaacaugggucgcaauucagacgucagaugagaccaaauggugcccuccugaucaacuagugaaucuacaugacuuucgcucggaugagauugaacaucuuguuguggaggaguuggucaagaaaagggaagagugucuggaugcacuggaguccaucaugaccacaaaguccgugaguuuuagacgccuuagucacuugaggaagcuugucccuggguuuggaaaggcguauacuauauucaacaaaaccuugauggaagcugaugcucacuacaaaucaguccggacuuggaacgaaaucauccccucuaaagggugcuuaagaguuggggggagaugucauccucaugugaaugggguguucuucaaugguaucauacuggguccugacggacauguccugauuccagagaugcaaucaucccuccuccagcagcauauggaguuguuggaguccucagucaucccauugaugcaucccuuggcagacccaucaacgauuuuuaaggacggugacgaggcggaggacuuuguugagguucaccucccagacgugcacaagcaggucucgggggucgaucucggucucccaaacugggggaaguaugugcuaaugagcgcaggcgcucuaacugcauugauguugaugauuuucuuaaugacguguugcaggaagacugauagaacaggaucaacacaccacaguccuggagagacggggaggaaagugucuguaacuucccaaaacgggagggucauagcuucaugggagucauacaaaagcggaggugaaaccaagcuguga

SEQ ID NO: 62865 - RNA, 1575 nt, Artificial Sequence
  derived and/or modified CDS sequence (wt) from glycoprotein__RABV__DQ849073.1
augauuccucaaguucuuuuguuuguuccccuucuaguuuucucgucgugucuugggaaauuccccauuuacacgauaccagacaaacuugguccauggagucccaucgauauacaucaucucagcuguccgaacaaucugguuguggaagaugaaggaugcaccaaucugucuggauuuuccuacauggaacucaaagugggauauauuucagccauaaaagugaacggauucaccuguacagguguggugacagaagcagaaaccuacacuaacuuuguugguuaugucaccaccacguuuaagagaaagcacuuccgcccuaugccggaugcgugcagagccgcauacaacuggaagauggcuggugaccccagguaugaagagucucugcacaauccguacccugacuaccacuggcuccggacugucaagaccuccaaggagucccuugucaucauaucuccgagcguugcagauuuggacccguacgauaaaucccuucacucgagaguuuuuccuggcggaaaaugcucaggaauaaccguguccuccacuugcugcucuacuaaccacgacuacaccaucuggaugccugaaaauccuagacugggaacuucgugugacauuuucaccaauaguagagggaagagggcaucaaaagggggcaagacuuguggauuuguggaugaaagaggcuuguacaagucucuaaagggagcaugcaaguugaagcuaugugggguucuaggacuuagacuuauggacggaacaugggucgcaauucagacaucagaugagaucaaauggugcucuccugaucagcuaguaaaucuacacgacuuucacucggaugagauugaacaucucguuguggaggaguuggucaaaaagagggaagagugucuggacgcacuggagacuauuaugaccacaaaguccgugaguuucaggcgucuuagucauuugaggaagcuagucccuggguuuggaaaggcguauaccauauucaacaaaaccuugauggaggcugaugcucacuauaaaucaauccggacuuggaaugaaaucauccccucuaaaggguguuuaagaguuggggggagaugucauccucaugugaacgggguguucuucaacggcauuauacuggguccugacggacauguucuaaucccagagaugcaaucgucccuccuccaccagcauauggaauuguuggaguccucagucaucccucugaugcaucccuuagcagacccgucaacagucuuuaaagacggcgacgaggcagaggacuuuguugagguucaccuuccggaugugcacaagcagaucucggggguugaucuuggucucccaaacugggggaaguaugugcugauaagugcaggugcucugacugcaucaauguugaugauuuucuuaaugacguguugcagaaagacuaauagagcagagucaauacaacacaguccuggagagacggggaggaaagugucgguaacuucucacaacggaagggucauaucuucaugggaaucauauaaaagcggaggugagaccaagcuguga

SEQ ID NO: 62866 - RNA, 1575 nt, Artificial Sequence
  derived and/or modified CDS sequence (wt) from glycoprotein__RABV__DQ875050.1
augguuccucagguucuuuuguuuguacuccuucuggguuuuucguuguguuucgggaaguuccccauuuacacaauaccagacgaacuuggucccuggagcccuauugacauacaccaucucagcuguccaaauaaccugguuguggaggaugaaggauguaccaaccuguccgaguucuccuacauggaacucaaagugggauacaucucagccaucaaagugaacggguucacuugcacagguguugugacagaggcagagaccuacaccaacuuuguugguuaugucacaaccacauucaagagaaagcauuuccgccccaccccagacgcauguagagccgcguauaacuggaagauggccggugaccccagauaugaagagucucuacacaauccguacccugacuaccacuggcuucgaacuguaagaaccaccaaagagucccucauuaucauauccccaagugugacagauuuggacccauaugacaaaucccuucacucaagggucuucccugggcggaagugcucaggaauaacggugucuucuaccuacugcuccacuaaccaugauuacaccauuuggaugcccgagaauccgagaccaaggacaccuugugacauuuuuaccaauagcagagggaagagagcauccaacgggaacaagacuugcggcuuuguggaugaaagaggccuguauaagucucuaaaaggagcaugcaggcucaaguuauguggaguucuuggacuuagacuuauggauggaacaugggucgcgaugcaaacaucaggugagaccaaauggugcccuccagaucaguuggugaauuugcacgacuuucgcucagacgagauugagcaucucguuguggaggaguuagucaagaaaagagaggaaugucuggaugcauuagaguccaucaugaccaccaagucaguaaguuucagacgucucagucaccugagaaaacuugucccaggguuuggaaaagcauauaccauauucaacaaaaccuugauggaggcugaugcucacuacaagucaguccggaccuggaaugagaucauccccucaaaaggguguuugaaaguuggaggaaggugccauccucaugugaacgggguguuuuucaaugguuuaauauuagggccugacgaccauguccuaaucccagagaugcaaucaucccuccuccagcaacauauggaguuguuggaaucuucaguuaucccccugaugcacccccuggcagacccuucuacaguuuucaaagaaggugaugaggcugaggauuuuguugaaguucaccuccccgauguguacaaacagaucucagggguugaccugggucucccgaacuggggaaaguauguauugaugacugcaggggccaugauuggccugguguugauauuuucccuaaugacauggugcagaagagccaaucgaccagaaucgaaacaacgcaguuuuggagggacaggggggaaugugucagucacuucccaaagcggaaaagucauaccuucaugggaaucauauaagaguggaggugagaucagacuguga

SEQ ID NO: 62867 - RNA, 1575 nt, Artificial Sequence
  derived and/or modified CDS sequence (wt) from glycoprotein__RABV__DQ875051.1
augguuccccaagcucuuuugcuuguaccccuucuggguuuuucuuuguguuucgggaaauucccuauuuacacgauaccaacaaagcuuggucccuggagcccgauugauauacaucaccucagcuguccaaacaauuugguuguagaggacgaaggaugcaccaaccugucaggguucuccuacauggaacuuaaaguuggacgcaucucagccauaaaggugaacggguucacuugcacagguguugugacagaggcagaaaccuacaccaacuuugucgguuaugucaccaccacauuuaagagaaaacacuuccgcccgaugccaggaugcauguacagccgcguacaacuggaagauggccggucaccccagauagaagagucucuacacaauccguacccugacuaccacuggcuucgaacuguaagaaccaccaaagagucccucauuaucauauccccaagugugacagauuuggacccauaugacaaaucccuucacucaagggucuucccugggcggaagugcucaggaauaacggugucuucuaccuacugcuccacuaaccacgauuacaccguuuggaugccugaaauucugagacuagggacaucuugugauauuuuuaccaauaguagagggaagagagcauccaaggggagcaagaccuguggcuuuguagaugaaaggggccuauauaagucucuaaaaggcgcaugcaaacucaaguuauguggaguuccuggacuuagacuuauggacggaacaugggucgcgaugcagacaucaaaugagaccaaaugguguccucccggucaguugguuaaccugcacgaccuucacucagacgaaauugagcaucuuguuguagaggaguuggucaagaaaagagaggagugucuggaugcacuagaguccaucacaaccaccaagucagugaguuucagacgucucagucauuuaagaaaacuuguccccggguucggaaaagcauauaccauauucaacaagaccuugauggaggcugaagcucacuacaagucagucaggacuuggaaugagaucauccccucaaaaggguguuugagaguuggaggggggugucauccucauguaaacgggguauuuuucaaugguauaauauuagggccugacggccauguuuuaaucccagagaugcaaucaucccuccuccagcaacauauagaguuauuggaauccucaguuauuccccugaugcacccccuugcagacccguucacaguuuucaaggacggcgaugagauugaggauuuuguggaaguucaccuucccgaugugcacgaacaggucucagggguugaccugggucucccgaacuggggggaguauguauuacugagcgcagggaccuuaauugcuuugauguugauaauuuuccuaauaacauguuguaaaagagucgaucggccagaaucuacgcaacgcagucuuagagggacagggaggaaugugucagucaccucucaaagcgggaaauucauaccuucaagggagucguauaaaagugggggugagacuggacuguga

SEQ ID NO: 62868 - RNA, 1575 nt, Artificial Sequence
  derived and/or modified CDS sequence (wt) from glycoprotein__RABV__E02022.1
augguuccgcaagcucuucugcuuguacccauucuggguuuuuccucguguuucgggaaauucccuauuuacacgauaccagacacacuuggucccuggagcccgaucgauauacaucaucucaguugcccaaacaauuugguuguagaggacgaaggaugcaccaaccugucaggguucuccuacauggaacuuaaaguuggacacaucucagccauaaaggugaacggguucacuugcacaggcguuguaacagaggcagaaaccuacacuaacuuuguugguuaugucaccaccacuuucaaaagaaagcauuuccgcccaacaccagaugcuuguagagcugcguacaacuggaagauggccggugaccccagauaugaagagucucuacacaguccguacccugacuaccauuggcuucgaacuguaaaaaccacaaaggagucccucguuaucauaucuccaagugugguagauuuggacccauaugacaacucccuucacucgagggucuucccuagcggaaagugcucaggaauaacaguaucuucugucuacugcucaacuaaccacgauuacaccguuuggaugccugaaagucugagacuagggacaucuugugacauuuuuaccaauaguagagggaagagaguauccaaggggagcaagaccuguggcuuuguagaugaaagaggccuauauaagucucuaaaaggcgcaugcaaacucaaguuguguggaguucguggacuuagacuuauggacggaacaugggucgcgaugcagacaucaaaugagaccaaaugguguccucccgaucaguugguuaaucugcacgaccuucgcucagaugaaaucgagcaucuuguuauagaggaguuggucaagaaaagagaggagugucuggaugcauuagaguccaucauaaccaccaagucagugaguuucagacgucucaguuauuuaagaaaacuuguccccggguucggaaaagcauauaccauauucaacaagaccuugauggaggcugaagcucacuacaagucagucaggacuuggaaugagaucauccccucaaaaggauguuugagaguuggagggaggugucauccucauguaaacgggguguuuuucaaugguauaauauuagggccugacggucauguuuuaaucccagagaugcaaucaucccuccuccagcaacauauagaguuauuggaauccucaguuauuccccugaugcacccccuugcagacccguucacaguuuucaaggacggcgaugagacugaggauuuuauagaaguucaccuucccgaugugcacgaacaagucucagggguugaccugggucucccgaacuggggggaguauguauuacuaagugcagggaccuugauugccuugauguugauaauuuuccuaaugacauguuguagaaaagucgaucggccagaaucuacacaacgcagucucagagggacaggaaggaaugugucagucaccucccaaagcgggaaauucauaccuucaugggagucguauaaaagugggggugagacuggacuguga

SEQ ID NO: 62869 - RNA, 1575 nt, Artificial Sequence
  derived and/or modified CDS sequence (wt) from glycoprotein__RABV__EF206707.1
augguuccucaggcucuccuguuuguaccccuucugguuuuuccauuguguuuugggaaauucccuauuuacacgauaccagacaagcuuggucccuggagcccgauugacauacaucaccucagcugcccaaacaauuugguaguggaggacgaaggaugcaccaaccugucaggguucuccuacauggaacuuaaaguuggauacaucuuagccauaaaaaugaacggguucacuugcacaggcguugugacggaggcugaaaccuacacuaacuucguugguuaugucacaaccacguucaaaagaaagcauuuccgcccaacaccagaugcauguagagccgcguacaacuggaagauggccggugaccccagauaugaagagucucuacacaauccguacccugacuaccgcuggcuucgaacuguaaaaaccaccaaggagucucucguuaucauaucuccaaguguggcagauuuggacccauaugacagaucccuucacucgagggucuucccuagcgggaagugcucaggaguagcggugucuucuaccuacugcuccacuaaccacgauuacaccauuuggaugcccgagaauccgagacuagggaugucuugugacauuuuuaccaauaguagagggaagagagcauccaaagggagugagacuugcggcuuuguagaugaaagaggccuauauaagucuuuaaaaggagcaugcaaacucaaguuauguggaguucuaggacuuagacuuauggauggaacaugggucgcgaugcaaacaucaaaugaaaccaaauggugcccucccgaucaguuggugaaccugcacgacuuucgcucagacgaaauugagcaccuuguuguagaggaguuggucaggaagagagaggagugucuggaugcacuagaguccaucaugacaaccaagucagugaguuucagacgucucagucauuuaagaaaacuugucccuggguuuggaaaagcauauaccauauucaacaagaccuugauggaagccgaugcucacuacaagucagucagaacuuggaaugagauccucccuucaaaaggguguuuaagaguuggggggaggugucauccucaugugaacgggguguuuuucaaugguauaauauuaggaccugacggcaaugucuuaaucccagagaugcaaucaucccuccuccagcaacauauggaguuguuggaauccucgguuaucccccuugugcacccccuggcagacccgucuaccguuuucaaggacggugacgaggcugaggauuuuguugaaguucaccuucccgaugugcacaaucaggucucaggaguugacuugggucucccgaacugggggaaguauguauuacugagugcaggggcccugacugccuugauguugauaauuuuccugaugacauguuguagaagagucaaucgaucagaaccuacgcaacacaaucucagagggacagggagggaggugucagucacuccccaaagcgggaagaucauaucuucaugggaaucacacaagagugggggugagaccagacuguga

SEQ ID NO: 62870 - RNA, 1575 nt, Artificial Sequence
  derived and/or modified CDS sequence (wt) from glycoprotein__RABV__EF206709.1
augguuccucaggcucuccuguuuguaccccuucugguuuuuccauuguguuuugggaaauucccuauuuacacgauaccagacaagcuuggucccuggaguccgauugacauacaucaccucagcugcccaaacaauuugguaguggaggacgaaggaugcaccaaccugucaggguucuccuacauggaacuuaaaguuggauacaucuuagccauaaaagugaacggguucacuugcacaggcguugugacggaggcugaaaccuacacuaacuucguugguuaugucacaaccacguucaaaagaaagcauuuccgcccaacaccagaugcauguagagccgcguacaacuggaagauggccggugaccccagauaugaagagucucuacacaauccguacccugacuaccgcuggcuucgaacuguaaaaaccaccaaggagucucucguuaucauaucuccaaguguggcagauuuggacccauaugacagaucccuucacucgagggucuucccuagcgggaagugcucaggaguagcggugucuucuaccuacugcuccacuaaccacgauuacaccauuuggaugcccgagaauccgagacuagggaugucuugugacauuuuuaccaauaguagagggaagagagcauccaaagggagugagacuugcggcuuuguagaugaaagaggccuauauaagucuuuaaaaggagcaugcaaacucaaguuauguggaguucuaggacuuagacuuauggauggaacaugggucucgaugcaaacaucaaaugaaaccaaauggugcccucccgauaaguuggugaaccugcacgacuuucgcucagacgaaauugagcaccuuguuguagaggaguuggucaggaagagagaggagugucuggaugcacuagaguccaucaugacaaccaagucagugaguuucagacgucucagucauuuaagaaaacuugucccuggguuuggaaaagcauauaccauauucaacaagaccuugauggaagccgaugcucacuacaagucagucagaacuuggaaugagauccucccuucaaaaggguguuuaagaguuggggggaggugucauccucaugugaacgggguguuuuucaaugguauaauauuaggaccugacggcaaugucuuaaucccagagaugcaaucaucccuccuccagcaacauauggaguuguuggaauccucgguuaucccccuugugcacccccuggcagacccgucuaccguuuucaaggacggugacgaggcugaggauuuuguugaaguucaccuucccgaugugcacaaucaggucucaggaguugacuugggucucccgaacugggggaaguauguauuacugagugcaggggcccugacugccuugauguugauaauuuuccugaugacauguuguagaagagucaaucgaucagaaccuacgcaacacaaucucagagggacagggagggaggugucagucacuccccaaagcgggaagaucauaucuucaugggaaucacacaagagugggggugagaccagacuguaa

SEQ ID NO: 62871 - RNA, 1575 nt, Artificial Sequence
  derived and/or modified CDS sequence (wt) from glycoprotein__RABV__EF206715.1
augguuccucaggcucuccuguuuguaccccuucugguuuuuccauuguguuuugggaaauucccuauuuacacgauaccagacaagcuuggucccuggaguccgauugacauacaucaccucagcugcccaaacaauuugguaguggaggacgaaggaugcaccaaccugucaggguucuccuacauggaacuuaaaguuggauacaucuuagccauaaaagugaacggguucacuugcacaggcguugugacggaggcugaaaccuacacuaacuucguugguuaugucacaaccacguucaaaagaaagcauuuccgcccaacaccagaugcauguagagccgcguacaacuggaagauggccggugaccccagauaugaagagucucuacacaauccguacccugacuaccgcuggcuucgaacuguaaaaaccaccaaggagucucucguuaucauaucuccaaguguggcagauuuggacccauaugacagaucccuucacucgagggucuucccuagcgggaagugcucaggaguagcggugucuucuaccuacugcuccacuaaccacgauuacaccauuuggaugcccgagaauccgagacuagggaugucuugugacauuuuuaccaauaguagagggaagagagcauccaaagggagugagacuugcggcuuuguagaugaaagaggccuauauaagucuuuaaaaggagcaugcaaacucaaguuauguggaguucuaggacuuagacuuauggauggaacaugggucucgaugcaaccaucaaaugaaaccaaauggugcccucccgauaaguuggugaaccugcacgacuuucgcucagacgaaauugagcaccuuguuguagaggaguuggucaggaagagagaggagugucuggaugcacuagaguccaucaugacaaccaagucagugaguuucagacgucucagucauuuaagaaaacuugucccuggguuuggaaaagcauauaccauauucaacaagaccuugauggaagcugaugcucacuacaagucagucagaacuuggaaugagauccucccuucaaaaggguguuuaagaguuggggggaggugucauccucaugugaacgggguguuuuucaaugguauaauauuaggaccugacggcaaugucuuaaucccagagaugcaaucaucccuccuccagcaacauauggaguuguuggaauccucgguuaucccccuugugcacccccuggcagacccgucuaccguuuucaaggacggugacgaggcugaggauuuuguugaaguucaccuucccgaugugcacaaucaggucucaggaguugacuugggucucccgaacugggggaaguauguauuacugagugcaggggcccugacugccuugauguugauaauuuuccugaugacauguuguagaagagucaaucgaucagaaccuacgcaacacaaucucagagggacagggagggaggugucagucacuccccaaagcgggaagaucauaucuucaugggaaucacacaagagugggggugagaccagacuguaa

SEQ ID NO: 62872 - RNA, 1575 nt, Artificial Sequence
  derived and/or modified CDS sequence (wt) from glycoprotein__RABV__EF206716.1
augguuccucaggcucuccuguuuguaccccuucugguuuuuccauuguguuuugggaaauucccuauuuacacgauaccagacaagcuuggucccuggaguccgauugacauacaucaccucagcugcccaaacaauuugguaguggaggacgaaggaugcaccaaccugucaggguucuccuacauggaacuuaaaguuggauacaucuuagccauaaaagugaacggguucacuugcacaggcguugugacggaggcugaaaccuacacuaacuucguugguuaugucacaaccacguucaaaagaaagcauuuccgcccaacaccagaugcauguagagccgcguacaacuggaagauggccggugaccccagauaugaagagucucuacacaauccguacccugacuaccgcuggcuucgaacuguaaaaaccaccaaggagucucucguuaucauaucuccaaguguggcagauuuggacccauaugacagaucccuucacucgagggucuucccuagcgggaagugcucaggaguagcggugucuucuaccuacugcuccacuaaccacgauuacaccauuuggaugcccgagaauccgagacuagggaugucuugugacauuuuuaccaauaguagagggaagagagcauccaaagggagugagacuugcggcuuuguagaugaaagaggccuauauaagucuuuaaaaggagcaugcaaacucaaguuauguggaguucuaggacuuagacuuauggauggaacaugggucucgaugcaaacaucaaaugaaaccaaauggugcccucccgauaaguuggugaaccugcacgacuuucgcucagacgaaauugagcaccuuguuguagaggaguuggucaggaagagagaggagugucuggaugcacuagaguccaucaugacaaccaagucagugaguuucagacgucucagucauuuaagaaaacuugucccuggguuuggaaaagcauauaccauauucaacaagaccuugauggaagccgaugcucacuacaagucagucggaacuuggaaugagauccucccuucaaaaggguguuuaagaguuggggggaggugucauccucaugugaacgggguguuuuucaaugguauaauauuaggaccugacggcaaugucuuaaucccagagaugcaaucaucccuccuccagcaacauauggaguuguuggaauccucgguuaucccccuugugcacccccuggcagacccgucuaccguuuucaaggacggugacgaggcugaggauuuuguugaaguucaccuucccgaugugcacaaucaggucucaggaguugacuugggucucccgaacugggggaaguauguauuacugagugcaggggcccugacugccuugauguugauaauuuuccugaugacauguuguagaagagucaaucgaucagaaccuacgcaacacaaucucagagggacagggagggaggugucagucacuccccaaagcgggaagaucauaucuucaugggaaucacacaagagugggggugagaccagacuguaa

SEQ ID NO: 62873 - RNA, 1575 nt, Artificial Sequence
  derived and/or modified CDS sequence (wt) from glycoprotein__RABV__EF206717.1
augguuccucaggcucuccuguuuguaccccuucugguuuuuccauuguguuuugggaaauucccuauuuacacgauaccagacaagcuuggucccuggagcccgauugacauacaucaccucagcugcccaaacaauuugguaguggaggacgaaggaugcaccaaccugucaggguucuccuacauggaacuuaaaguuggauacaucucagccauaaaaaugaacggguucacuugcacaggcguugugacggaggcugaaaccuacacuaacuucguugguuaugucacaaccacguucaaaagaaagcauuuccgcccaacaccagaugcauguagagccgcguacaacuggaagauggccggugaccccagauaugaagagucucuacacaauccguacccugacuaccgcuggcuucgaacuguaaaaaccaccaaggagucucucguuaucauaucuccaaguguggcagauuuggacccauaugacagaucccuucacucgagggucuucccuagcgggaagugcucaggaguagcagugucuucuaccuacugcuccacuaaccacgauuacaccauuuggaugcccgagaauccgagacuagggaugucuugugacauuuuuaccaauaguagagggaagagagcauccaaagggagugagacuugcggcuuuguagaugaaagaggccuauauaagucuuuaaaaggagcaugcaaacucaaguuauguggaguucucggacuuagacuuauggauggaacaugggucgcgaugcaaacaucaaaugaaaccaaauggugcccucccgaucaguuggugaaccugcacgacuuucgcucagacgaaauugagcaccuuguuguagaggaguuggucaggaagagagaggagugucuggaugcacuagaguccaucaugacaaccaagucagugaguuucagacgucucagucauuuaagaaaacuugucccuggguuuggaaaagcauauaccauauucaacaagaccuugauggaagccgaugcucacuacaagucagucagaacuuggaaugagauccucccuucaaaaggguguuuaagaguuggggggaggugucauccucaugugaacgggguguuuuucaaugguauaauauuaggaccugacggcaaugucuuaaucccagagaugcaaucaucccuccuccagcaacauauggaguuguuggaauccucgguuaucccccuuaugcacccccuggcagacccgucuaccguuuucaaggacggugacgaggcugaggauuuuguugaaguucaccuucccgaugugcacaaacaggucucaggaguugacuugggucucccgaacugggggaaguauguauuacugagugcaggggcccugacugccuugauguugauaauuuuccugaugacauguuguagaagagucaaucgaucagaaccuacgcaacacaaucucagagggacagggagggaggugucagucacuccccaaagcgggaagaucauaucuucaugggaaucauacaagagugggggugagaccagacuguga

SEQ ID NO: 62874 - RNA, 1575 nt, Artificial Sequence
  derived and/or modified CDS sequence (wt) from glycoprotein__RABV__EF206719.1
augguuccucaggcucuccuguuuguaccccuucugguuuuuccauuguguuuugggaaauucccuauuuacacgauaccagacaagcuuggucccuggaguccgauugacauacaucaccucagcugcccaaacaauuugguaguggaggacgaaggaugcaccaaccugucaggguucuccuacauggaacuuaaaguuggauacaucuuagccauaaaagugaacggguucacuugcacaggcguugugacggaggcugaaaccuacacuaacuucguugguuaugucacaaccacguucaaaagaaagcauuuccgcccaacaccagaugcauguagagccgcguacaacuggaagauggccggugaccccagauaugaagagucucuacacaauccguacccugacuaccgcuggcuucgaacuguaaaaaccaccaaggagucucucguuaucauaucuccaaguguggcagauuuggacccauaugacagaucccuucacucgagggucuucccuagcgggaagugcucaggaguagcggugucuucuaccuacugcuccacuaaccacgauuacaccauuuggaugcccgagaauccgagacuagggaugucuugugacauuuuuaccaauaguagagggaagagagcauccaaagggagugagacuugcggcuuuguagaugaaagaggccuauauaagucuuuaaaaggagcaugcaaacucaaguuauguggaguucuaggacuuagacuuauggauggaacaugggucucgaugcaaacaucaaaugaaaccaaauggugcccucccgauaaguuggugaaccugcacgacuuucgcucagacgaaauugagcaccuuguuguagaggaguuggucaggaagagagaggagugucuggaugcacuagaguccaucaugacaaccaagucagugaguuucagacgucucagucauuuaagaaaacuugucccuggguuuggaaaagcauauaccauauucaacaagaccuugauggaagccgaugcucacuacaagucagucgaaacuuggaaugagauccucccuucaaaaggguguuuaagaguuggggggaggugucauccucaugugaacgggguguuuuucaaugguauaauauuaggaccugacggcaaugucuuaaucccagagaugcaaucaucccuccuccagcaacauauggaguuguuggaauccucgguuaucccccuugugcacccccuggcagacccgucuaccguuuucaaggacggugacgaggcugaggauuuuguugaaguucaccuucccgaugugcacaaucaggucucaggaguugacuugggucucccgaacugggggaaguauguauuacugagugcaggggcccugacugccuugauguugauaauuuuccugaugacauguuguagaagagucaaucgaucagaaccuacgcaacacaaucucagagggacagggagggaggugucagucacuccccaaagcgggaagaucauaucuucaugggaaucacacaagagugggggugagaccauacuguaa

SEQ ID NO: 62875 - RNA, 1575 nt, Artificial Sequence
  derived and/or modified CDS sequence (wt) from glycoprotein__RABV__EF206720.1
augguuccucaggcucuccuguuuguaccccuucugguuuuuccauuguguuuugggaaauucccuauuuacacgauaccagacaagcuuggucccuggagcccgauugacauacaucaccucagcugcccaaacaauuugguaguggaggacgaaggaugcaccaaccugucaggguucuccuacauggaacuuaaaguuggauacaucuuagccauaaaagugaacggguucacuugcacaggcguugugacggaggcugaaaccuacacuaacuucguugguuaugucacaaccacguucaaaagaaagcauuuccgcccaacaccagaugcauguagagccgcguacaacuggaagauggccggugaccccagauaugaagagucucuacacaauccguacccugacuaccgcuggcuucgaacuguaaaaaccaccaaggagucucucguuaucauaucuccaaguguggcagauuuggacccauaugacagaucccuucacucgagggucuucccuagcgggaagugcucaggaguagcggugucuucuaccuacugcuccacuaaccacgauuacaccauuuggaugcccgagaauccgagacuagggaugucuugugacauuuuuaccaauaguagagggaagagagcauccaaagggagugagacuugcggcuuuguagaugaaagaggccuauauaagucuuuaaaaggagcaugcaaacucaaguuauguggaguucuaggacuuagacuuauggauggaacaugggucucgaugcaaacaucaaaugaaaccaaauggugcccucccgauaaguuggugaaccugcacgacuuucgcucagacgaaauugagcaccuuguuguagaggaguuggucaggaagagagaggagugucuggaugcacuagaguccaucaugacaaccaagucagugaguuucagacgucucagucauuuaagaaaacuugucccuggguuuggaaaagcauauaccauauucaacaagaccuugauggaagccgaugcucacuacaagucagucagaacuuggaaugagauccucccuucaaaaggguguuuaagaguuggggggaggugucauccucaugugaacgggguguuuuucaaugguauaauauuaggaccugacggcaaugucuuaaucccagagaugcaaucaucccuccuccagcaacauauggaguuguuggaauccucgguuaucccccuugugcacccccuggcagacccgucuaccguuuucaaggacggugacgaggcugaggauuuuguugaaguucaccuucccgaugugcacaaucaggucucaggaguugacuugggucucccgaacugggggaaguauguauuacugagugcaggggcccugacugccuugauguugauaauuuuccugaugacauguuguagaagagucaaucgaucagaaccuacgcaacacaaucucagagggacagggagggaggugucagucacuccccaaagcgggaagaucauaucuucaugggaaucacacaagagugggggugagaccagacuguaa

SEQ ID NO: 62876 - RNA, 1575 nt, Artificial Sequence
  derived and/or modified CDS sequence (wt) from glycoprotein__RABV__EF437215.1
augguuccucagguucuuuuguuuguaccccuucugguuuucucaauguguuucgggaaauucccuaucuauacgauaccagauaaacuuggucccuggagcccgauugacauacaucaucucagcuguccaaacaaccugguuguggaagaugaaggaugcacuaacuugucggguuucuccuacauggaacuuaaggugggauacaucucggccauaaaaguaaacggguucacgugcacggguguggugacagaggcagagacuuacacuaacuuugucgguuaugucaccaccacguucaaaagaaagcauuuccgcccaacaccagaugcaugucgagcugcuuacaacuggaagauggccggugaccccagauaugaagaaucgcugcacaauccguacccugacuaccacuggcuucgaaccguuaaaaccacaaaggagucccucgucaucauauccccaaguguagcggaccuggacccauacgacaaaucccuucauucgagggucuuuccuagcgggaagugcucgggaauaacaauaucaucuacuuacugcucuacuaaccaugauuacacaaucuggaugcccgagaauccgagacuggggacaucuugugacaucuuuaccaacaguagagggaagagagcauccaaagggggcaaaacuugcggauuuguugaugaaagaggcuuguacaagucuuugaaaggggcaugcaagcucaaauugugugguguucucggccuuagacuuauggauggaacguggguugcaaugcaaacaucggacgaaaccaagugguguccuccugaucaguuaguaaaucuacacgacuuucgcucggacgagaucgaacaucuuguuguggaggaguuggucaagaaaagagaggagugucuggaugcacuagaguccaucauggcuaccaagucggugaguuucagacgucucagccacuugagaaaacuugucccuggguucggaaaagcauacaccauauucaacaaaaccuugauggaagcagaugcccauuacaagucaguccgaaccuggaaugaaaucauccccuccaaaggguguuugagaguuggagggaggugucauccucacgugaacgggguguuuuuuaacgguauaauacuggguccugacggccauguucuaaucccagagaugcaaucaucccuccuucagcagcauauggaguuguuggaauccucaguuaucccccugaugcauccuuuagcagacccgucuacaguuuucaaagacggugaugaagcagaggauuuuguugagguccaccuucccgacgugcacaaacaaauuucagguguugaccugggucuccccagcuggggaaaguauguuuugguuagugcagggguuuugguuguccugauguugacaauuuucauaaugacauguuguggaagaguccaucgacccaagucuacacaacacggucucggagggacagggaggaaggugucggucacuucccaaagcgggaaggucauaucuucaugggagucauauaagagcgggggugagaccagacuguga

SEQ ID NO: 62877 - RNA, 1575 nt, Artificial Sequence
  derived and/or modified CDS sequence (wt) from glycoprotein__RABV__EF556198.1
augacuccucaaguucuuuuguuuguuccccuucuaguuuucucgucguguuuugggaaauuccccauuuacacgauaccagacaaacuugguccauggagucccaucgauauacaucaucucagcuguccgaacaaucugguuguggaagaugaaggaugcaccaaucugucuggauuuuccuacauggaacucaaagugggauauauuucagccauaaaagugaacggauucaccuguacagguguggugaccgaagcagaaaccuacacuaacuuuguugguuaugucaccaccacguuuaagagaaagcacuuucgcccuaugccggaugcgugcagagccgcauacaacuggaagauggcuggugaccccagguaugaagagucucugcacaauccguaccccgacuaccacuggcuccgaacugucaagaccaccaaggagucccuugucaucauaucuccgagcguugcagauuuagacccguacgauaaaucccuucacucgagaguuuuuccuggcggaaaaugcucaggaauaaccguguccuccgcuugcugcucuacuaaccacgacuacaccaucuggaugccugaaaauccuagacugggaacuucaugugacauuuucaccaauaguagagggaagagggcaucaaaagggggcaagacuuguggauuuguggaugaaagaggcuuguacaagucucuaaagggagcaugcaagcugaagcuaugugggguucuaggacuuagacuuauggacggaacaugggucgcgauucagacaucagaugagaucaaauggugcucuccugaucagcuaguaaaucuacacgacuuucacucggaugagauugaacaucuuguuguggaggaguuggucaaaaagagggaagagugucuggacgcacuggagacuauuaugaccacaaaguccgugaguuucagacgucuuagucauuugaggaagcuggucccugggucuggaaaggcguauaccauauucaacaaaaccuugauggaggcugaugcucacuacaaaucaauccggacuuggaaugaaaucauccccuccaaaggguguuuaagaguuggggggagaugucauccucaugugaacgggguguucuucaacggcauuauacuggguccugacggacauguucuaaucccagagaugcagucgucccuccuccaccagcauauggaauuguuggaguccucagucaucccuuugaugcaucccuuagcagacccgucaacagucuuuaaagacggcgacgaggcagaggacuuuguugagguucaccuuccggaugugcacaagcagaucucggggguugaucuuggucucccaaacugggggaaguaugugcugauaagugcaggugcucugacugcauuaauguugacgauuuucuuaaugacguguugcagaaaaacuaauagagcagagucaauacaacacaguccuggagagacagggaggaaagugucggugacuucucacaacggaagggucauaucuucaugggaaucauauaaaagcggaagugagaccaagcuguga

SEQ ID NO: 62878 - RNA, 1575 nt, Artificial Sequence
  derived and/or modified CDS sequence (wt) from glycoprotein__RABV__EF564174.1
augauuccucaagcucuguuguuuguaccucuucugguuuuuccauuguguuucgggaaauuccccauuuacacgauaccagacaaacucggccccuggagcccgaucgauauacauaaccucagcuguccgaacaaucugguuguggaggacgaaggauguaccaaucugucaggauucucauacauggagcuuaaaguaggauauauuucggccauaaaggugaacggguucacuuguacgggugugguaacggaagcagaaaccuacacuaacuuugucgguuaugucaccaccacguuuaagagaaagcacuuccgaccaacaccggaugcaugcagaucagcauacaauuggaagauggcaggugaccccagauaugaagagucucugcacaaucccuauccugauuaucauuggcuccggacuguaaaaaccaccaaagagucuguuguuaucauaucuccaaguguggcagacuuagacccguacgauaaaucacuucauucgagaguuuuuccuagaggaaaaugcucaggaauaacggugucuucugccuacugcucuaccaaccaugauuauaccaucuggaugccugaaaauccuagacuggggaccucuugugauauuuucaccaacagcagagggaagagagcauccaaagggagcaagaccuguggauuuguggaugagagaggcuuguacaaaucucuaaaaggagcaugcaaacugaagcuguguggaguucuuggacuuaggcuuauggacggaacaugggucgcgauucagacaucaaacgagaccaaguggugcccuccugaucaacucgugaaucuacaugacuuucauucagaugagauugaacaucuuguuguggaggaguugguugagaagagggaggagugucuagaugcacuggaguccaucaugaccaccaaucccgugaguuucagacgucucagucccuugaggaagcuugugccuggauuuggaaaagcauacaccauauucaacaagaccuuaauggaggcugaugcucacuacaaaucgguccaaacuugggaugagaucauccccucgaaaggguguuuaagagucggggcgagaugucauccucaugugaacggaguauuuuucaaugguaucauccuaggcccugacggccaugucuuaaucccggaaaugcagucaucccuccuccagcagcauauggaguuguuggaauccucggucauccccuuaaugcaucccuuggcagauccaucaacgguuuuuaaagauggugacgagguggaggauuuuguugagguucaccuuccagaugugcauaagcaggucucagggguugaucucggucucccaaacugggggaaggauguguugaugggcgcaggcguuuugacggcacugauguugaugauuuuccuaaugacguguugccgaaggacuaauagagcagaaucaauacaacacagucuuggagagacagggaggaaagugucggugaccucccaaagcgggagggucauaucuucaugggagucauauaaaagcggaggugagaccaagcuguaa

SEQ ID NO: 62879 - RNA, 1581 nt, Artificial Sequence
  derived and/or modified CDS sequence (wt) from glycoprotein__RABV__EF614261.1
augcccucucaagcagucuuucuuguucuuaccacgguuuucucucaguguguugggaaauucccuauuuacacuauuccugacaaauuaggaccuuggagccccauagacauucaucaucuuagcuguccgaauaauuuagugguggaagaugaugggugcaccacccuaucuggguucacguauauggaguugaaggugggauauauaacaacgauaaaaguagaugguuuuacauguacuggaauagugacagaggcagaaaccuacacaaauuuuguugguuacguuaccaccacuuucaaaaggaaacauuucaggccaggcccaagugcaugcagggaugcauacaacuggaaagccgcaggugacccuagauacgaagaguccuugcacaauccauauccagauucucacugguugagaaccgucacaaccacuaaagagucucuuuuaaucauuucgccuagcgugguggacauggaugcauacgacaaaucucuucucucuaagauauucccuaacgggaagugccccgggguauccauugccucuccauuuugcuccaccaaucaugauuacacaauuuggaugccugaaaacacaaagaccggaaugucgugugauauauucacgaccaguaaagggaagagagcuacuaaggaugguaaguuguguggguuuguugaugagagggggcucuauaaaucauugaagggaucaugcaaauugaaacugugcggugucucuggcuuaaggcugauggacgggucaugggucuccauccaaaaucacgaagaggccaaguggugcccucccgaucaacuggugaacguucaugauuuccacucagaugagaucgagcaucugauuguagaggagcuuguuaagaagcgggaggaguguuuggacgccuuagaaucgaucaugacaaccaaaucgaucaguuuucgucgccucagccaccugagaaaacuuguuccuggguuuggcaaagcuuacaccaucauaaacaagacacucauggaagcugaugcucauuacaagucgauaagggaauggucagaaauuaucccauccaagggauguuugguagcgggaggcagauguuaucaucaucacaauggaguauucuucaacgggauaaucuugagcccugauggacauguauuaaucccggagaugcagucugcuuugcuucaacaacauaucgagcuauuggagucaucuguaauaccacucaugcauccacuggcugacccuuccacuguuuucaaaggggaugauggggcggaggauuuuguagagguucaucuuccagauguucaaaaacagaucucuggaauugauuuaggccuuccggaguggaagagauacuucuuaauaggaguggcugcauugacccuauuugccuugacaauauuuguuguggugugcugucgaagaguuaggaggagggagagggccaaacccaauccaguggaauugauucgaaaggugucugugacuucucaaagcggcaaagugaucccuucaugggaaucauacaagguggaggcagagggucaaucccaagccuaa

SEQ ID NO: 62880 - RNA, 1575 nt, Artificial Sequence
  derived and/or modified CDS sequence (wt) from glycoprotein__RABV__EF643518.1
augauuccucaaguucuuuuguuuguuccccuucuaguuuucucgucguguuuugggaaauuccccauuuauacgauaccagacaagcuugguccauggagucccaucgauauacaucaucucagcuguccgaacaaucugguuguggaagaugaaggaugcaccaaucugucugguuuuuccuacauggaacucaaagugggauauauuucagccauaaaagugaacggauucaccuguacagguguggugacagaagcagaaaccuacacuaacuuuguugguuaugucaccaccacguuuaagagaaagcacuuucgcccuaugccggaugcaugcagagccgcauacaauuggaagauggcuggugaccccagguaugaagagucucugcacaauccguacccugacuaccacuggcuccgaacugucaagaccaccaaggagucccuugucaucauaucuccgagcguugcagauuuggacccguacgauaaaucccuucacucgagaguuuuuccuggcggaaaaugcucaggaauaaccguguccuccacuugcugcucuaccaaccacgauuacaccaucuggaugccugaaaauccuagacugggaacuucgugugacauuuucaccaauaguagagggaagagggcaucaaaagggggcaagacuuguggauuuguggaugaaagaggcuuguacaagucucuaaagggagcaugcaagcugaaacuaugugggguucuaggacuuagacuuauggacggaacaugggucgcaauucagacaucagaugagaucaaauggugcucuccugaucagcuaguaaaucuacacgacuuucacucggaugagauugaacaucuuguuguggaggaguuggucaaaaagagggaagagugucuggacgcacuggagacuauuaugaccacaaaguccgugaguuucagacgucuuagucauuugaggaagcuagucccuggguuuggaaaggcguauaccauauucaacaaaacccugauggaggcugaugcucacuauaaaucaauccggacuuggaaugaaaucauccccucuaaaggguguuugagaguuggggggagaugucauccucaugugaacgggguguucuucaacgguauuauacugggucccgacggacauguucuaaucccagagaugcaaucgucccuccuccaccagcauauggaauuguuggaguccucagucaucccuuugaugcaucccuuagcagacccgucaacagucuuuaaagacggcgacgaggcagaggacuuuguugagguucaccuuccggaugugcacaagcagaucucggggguugaucuuggucucccaaacugggggaaguaugugcugauaagugcaggugcucugacugcauuaauguugaugauuuucuuaaugacguguugcagaaagacuaauagagcagagucaauacaacacaguccuggagagacagggaggaaagugucgguaacuucucacaacggaagggucauaucuucaugggaaucauauaaaagcggaggugagaccaagcuguga

SEQ ID NO: 62881 - RNA, 1575 nt, Artificial Sequence
  derived and/or modified CDS sequence (wt) from glycoprotein__RABV__EU008924.1
augauuccucaagcucuuuuguuuguuccccuucuaguuuucucgucguguuuugggaaauuccccauuuacacgauaccagacaaacucgguccauggagucccaucgauauacaucaccucagcuguccgaauaauuugguuguggaagaugaaggauguaccaaucugucugguuuuuccuacauggaacucaaagugggauauauuucagccauaaaagugaacggauucaccuguacagguguggugacagaagcagaaaccuacacuaacuuuguugguuaugucaccaccacguuuaagagaaagcacuuucgcccuaugccgggugcaugcagagccgcauacaacuggaagauggcuggugaccccagguaugaagagucucugcacaauccguacccugacuaccacuggcuccgaacugucaagaccaccaaggagucccuugucaucauaucuccgagcguugcagauuuggacccguacgauaagucccuucacucgagaguuuuuccuagcggaaaaugcucaggaauaaccguguccuccacuugcugcucuaccaaccacgauuacaccaucuggaugccugaaaacccuagacugggaacuucgugugacauuuucaccaauaguagagggaagagggcaucaaaagggggcaagacuuguggauuuguggaugaaagaggcuuguacaagucucuaaagggagcaugcaagcugaagcuaugugggguucuaggacuuagacuuauggacggaacaugggucgcaauucagacaucagacgagaucaaauggugcucuccugaucagcuaguaaaucuacacgacuuucacucggaugagauugaacaucuuguuguggaggaguuggucaaaaagagggaagagugucuggacgcacuggagacuauuaugaccacaaaguccgugaguuucagacgucuuagucauuugaggaagcuagucccuggguuuggaaaggcguauaccauauucaacaaaaccuugauggaggcugaugcucacuauaaaucaauccggacuuggaaugaaaucauccccucuaaaggguguuuaagaguuggggggagaugucauccucaugugaacgggguguuuuucaacggcauuauacuggguccugacggacauguucuaaucccagagaugcaaucgucccuccuccaccagcauauggaauuguuggaguccucagucaucccuuugaugcaucccuuagcagacccgucaacagucuuuaaagacggcgacgaggcagaggacuuuguugagguucaccuuccagaugugcacaagcagauuucggggguugaucuuggucucccaaacugggggaaguaugugcugauaaguguaggugcucugacugcauuaaugucgaugauuuucuuaaugacguguugcagaaagacuaauagagcagagucaauacaacacaguccuggagagacagggaggaaagugucgguaacuucucacaacggaagggucauaucuucaugggaaucauauaaaagcggaggugagaccaagcuguga

SEQ ID NO: 62882 - RNA, 1575 nt, Artificial Sequence
  derived and/or modified CDS sequence (wt) from glycoprotein__RABV__EU008925.1
augauuccucaagcucuuuuguuuguuccccuucuaguuuucucguuguguuuugggaaauuccccauuuacacgauaccagacaaacucgguccauggagucccaucgauauacaucaccucagcuguccgaacaaucugguuguggaagaugaaggauguaccaaucugucuggauuuuccuacauggaacucaaagugggauacauuucagccauaaaagugaacggauucaccuguacagguguggugacggaagcagaaaccuacacuaacuuuguugguuaugucaccaccacguuuaagagaaagcacuuucgcccaaugccgggugcaugcagagccgcauacaacuggaagauggcuggugaccccagguaugaagagucucugcacaauccguaccccgacuaccacuggcuccgaacugucaagaccaccaaggagucccuugucaucauaucuccgagcguugcagauuuagacccguacgauaagucccuucacucgagaguuuuuccuggcggaaaaugcucaggaauaaccguguccuccacuugcugcucuacuaaccacgacuacaccaucuggaugccugaaaacccuagacugggaacuucgugugacauuuucaccaauaguagagggaagagggcaucaaaagggggcaagacuuguggauuuguggaugaaagaggcuuguacaagucucuaaagggagcaugcaagcugaagcuaugugggguucuaggacuuagacuuauggacggaacaugggucgcgauucagacaucagaugagaucaaauggugcucuccugaucagcuaguaaaucuacacgacuuucacucggaugagauugaacaucuuguuguggaggaguuggucaaaaagagggaagagugucuggacgcacuggagacuauuaugaccaccaaguccgugaguuucagacgucuuagucauuugaggaagcuagucccuggguuuggaaaggcguauaccauauucaacaaaaccuugauggaggcugaugcucacuacaaaucaauccggacuuggaaugaaaucauccccucuaaaggguguuuaagaguuggggggagaugucauccucaugugaacgggguguucuucaacgguauuauacuggguccugacggacauguucuaaucccagagaugcaaucgucccuccuccaccagcauauggaauuguuggaguccucagucaucccuuugaugcaucccuuagcagacccgucaacagucuuuaaagacggcgacgaggcagaggacuuuguugagguucaccuuccagaugugcacaagcagauuucggggguugaucuuggucucccaaacugggggaaguaugugcugauaagugcaggugcuuugacugcauuaaugucgaugauuuucuuaaugacguguugcagaaagacuaauagagcagggucaauacaacacaguccuggagagacagggaggaaagugucgguaacuucucacaacggaagggucauaucuucaugggaaucauauaaaagcggaggugagaccaagcuguga

SEQ ID NO: 62883 - RNA, 1575 nt, Artificial Sequence
  derived and/or modified CDS sequence (wt) from glycoprotein__RABV__EU008926.1
augauuccucaagcucuuuuguuuguuccccuucuaguuuucucgucguguuuugggaaauuccccauuuacacgauaccagacaaacucgguccauggagucccaucgauauacaucaccucagcuguccgaauaauuugguuguggaagaugaaggauguaccaaucugucugguuuuuccuacauggaacucaaagugggauauauuucagccauaaaagugaacggauucaccuguacagguguggugacagaagcagaaaccuacacuaacuuuguugguuaugucaccaccacguuuaagagaaagcacuuucgcccaaugccgggugcaugcagagccgcauacaacuggaagauggcuggugaccccagguaugaagagucucugcacaauccguaccccgacuaccacuggcuccgaacugucaagaccaccaaggagucccuugucaucauaucuccgagcguggcagauuuggacccguacgauaaaucccuucacucgagaguuuuuccuggcggaaaaugcucaggaauaacaguguccuccacuugcugcucuacuaaccacgacuacaccaucuggaugccugaaaacccuagacugggaacuucuugugacauuuucaccaauaguagagggaaaagggcaucaaaagggggcaagacuuguggauuuguggaugaaagaggcuuguacaagucucuaaagggagcaugcaagcugaaacuaugugggguucuaggacuuagacuuauggacggaacaugggucgcgauucagacaucagaugagaucaaauggugcucuccugaucagcuagugaaucuacacgacuuucacucggaugagauugaacaucuuguuguggaggagcuggucaaaaagagggaagagugucuggacgcacuggagacuauuaugaccacaaaguccgugaguuucagacgucuuagucacuugaggaagcuagucccuggguuuggaaaggcguauaccauauucaacaaaaccuugauggaggcugaugcucacuacaaaucaauccggacuuggaaugaaaucauccccucuaaaggguguuuaagaguuggggggagaugucauccucaugugaacgggguguucuucaauggcauuauacuggguccugacggacauguucuaaucccagagaugcaaucgucccuccuccagcagcauauggaauuguuggaguccucagucaucccuuugaugcaucccuuagcagacccaucaacagucuuuaaagacggcgacgaggcagaggacuuuguugagguucaccuuccagaugugcacaagcagauuucggggguugaucuuggucucccaaacugggggaaguaugugcugaugagugcaggugcucugacugcauuaaugucgaugauuuucuuaaugacguguugcagaaagacuaauagagcagagucaauacaacacaguccuggagagacagggaggaaaguaucgguaacuucucacaacggaagggucauaucuucaugggagucauauaaaagcggaggugagaccaagcuguga

SEQ ID NO: 62884 - RNA, 1575 nt, Artificial Sequence
  derived and/or modified CDS sequence (wt) from glycoprotein__RABV__EU008927.1
augauuccucaagcucuuuuguuuguuccccuucuagucuucuugucguguuuugggaaauuccccauuuacacgauaccagacaaacucgguccauggagucccaucgauauacaucaccucagcuguccgaacaaucugguuguggaggaugaaggauguaccaaucugucuggauuuucauacauggaacuuaaagugggauauauuucagccauuaaagugaacggauucaccuguacagguguggugacagaagcagaaaccuacacuaacuuuguugguuaugucaccaccacguuuaagagaaagcacuuucgcccuaugccggaugcgugcagagccgcauauaacuggaagauggcuggugaccccagguaugaagagucucugcacaauccguacccugacuaccacuggcuccgaacugucaagaccaccaaggagucccuugucaucauaucuccgagcguugcagauuuggacccguacgauaaaucccuucacucgagaguuuuuccuggcggaaaaugcucaggaauaaccguguccucuacuugcugcucuacuaaccacgacuacaccaucuggaugccugaaaauccuagacugggaacuucgugugacauuuucaccaauaguagagggaaaagggcaucaaaagggagcaagacuuguggauuuguggaugaaagaggcuuguacaagucucuaaagggagcaugcaagcugaagcugugugggguucuaggacuuagacuuauggacggaacauggguugcaauucagacaucagaugagaucaaauggugcucuccugaucagcuaguaaaucuacacgacuuucacucggaugagauugaacaucuuguuguggaggagcuggucaaaaagagggaagagugucuggacgcacuggagacuauuaugaccaccaaguccgugaguuucagacgucuuagucauuugaggaagcuagucccuggguuuggaaaggcguauaccauauucaacaaaaccuugauggaggcugaugcucacuauaaaucaauccggacuuggaaugaaaucauccccucuaaaggguguuuaagaguuggggggagaugucauccucaugugaacgggguguucuucaacggcauuauacuggguccugacggacauguucuaaucccagagaugcaaucgucccuccuccaccagcauauggaguuguuggaguccucagucaucccuuugaugcaucccuuagcagacccgucaacagucuuuaaagacggcgacgaggcggaggacuuuguugagguucaccuuccagaugugcacaagcagauuucggggguugaucuuggucucccaaacugggggaaguaugugcugauaagugcaggugcucugacugcauugaugucgaugauuuucuuaaugacguguugcagaaagacuaauagagcagagucaauacaacacaguccuggagagacagggaggaaagugucgguaacuucucacaacgggagggucauaucuucaugggaaucauauaaaagcggaggugagaccaagcuguga

SEQ ID NO: 62885 - RNA, 1575 nt, Artificial Sequence
  derived and/or modified CDS sequence (wt) from glycoprotein__RABV__EU008928.1
augauuccucaaguucuuuuguuuguuccccuucuaguuuucucgucguguuuugggaaauuccccauuuauacgauaccagacaaacuugguccauggagucccaucgauauacaucaccucagcuguccgaacaaucugguuguggaggaugaaggauguaccaaucugucuggauuuuccuacauggaacucaaagugggauauauuucagccauaaaagugaauggauucaccuguacggguguggugacagaagcagaaaccuacacuaacuuugucgguuaugucaccaccacguuuaagagaaagcacuuccgcccuaugccggaugcgugcagagccgcauauaacuggaagauggcuggugaccccagguaugaggagucucuacacaauccguaccccgacuaccacuggcuccggacugucaagaccaccaaggagucccuuguuaucauaucuccgagcguugcagauuuggacccguacgauaaaucccuucacucgagaguuuuuccuagcggaaaaugcucaggaauaaccguguccuccacuugcugcucuacuaaccacgacuacaccaucuggaugccugaaaacccuagacuggggacuucgugugacauuuucaccaauagcagagggaagagggcaucaaaagggggcaagacuuguggguuuguggaugagagaggcuuguacaagucucuaaagggggcaugcaagcugaaacugugugggguucuaggacuuagacuuauggauggaacaugggucgcaauucagacgucagaugagaucaaauggugcccuccugaucagcuaguaaaucuacaugacuuucacucggaugagauugaacaucuuguuguggaggaguuggucaaaaagagagaagagugucuggacgcacuggagucuaucaugaccacaaaguccgugaguuucagacgccuuagucauuugaggaagcuagucccuggguuuggaaaggcguauaccauauucaacaaaacccugauggaggcugaugcucacuauaaaucaauccggacuuggaacgaaaucauccccucuaaaggguguuugagaguuggggggagaugucauccucaugugaaugggguguucuucaacggcauuauacuggguccugacggacauguucuaaucccggaaaugcaaucgucccuccuccaccagcacauggaauuguuggaguccucagucaucccuuugaugcaucccuuagcagacccgucaacagucuuuaaggacggcgacgaggcagaggacuuuguugagguucaccuuccggaugugcacaagcagaucucggggguugaucucggucucccaaacugggggaaguaugugcugauaagugcaggugcucugacugcguuaaugucgaugauuuucuuaaugacguguugcagaaagacuaguagagcagagucaacacaacacaguccuggagagacagggaggaaagugucgguaacuucucacaacggaagggucauaucuucaugggaaucauauaaaagcggaggugagaccaagcuguga

SEQ ID NO: 62886 - RNA, 1575 nt, Artificial Sequence
  derived and/or modified CDS sequence (wt) from glycoprotein__RABV__EU086128.1
augguuccucagguucuuuuguuuguaccccuucugguuuucucaauguguuucgggaaauuccccaucuauacaauaccagacaaacuuggucccuggagcccgaucgacauacaucaucucagcuguccaaacaaccugguuguggaagaugaaggaugcaccaaccugucugguuucuccuacauggaacuuaagguaggauacaucucggccauaaaaguaaacggauucacgugcacaggcguggugacagaggcagagacuuacacuaacuuugucgguuauguuaccaccacguucaaaagaaagcauuuccgcccaacaccagaugcguguagagcugcuuacaacuggaagauggccggugaccccagauaugaagaaucucugcacaauccguacccugacuaccacuggcuuagaaccgucaaaaccacaaaggagucccucgucaucauauccccaaguguagcggaccuggacccauacgacaaaucccuucauucgagggucuucccuagcgggaagugcuugggaauaacgauaucaucuacuuacugcucuacuaaccaugauuacacaaucuggaugcccgagaauccgagacuggggacaucuugugacaucuucaccaacaguagagggaagagagcauccaaagggagcaaaacuugcggauuuguugaugaaagaggcuuguauaaaucuuugaaaggggcaugcaaacucaaauuauguggaguucuuggccuuagacuuauggauggaacauggguugcgaugcaaacaucggacgagaccaagugguguccuccugaucagcugguaaaucuacacgacuuucgcucaaacgagauugaacaucuuguuguggaggaguuggucaagaaaagagaggagugucuggaugcacuagaguccaucaugacuaccaagucgguaaguuucagacgucucagccauuugagaaaacuugucccuggguucggaaaagcauacaccauauucaacaaaaccuugauggaagcagaugcucauuacaagucaguccgaaccuggaaugagaucaucccuuccaaaggguguuugagaguuggagggaggugucauccucacguaaaugggguguuuuuuaacgguauaauacugggcccugacggccauguccuaaucccagagaugcaaucaucccuccuucagcagcauauggauuuguuggaauccucagucaucccccugaugcacccuuuagcagacccgucuacaguuuucaaggacggugaugaagcagaggauuuuguugagguucaccuucccgacgugcacaaacaaauuucagguguugaccugggucuccccagcuggggaaaguauguuuuggugagugcaggggucuugguuguccugauguugacaauuuucauaaugacauguugcggaaggguccaucgacccaaaucuacacaacacagucucggagggaccgggaggaaggugucggucacuucccaaagcggaaaggucauaucuucaugggagucauauaagagagggggugagaccagacuguga

SEQ ID NO: 62887 - RNA, 1575 nt, Artificial Sequence
  derived and/or modified CDS sequence (wt) from glycoprotein__RABV__EU086129.1
augauuccucaggcccuuuuguuuguacccuuuuuggcuuucucguuguguuucgggaaauuccccaucuacacgauaccagacaaacuuggccccuggaguccuauugauauacaucaucucaguugcccuaacaauuuaguuguggaggaugaagggugcaccaaccuguccggauucuccuacauggaacucaaaguaggguacauuucagccauaaaagugaacggguucacuugcacggguguggugacagaagcagagaccuauacaaacuuuaucggcuacgucaccaccacguuuaggagaaagcacuuccgcccgacaccagaugccugcagagcagcguauaacuggaagauggcaggugaccccagauaugaggaaucucugcauaauccguaucccgacuaucacuggcuacggacuguaaagaccaccaaggagucucuuguuaucauauccccaagugugucggacuuagacccguacgauaaaucucuucauuccagaguuuuucccagcgguaaaugcucaggaauaacagugucuucuaccuauugucccacuaaccaugauuauaccaucuggaugccugaaaauccgagacuagggaccucuugugacauuuucaccaauagcagagggaagagagcauccaaagggagcaagaccuguggauuuguggacgaaagaggcuuguacaagucucuaaaaggggcaugcaaauugaagcuguguggaguucuuggacuuagacuuauggacggaacaugggcugcgauucaaacaucagaugaggccaaauggugcccuccugaucaguuagugaauauacaugauuuucgcucggaugagaucgaacaucuuguuguggaggaguugguaaagaaaagggaagagugucuagaugcacuggagucuauuaugaccaccaaguccguaaguuucagacgccucagucacuugaggaagcucguccccggguuuggaaaagcauauaccauauucaacaaaaccuugauggaggcugaugcucacuacaaaucaguccguacauggaaugagaucauccccucuaagggguguuuaagaguuggagggaggugucacccucaugugaacgggguguuuuucaaugguaucauccuggguccugauggacauguucuaaucccagagaugcagucgucucuccuucaacagcauauggaguuguuggaauccucggugaucccgcuaaugcaucccuuggcagauccuucaacgguuuuuaaagacggugaugaggcggaagauuuuguugagguucaccuuccggaugugcacaaacaggucucgggaguugaucucggucucccaagcugggggaaguaugugcugaugaguguaggcgcucugauuguacugauguugaugauuuucuuaacgacaugcugcagaaaagccaauggcgcagaaucaauacgacaccgucucggagagacgggaaggaaagugucagucacuucccaaaacgggagggucauaucuucuugggagucguauaaaagugggggugagaccaagcuguga

SEQ ID NO: 62888 - RNA, 1575 nt, Artificial Sequence
  derived and/or modified CDS sequence (wt) from glycoprotein__RABV__EU086130.1
augauuccucaggcucuuuuguuuguaccccuuuugguuuucucauugugcuacgggaaauuccccaucuacacgauaccagacaaacuuggcccuuggaguccuauugacauacaucaucucaguugcccuaacaauuuaguuguggaggaugaggggugcaccaaccugucaggauucuccuacauggaacucaaagugggguacauuucagccauaaaagugaacggguucacuugcacggguguggugacagaagcagagaccuacacaaacuuugucggcuacgucaccaccacauuuaagagaaagcacuuucgcccgacaccagaugccugcagagcagcauauaacuggaagauggcaggugaccccagauaugaggaaucucugcauaauccguaucccgauuaucacuggcuccggacuguaaagaccaccaaggagucucuuguuaucauaucuccgagugugucggacuuagacccguacgauaaaucucuucauuccagaguuuuucccagcgguaaaugcucaggaauaacaguaucuucuaccuauugucccacuaaccaugacuauacuaucuggaugccggaaaauccgagacuaggaaccucuugugacauuuucaccaauagcagagggaagagagcauccaaagggagcaagaccuguggauuuguggacgagagaggcuuguacaagucucuaaaaggggcaugcaaauuaaaacuauguggaguucuuggacuuagacuuauggacggaacaugggcugcgauucaaacaucugaugaggccaaauggugcccuccugaucaguuagugaauauacaugauuuucgcucggaugagauugaacaucuuguuguggaagaguuaguaaagaaaagggaagagugucuagaugcacuggagucuaucaugaccaccaagucuguaaguuucagacgccucagucacuugagaaagcucgucccuggguuuggaaaagcauauaccauauucaacaaaaccuugauggaggcugaugcucacuacaaaucaguccguacauggaaugagaucauccccucuaaaggauguuuaagaguuggggggagaugucacccccauguaaacgggguguuuuucaaugguaucauccuggguccugauggacauguucuaaucccagagaugcagucgucucuccuucaacagcauauggaguuguuggaauccucggugaucccgcuaaugcaucccuuggcagaucccucaacaguuuuuaaggacggugacgaggcggaagauuuugucgagguucaucuuccggauguccacaagcaggucucgggaguugaucucggucucccaagcugggggaaguaugugcugaugaguguaggcgcuaugauugcacugauguuggugauuuuccugacgacguguugcagaaaaguuaacggagcagaaacaauacaacaccgucucggagagacaggaaggaaagugucggucaccucccaaagcgggagggucaucucuuccugggagucguauaaaagcgggggugagaccaagcuguga

SEQ ID NO: 62889 - RNA, 1575 nt, Artificial Sequence
  derived and/or modified CDS sequence (wt) from glycoprotein__RABV__EU086131.1
augauuccucaggcucuuuuguuuguaccccuuuugguuuucucauugugcuuggggaaauuccccaucuacacgauaccagacaaacuuggcccuuggaguccuauugacauacaucaucucaguugcccuaacaauuuaguuguggaggaugaggggugcaccaaccugucaggauucuccuacauggaacucaaagugggguacauuucagccauaaaagugaacggguucacuugcacggguguggugacagaagcagagaccuacacaaacuuugucggcuacgucaccaccacauuuaagagaaagcacuuucgcccgacaccagaugccugcagagcagcauauaacuggaagauggcaggugaccccagauaugaggaaucucugcauaauccguaucccgauuaucacuggcuccggacuguaaagaccaccaaggagucucuuguuaucauaucuccgagugugucggacuuagacccguacgauaaaucucuucauuccagaguuuuucccggcgguaaaugcucaggaauaacaguaucuucuaccuauugucccacuaaccaugacuauacuaucuggaugccggaaaauccgagacuaggaaccucuugugacauuuucaccaauagcagagggaagagagcauccaaagggagcaagaccuguggauuuguggacgaaagaggcuuguacaagucucuaaaaggggcaugcaaauugaaacuauguggaguucuuggacucagacuuauggacggaacaugggcugcgauucaaacaucugaugaggccaaauggugcccuccugaucaguuagugaauauacaugauuuucgcucggaugagauugaacaucuuguuguggaagaguuaguaaagaaaagggaagagugucuagaugcacuggagucuaucaugaccaccaagucuguaaguuucagacgccucagucacuugagaaagcucgucccuggguuuggaaaagcauauaccauauucaacaaaaccuugauggaggcugaugcucacuauaaaucaguccguacauggaaugagaucauccccucuaaaggauguuuaagaguuggcgggagaugucacccccauguaaacgggguguuuuucaaugguaucauccuggguccugauggacauguucuaaucccagagaugcagucgucucuccuucaacagcauauggaguuguuggaauccucgguaaucccgcuaaugcaucccuuggcagaucccucaacaguuuuuaaagacggugacgaggcggaagauuuugucgagguucaccuuccggauguccacaagcaggucucgggaguugaucucggucucccaagcugggggaaguaugugcugaugaguguaggcgcuaugauugcacugauguugaugauuuuccugacgacguguugcagaaaagcuaacggagcagaaacaauacaacaccgucucggagagacaggaaggaaagugucggucaccucccaaagcgggagggucauaucuuccugggagucguauaagagcgggggugagaccaagcuguga

SEQ ID NO: 62890 - RNA, 1575 nt, Artificial Sequence
  derived and/or modified CDS sequence (wt) from glycoprotein__RABV__EU086132.1
augauuccucaggcucuuuuguuuguaccccuuuugguuuucucauugugcuucgggaaauuccccaucuacacgauaccagacaaacuuggcccuuggaguccuauugacauacaucaucucaguugcccuaacaauuuaguuguggaggaugaggggugcaccaaccugucaggauucuccuacauggaacucaaagugggguacauuucagccauaaaagugaacggguucacuugcacggguguggugacagaagcagagaccuacacaaacuuugucggcuacgucaccaccacauuuaagagaaagcacuuucgcccgacaccagaugccugcagagcagcauauaacuggaagauggcaggugaccccagauaugaggaaucucugcauaauccguaucccgauuaucacuggcuccggacuguaaagaccaccaaggagucucuuguuaucauaucuccgagugugucggacuuagacccguacgauaaaucucuucauuccagaguuuuucccagcgguaaauguucaggaauaacaguaucuucuaccuauugucccacuaaccaugacuauacuaucuggaugccggaaaauccgagacuaggaaccucuugugacauuuucaccaauagcagagggaagagagcauccaaagggagcaagaccuguggauuuguggacgaaagaggcuuguacaagucucuaaaaggggcaugcaaauugaaacuauguggaguucuuggacuuagacuuauggacggaacaugggcugcgauucaaacaucugaugaggccaaauggugcccuccugaucaguuagugaauauacaugauuuucgcucggaugagauugaacaucuuguuguggaagaguuaguaaagaaaagggaagagugucuagaugcacuggagucuaucaugaccaccaagucuguaaguuucagacgccucagucacuugagaaagcucgucccuggguuuggaaaagcauauaccauauucaacaaaaccuugauggaggcugaugcucacuacaaaucaguccguacauggaaugagaucauccccucuaaaggauguuuaagaguuggggggagaugucacccccauguaaacgggguguuuuucaaugguaucauccuggguccugauggacauguucuaaucccggagaugcagucgucucuccuucaacagcauauggaguuguuggaauccucgguaaucccgcuaaugcaucccuuggcagaucccucaacaguuuuuaaggacggugacgaggcggaagauuuugucgagguucaccuuccggauguccacaagcaggucucgggaguggaucucggucucccaagcugggggaaguaugugcuaaugaguguaggcgcuaugauugcacugauguugaugauucuccugacgacguguugcagaaaaguuaacggagcagaaacaauacaacaccgucucggagagacaggaagaaaagugucggucaccucccaaagcgggagggucauaucuuccugggagucguauaaaagcgggggugagaccaagcuguga

SEQ ID NO: 62891 - RNA, 1575 nt, Artificial Sequence
  derived and/or modified CDS sequence (wt) from glycoprotein__RABV__EU086133.1
augauuccucaggcucuuuuguuuguaccccuuuugguuuucucauugugcuucgggaaauuccccaucuacacgauaccagacaaacuuggcccuuggaguccuauugacauacaccaucucaguugcccuaacaauuuaguuguggaggaugaggggugcaccaaccugucaggguucuccuacauggaacucaaagugggguacauuucagccauaaaagugaacggguucacuuguacggguguggugacagaagcagagaccuacacaaacuuugucggcuacgucaccaccacauuuaagagaaagcacuuucgcccgacaccagaugccugcagagcagcauauaacuggaagauggcaggugaccccagauaugaggaaucucugcauaauccguaucccgauuaucacuggcuccggacuguaaagaccaccaaggagucucuuguuaucauaucuccgagugugucggacuuagacccguacgauaaaucucuucauuccagaguuuuucccagcgguaaaugcucaggaauaacaguaucuucuaccuauugucccacuaaccaugacuauacuaucuggaugccggaaaauccgagacuaggaaccucuugugacauuuucaccaauagcagagggaagagagcauccaaagggagcaagaccuguggauuuguggacgaaagaggcuuguacaagucucuaaaaggggcaugcaaauugaaacuauguggaguucuuggacuuagacuuauggacggaacaugggcugcgauucaaacaucugaugaggccaaauggugcccucccgaucaguuagugaauauacaugauuuucgcucggaugagauugaacaucuuguuguggaagaguuaguaaagaaaagggaagagugucuagaugcacuggagucuaucaugaccaccaagucuguaaguuucagacgccucagucacuugagaaagcucgucccuggguuuggaaaagcauauaccauauucaacaaaaccuugauggaggcugaugcucacuacaaaucaguccguacauggaaugagaucauccccucuaaaggauguuuaagaguuggggggagaugucacccccauguaaacgggguguuuuucaaugguaucauccugggcccugauggacauguucuaaucccagaaaugcagucgucucuccuucaacagcauauggaguuguuggaauccucgguaaucccgcuaaugcaucccuuggcagaucccucaacaguuuuuaaggacggugacgaggcggaagacuuugucgagguucaccuuccggauguccacaagcaggucucgggaguugaucucggucucccaagcugggggaaguaugugcugaugaguguaggugcuaugauugcacugauguugaugauuuuccugacgacguguugcagaaaaguuaacggagcagaaacaauacaacgccgucucggagagacaggaaggaaagugucggucaccucccaaagcgggagggucauaucuuccugggagucguauaaaagcgggggugagaccaagcuguga

SEQ ID NO: 62892 - RNA, 1575 nt, Artificial Sequence
  derived and/or modified CDS sequence (wt) from glycoprotein__RABV__EU086134.1
augauuccucaggcucuuuuguuuguaccccuuuugguuuucucauugugcuucgggaaauuccccaucuacacgauaccagacaaacuuggcccuuggaguccuauugacauacaucaucucaguugcccuaacaauuuaguuguggaggaugaggggugcaccaaccugucaggauucuccuacauggaacucaaagugggguacauuucagccauaaaagugaacggguucacuugcacggguguggugacagaagcagagaccuacacaaacuuugucggcuacgucaccaccacauuuaagagaaagcacuuucgcccgacaccagaugccugcagagcagcauauaacuggaagauggcaggugaccccagauaugaggaaucucugcauaauccguaucccgauuaucacuggcuccggacuguaaagaccaccaaggagucucuuguuaucauaucuccgagugugucggacuuagacccguacgauaaaucucuucauuccagaguuuuucccagcgguaaaugcucaggaauaacaguaucuucuaccuauugucccacuaaccaugacuauacuaucuggaugccggaaaauccgagacuaggaaccucuugugacauuuucaccaauagcagagggaagagagcauccaaagggagcaagaccuguggauuuguggacgaaagaggcuuguacaagucucuaaaaggggcaugcaaauugaaacuauguggaguucuuggacuuagacuuauggacggaacaugggcugcgauucaaacaucugaugaggccaaauggugcccuccugaucaguuagugaauauacaugauuuucgcucggaugagauugaacaucuuguuguggaagaguuaguaaagaaaagggaagagugucuagaugcacuggagucuaucaugaccaccaagucuguaaguuucagacgccucagucacuugagaaagcucgucccuggguuuggaaaagcauauaccauauucaacaaaaccuugauggaggcugaugcucacuacaaaucaguccguacauggaaugagaucauccccucuaaaggauguuuaagaguuggggggagaugucacccccauguaaacgggguguuuuucaaugguaucauccuggguccugauggacauguucuaaucccagaaaugcagucgucucuccuucaacagcauauggaguuguuggaauccucgguaaucccgcuaaugcaucccuuggcagaucccucaacaguuuuuaaggacggugacgaggcggaagacuuugucgagguucaccuuccggauguccacaagcaggucucgggaguugaucucggucucccaagcugggggaaguaugugcugaugaguguaggcgcuaugauugcacugauguugaugauuuuccugacgacguguugcagaaaaguuaacagagcagaaacaauacaacgccgucucggagagacaggaaggaaagugucggucaccucccaaaccgggagggucauaucuuccugggagucauauaaaagcgggggugagaccaagcuguga

SEQ ID NO: 62893 - RNA, 1575 nt, Artificial Sequence
  derived and/or modified CDS sequence (wt) from glycoprotein__RABV__EU086135.1
augauuccucaaguucuuuuguuuguuccccuucuaguuuucucgucguguuuugggaaauuccccauuuacacgauaccagacaaacuugguccauggagucccaucgauauacaucaccucagcuguccgaacaaucugguuguggaagaugaaggauccaccaaucugucuggauuucccuacauggaacucaaagugggauauauuucagccauaaaagugaacggauucaccuguacagguguggugaccgaagcagaacccuacacuaacuuuguugguuaugucaccaccacauuuaagagaaagcacuuucgcccuaugccggaugcgugcagagccgcauacaacuggaagauggcuggugaccccagguaugaggagucucugcacaauccguaccccgacuaccacuggcuccgaacugucaagaccaccaaggagucccuugucaucauaucuccgagcguugcagauuuggacccguacgauaaaucccuucacucgagaguuuuuccuggcggaaaaugcucaggaauaaccguguccuccacuugcugcucuacuaaccacgacuacaccaucuggaugccugaaaauccuagacugggaacuucaugugacauuuucaccaauaguagagggaagagggcaucaaaagggggcaagaccuguggauguguggaugagagaggcuuguacaagucucuaaagcgagcaugcaagcugaagcuaugugggguucuaggacuuagacuuauggacggaacaugggucgcaauucagacaucagaugagaucaaauggugcucuccugaucagcuaguaaaucuacacgacuuucacucggaugagauugaacaucuuguuguggaggaguuggucaaaaagagggaagagugucuggacgcacuggagacuauuaugaccacaaaguccgugaguuucagacgucuuagucauuugaggaagcuagucccuggguuuggaaaggcguauaccauauucaacaaaaccuugauggaggcugaugcucacuacaaaucaauccggacuuggaaugaaaucauccccuccaaaggguguuuaagaguuggggggagaugucauccucaugugaacgggguguucuucaacggcauuauacuggguccugacggacauguucuaaucccagagaugcagucgucccuccuccaccagcauauggaauuguuggaguccucagucaucccuuugaugcaucccuuagcagacccgucaacagucuuuaaagacggcgacgaggcagaggacuuuguugagguucaccuuccggaugugcacaagcagaucucggggguugaucuuggucucccaaacugggggaaguaugugcugauaagugcaggugcucugacugcauuaauguugacgauuuucuuaaugacguguugcagaaagacuaauagagcagagucaauacaacacaguccuggagagacagggaggaaagugucggugacuucucacaacggaagggucauaucuucaugggaaucauauaaaagcggaagugagaccaagcuguga

SEQ ID NO: 62894 - RNA, 1575 nt, Artificial Sequence
  derived and/or modified CDS sequence (wt) from glycoprotein__RABV__EU086136.1
augauuccucaaguucuuuuguuuguuccccuucuaguuuucucgucauguuucgggaaauuccccauuuacacgauaccagacaaacuugguccauggagucccaucgauauacaucaucucagcuguccgaacaaucuuguuguggaagaugaagggugcaccaaucugucuggauuuuccuacauggaacucaaagugggauauauuucagccauaaaagugaacggauucaccuguacagguguggugacagaagcagaaaccuacacgaacuuuguugguuaugucaccaccacguuuaagagaaagcacuuucgcccuaugccggaugcgugcagagccgcauacaacuggaagauggcuggugaccccagguaugaagagucucugcacaauccguacccugacuaccacuggcuccgaacugucaagaccaccaaggagucccuugucaucauaucuccgagcguugcagauuuggacccguacgauaaaucccuucacucgagaguuuuuccuggcggaaaaugcucaggaauaaccguguccuccacuugcugcucuacuaaccacgacuacaccaucuggaugccugaaaauccuagacugggaacuucgugugacauuuucaccaauaguagagggaagagggcaucaaaagggggcaagacuuguggauuuguggaugaaagaggcuuugucaagucucuaaagggagcaugcaagcugaagcuaugugggguucuaggacuuagacuuauggacggaacauggguugcaauucagacuucugaugagaucaaauggugcucuccugaucagcuaguaaaucuacacgacuuucacucggaugagauugaacaucuuguuguggaggaguuggucaaaaagagggaagagugucuggacgcacuggagacuuuuaugaccacaaaguccgugaguuucagacgucuuagucuuuugaggaagcuagucccuggguuuggaaaggcguuuaccauuuucaacaaaaccuugauggaggcugaugcucacuuuaaaucaauccuuacuuggaaugaaaucuuccccuauaaaugguguuuuagauugggggagauucuucauccucaugugaaccggguguucuucaacggcauuauacuggguccugacggacauguucuaaucccagagaugcaaucgucccuccuccaccagcauauggaauuguuggaguccucagucaucccguugaugcaucccuuagcagacccgucaacagucuuuaaagacggcgacgaggcagaggacuuuguugauguucaccuuccggaugugcacaagcagaucucggggguugaucuuggucucccaaacugggggaaguaugugcugauaagugcaggugcucugacugcauuaauguugaugauuuucuuaaugacguguugcagaaaggcuaauagagcagagucaauacaacacaauccuggagagacagggaggaaagugucgguaacuucucacaacggaagggucauaucuucaugggaaucauauaaaagcggaggugagaccaagcuguga

SEQ ID NO: 62895 - RNA, 1575 nt, Artificial Sequence
  derived and/or modified CDS sequence (wt) from glycoprotein__RABV__EU086137.1
augauuccucaaguucuuuuguuuguuccccuucuaguuuucucgucauguuucgggaaauuccccauuuacacgauaccagacaaacuugguccauggagucccaucgauauacaucaucucagcuguccgaacaaucuuguuguggaagaugaagggugcaccaaucugucuggauuuuccuacauggaacucaaagugggauauauuucagccauaaaagugaacggauucaccuguacagguguggugacagaagcagaaaccuacacgaacuuuguugguuaugucaccaccacguuuaagagaaagcacuuucgcccuaugccggaugcgugcagagccgcauacaacuggaagauggcuggugaccccagguaugaagagucucugcacaauccguacccugacuaccacuggcuccgaacugucaagaccaccaaggagucccuugucaucauaucuccgagcguugcagauuuggacccguacgauaaaucccuucacucgagaguuuuuccuggcggaaaaugcucaggaauaaccguguccuccacuugcugcucuacuaaccacgacuacaccaucuggaugccugaaaauccuagacugggaacuucgugugacauuuucaccaauaguagagggaagagggcaucaaaagggggcaagacuuguggauuuguggaugaaagaggcuuguacaagucucuaaagggagcaugcaagcugaagcuaugugggguucuaggacuuagacuuauggacggaacauggguugcaauucagacaucugaugagaucaaauggugcucuccugaucagcuaguaaaucuacacgacuuucacucggaugagauugaacaucuuuuuguggaggaguuggucaaaaagagggaagagugucuggacgcacuggagacuauuaugaccacaaaguccgugaguuucaaacgucuuagccauuugacgaaucuagucccuggguuuggaaaggcguauaccauauucaacaaaaccuugauggaggcugaugcucacuauaaaucaaucccgacuuggaaugaaaucauccccucuaaaggguguuuaaaguuuggggggagaugucauccuccugugaacgggguguucuucaacggcauuauacuggguccugacggacauguucuaaucccagagaugcaaucgucccuccuccaccagcauauggaauuguuggaguccucagucaucccguugaugcaucccuuagcagacccgucaacagucuuuaaagacggcgacgaggcagaggacuuuguugauguucaccuuccggaugugcacaagcagaucucggggguugaucuuggucucccaaacugggggaaguaugugcugauaagugcaggugcucugacugcauuaauguugaugauuuucuuaaugacguguugcagaaaggcuaauagagcagagucaauacaacacaauccuggagagacagggaggaaagugucgguaacuucucacaacggaagggucauaucuucaugggaaucauauaaaagcggaggugagaccaagcuguga

SEQ ID NO: 62896 - RNA, 1575 nt, Artificial Sequence
  derived and/or modified CDS sequence (wt) from glycoprotein__RABV__EU086138.1
augauuccucaaguucuuuuguuuguuccccuucuaguuuucucgucguguuuugggaaauuccccauuuacacgauaccagacaaacuugguccauggagucccaucgauauacaucaucucagcuguccgaacaaucugguuguggaagaugaaggaugcaccaaucugucuggauuuuccuacauggaacucaaagugggauauauuucagccauaaaagugaacggauucaccuguacagguguggugaccgaagcagaaaccuacacuaacuuuguugguuaugucaccaccacguuuaagagaaagcacuuucgcccuaugccggaugcgugcagagccgcauacaacuggaagauggcuggugaccccagguaugaagagucucugcacaauccguaccccgacuaccacuggcuccgaacugucaagaccaccaaggagucccuugucaucauaucuccgagcguugcagauuuggacccguacgauaaaucccuucacucgagaguuuuuccuggcggaaaaugcucaggaauaaccguguccuccacuuggugcucuacuaaccacgacuacaccaucuggaugccugaaaauccuagacugggaacuucgugugacauuuucaccaauaguagagggaagagggcaucaaaagggggcaagacuuguggauuuguggaugaaagaggcuuguacaagucucuaaagggagcaugcaagcugaagcuaugugggguucuaggacuuagacuuauggacggaacaugggucgcaauucagacaucagaugagaucaaauggugcucuccugaucagcuaguaaaucuacacgacuuucacucggaugagauugaacaucuuguuguggaggaguuggucaaaaagagggaagagugucuggacgcacuggagacuauuaugaccaccaaguccgugaguuucagacgccuuagucauuugaggaagcuagucccuggguuuggaaaggcguauaccauauucaacaaaaccuugauggaggcugaugcucacuacaaaucaauccguacuuggaaugaaaucauccccuccaaaggguguuuaagaguuggggggagaugucauccccuugugaacgggguguccuucaacggcauuauacuggguccugacggacauguucuaaucccagagaugcagucgucccuccuccaccagcauauggaauuguuggaguccucagucaucccuuugaugcaucccuuagcagacccgucaacagucuuuaaagacggcgacgaggcagaggacuuuguugagguucaccuuccggaugugcacaagcagaucucggggguugaucuuggucucccaaacugggggaaguaugugcugauaagugcaggugcucugacugcauuaauguugacgauuuucuuaaugauguguugcagaaagacuaauagagcagagucaauacaacacaguccuggagagauagggaggaaagugucggugacuucucacaacggaagggucauaucuucaugggaaucauauaaaagcggaagugagaccaagcuguga

SEQ ID NO: 62897 - RNA, 1575 nt, Artificial Sequence
  derived and/or modified CDS sequence (wt) from glycoprotein__RABV__EU086139.1
augauuccucaaguucuuuuguuuguuccccuucuaguuuucucgucguguuuugggaaauuccccauuuacacgauaccagacaaacuugguccauggagucccaucgauauacaucaucucagcuguccgaacaaucugguuguggaagaugaaggaugcaccaaucugucuggauuuuccuacauggaacucaaagugggauauauuucagccauaaaagugaacggauucaccuguacagguguggugaccgaagcagaaaccuacacuaacuuuguugguuaugucaccaccacguuuaagagaaagcacuuucgcccuaugccggaugcgugcagagccgcauacaacuggaagauggcuggugaccccagguaugaagagucucugcacaauccguaccccgacuaccacuggcuccgaacugucaagaccaccaaggagucccuugucaucauaucuccgagcguugcagauuuggacccguacgauaacucccuucacucgagaguuuuuccuggcggaaaaugcucaggaauaaccguguccuccacuugcugcucuacuaaccacgacuacaccaucuggaugccugaaaauccuagacugggaacuucgugugacauuuucaccaauaguagagggaagagggcaucaaaagggggcaagacuuguggauuuguggaugaaagaggcuuguacaagucucuaaagggagcaugcaagcugaagcuaugugggguucuaggacuuagacuuauggacggaacaugggucgcaauucagacaucagaugagaucaaauggugcucuccugaucagcuaguaaaucuacacgacuuucacucggaugagauugaacaucuuguuguggaggaguuggucaaaaagagggaagagugucuggacgcacuggagacuauuaugaccacaaaguccgugaguuucagacgucuuagucauuugaggaagcuagucccuggguuuggaaaggcguauaccauauucaacaaaaccuugauggaggcugaugcucacuacaaaucaauccggacuuggaaugaaaucauccccuccaaaggguguuuaagaguuggggggagaugucauccucaugugaacgggguguucuucaacggcauuauacuggguccugacggacauguucuaaucccagagaugcagucgucccuccuccaccagcauauggaauuguuggaguccucagucaucccuuugaugcaucccuuagcagacccgucaacagucuuuaaagacggcgacgaggcagaggacuuuguugagguucaccuuccggaugugcacaagcagaucucggggguugaucuuggucucccaaacugggggaaguaugugcugauaagugcaggugcucugacugcauuaauguugacgauuuucuuaaugacguguugcagaaagacuaauagagcagagucaauacaacacaguccuggagagauagggaggaaagugucggugacuucucacaacggaagggucauaucuucaugggaaucauauaaaagcggaagugagaccaagcuguga

SEQ ID NO: 62898 - RNA, 1575 nt, Artificial Sequence
  derived and/or modified CDS sequence (wt) from glycoprotein__RABV__EU086140.1
augauuccucaaguucuuuuguuugucccccuucuaguuuucucgucguguuuugggaaauuccccauuuacacgauaccagacaaacuugguccauggagucccaucgauauacaucaucucagcuguccgaacaaucugguuguggaagaugaaggaugcaccaaucugucuggauuuuccuacauggaacucaaagugggauauauuucagccauaaaaguaaacggauucaccuguacagguguggugacagaagcagaaaccuacacuaacuuuguugguuaugucaccaccacguuuaagagaaagcacuuucgcccuaugccggaugcgugcagagccgcauacaacuggaagauggcuggugaccccagguaugaagagucucugcacaauccguacccugacuaccacuggcuccggacugucaagaccuccaaggagucccuugucaucauaucuccgagcguugcagauuuggacccguacgauaaaucccuucacucgagaguuuuuccuggcggaaaaugcucaggaauaaccguguccuccacuugcugcucuacuaaccacgacuacaccaucuggaugccugaaaauccuagacugggaacuucgugugacauuuucaccaauaguagagggaagagggcaucaaaagggggcaagacuuguggauuuguggaugaaagaggcuuguacaagucucuaaagggagcaugcaaguugaagcuaugugggguucuaggacuuagacuuauggacggaacaugggucgcaauucagacaucagaugagaucaaauggugcucuccugaucagcuagugaaucuacacgacuuucacucggaugagauugaacaucucguuguggaggaguuggucaagaagagggaagagugucuggacgcucuggagacuauuaugaccacaacguccgugaguuucaggcgucuuagucauuugaggaagcucgucccuggguuuggcagggcguuuuccaucuucaacaaaaccuugguggaggcugaugcucucuuccaaucauuccggacuuggaaugaaaucauccccucuaaaggguguuuaagaguuggggggagaugucauccucaugugaacgggguguucuucaacggcauuauacuggguccugacggacauguucuaaucccagagaugcaaucgucccuccuccaccagcauauggaauuguuggaguccucagucaucccuuugaugcaucccuuagcagacccgucaacagucuuuaaagacggcgacgaggcagaggacuuuguugagguucaccuuccggaugugcacaagcagaucucggggguugaucuuggucucccaaacugggggaaguaugugcugauaagugcaggugcucugacugcauuaauguugaugauuuucuuaaugacguguugcagaaagacuaauagagcagagucaauacaacacaguccuggagagacagggaggaaagugucgguaacuucucacaacggaagggucauaucuucaugggaaucauauaaaagcggaggugagaccaagcuguga

SEQ ID NO: 62899 - RNA, 1575 nt, Artificial Sequence
  derived and/or modified CDS sequence (wt) from glycoprotein__RABV__EU086141.1
augauuccucaaguucuuuuguuuguuccccuucuaguuuucucgucgugucuugggaaauuccccauuuacacgauaccagacaaacuugguccauggagucccaucgauauacaucaucucagcuguccgaacaaucugguuguggaagaugaaggaugcaccaaucugucuggauuuuccuacauggaacucaaagugggauauauuucagccauaaaagugaacggauucaccuguacagguguggugacagaagcagaaaccuacacuaacuuuguugguuaugucaccaccacguuuaagagaaagcacuuucgcccuaugcuggaugcgugcagagccgcauacaacuggaagauggcuggugaccccagguaugaagagucucugcacaauccguacccugacuaccacuggcuccggacugucaagaccuccaaggagucccuugucaucauaucuccgagcguugcagauuuggacccguacgauaaaucccuucacucgagaguuuuuccuggcggaaaaugcucaggaauaaccguguccuccacuugcugcucuacuaaccacgacuacaccaucuggaugccugaaaauccuagacugggaacuucgugugacauuuucaccaauaguagagggaagagggcaucaaaagggggcaagacuuguggauuuguggaugaaagaggcuuguacaagucucuaaagggagcaugcaaguugaagcuaugugggguucuaggacuuagacuuauggacggaacaugggucgcaauucagacaucagaugagaucaaauggugcucuccugaucagcuaguaaaucuacacgacuuucacucggaugagauugaacaucucguuguggaggaguuggucaaaaagagggaagagugucuggacgcacuggagacuauuaugaccacaaaguccgugaguuucaggcgucuuagucauuugaggaagcuagucccuggguuuggaaaggcguauaccauauucaacaaaaccuugauggaggcugaugcucacuauaaaucaauccggacuuggaaugaaaucauccccucuaaaggguguuuaagaguuggggggagaugucauccucaugugaacgagguguucuucaacggcauuauacuggguccugacggacauguucuaaucccagagaugcaaucgucccuccuccaccagcauauggaauuguuggaguccucagucaucccuuugaugcaucccuuaacagacccgucaacagucuuuaaagacggcgacgaggcagaggacuuuguugagguucaccuuccggaugugcacaagcagaucucggggggugaucuuggucucccaaacuggggaaaguaugugcugauaagugcaggugcucugacugcaucaauguugaugauuuucuuaaugacguguugcagaaagacuaauagagcagagucaauacaacacaguccuggagagacgggggaagaagugucggguacuucucaaacgggaagggucauaucuucaugggaaucauauaaaagcggaggugagaccaagcuguga

SEQ ID NO: 62900 - RNA, 1575 nt, Artificial Sequence
  derived and/or modified CDS sequence (wt) from glycoprotein__RABV__EU086142.1
augauuccucaaguucuuuuguuuguuccccuucuaguuuucucgucgugucuugggaaauuccccauuuacacgauaccagacaaacuugguccauggagucccaucgauauacaucaucucagcuguccgaacaaucugguuguggaagaugaaggaugcaccaaucugucuggauuuuccuacauggaacucaaagugggauauauuucagccauaaaagugaacggauucaccuguacagguguggugacagaagcagaaaccuacacuaacuuuguugguuaugucaccaccacguuuaagagaaagcacuuucgcccuaugcuggaugcgugcagagccgcauacaacuggaagauggcuggugaccccagguaugaagagucucugcacaauccguacccugacuaccacugguuccggacugucaagaccuccaaggagucccuugucaucauaucuccgagcguugcagauuuggacccguacgauaaaucccuucacucgagaguuuuuccuggcggaaaaugcucaggaauaaccguguccuccacuugcugcucuacuaaccacgacuacaccaucuggaugccugaaaauccuagacugggaacuucgugugacauuuucaccaauaguagagggaagagggcaucaaaagggggcaagacuuguggauuuguggaugaaagaggcuuguacaagucucuaaagggagcaugcaaguugaagcuaugugggguucuaggacuuagacuuauggacggaacaugggucgcaauucagacaucagaugagaucaaauggugcucuccugaucagcuaguaaaucuacacgacuuucacucggaugagauugaacaucucguuguggaggaguuggucaaaaagagggaagagugucuggacgcacuggagacuauuaugaccacaaaguccgugaguuucaggcgucuuagucauuugaggaagcuagucccuggguuuggaaaggcguauaccauauucaacaaaaccuugauggaggcugaugcucacuauaaaucaauccggacuuggaaugaaaucauccccucuaaaggguguuuaagaguuggggggagaugucauccucaugugaacgggguguucuucaacggcauuauacuggguccugacggacauguucuaaucccagagaugcaaucgugccuccuccaccagcauauggaauuguuggaguccucauucaucccuuugaugcuucccuuagcagacccgucaacagucuuuaaagacggcgacgaggcagaggacuuuguugagguucaccuuccggaugugcacaagcagaucucggggggugaucuuggucucccaaacugggggaaguaugugcugauaagugcaggugcucugacugcauccauguugaugauuuucuuaaugacguguugcagaaagacuaauagagcagagucaauacaacacaguccuggagagacggggagaaaagugucgguaacuucucacaacggaagggucauaucuucaugggaaucauauaaaagcggaggugagaccaagcuguga

SEQ ID NO: 62901 - RNA, 1575 nt, Artificial Sequence
  derived and/or modified CDS sequence (wt) from glycoprotein__RABV__EU086143.1
augauuccucaaguucuuuuguuuguuccccuucuaguuuucucgucguguuuugggaaauuccccauuuacacgauaccagacaaacuugguccauggagucccaucgauauacaucaucucagcuguccgaacaaucugguuguggaagaugaaggaugcaccaaucugucuggauuuuccuacauggaacucaaagugggauauauuucagccauaaaaguaaacggauucaccuguacagguguggugacagaagcagaaaccuacaccaacuuugucgguuaugucaccaccacguuuaagagaaagcacuuucgcccuaugccggaugcgugcagagccgcauacaacuggaagauggcuggugaccccagguaugaagagucucugcacaauccguacccugacuaccacuggcuccggacugucaagaccuccaaggagucccuugucaucauaucuccgagcguugcagauuuggacccguacgauaaaucccuucacucgagaguuuuuccuggcggaaaaugcucaggaauaaccguguccuccacuugcugcucuacuaaccacgacuacaccaucuggaugccugaaaauccuagacugggaacuucgugugauauuuucaccaauaguagagggaagagggcaucaaaagggggcaagacuuguggauuuguggaugaaagaggcuuguacaagucucuaaagggagcaugcaaguugaagcuaugugggguucuaggacuuagacuuauggacggaacaugggucgcaauucagacaucagaugagaucaaauggugcucuccugaucagcuaguaaaucuacacgacuuucacucggaugagauugaacaucucguuguggaggaguuggucaaaaagagggaagagugucuggacgcacuggagacuauuaugaccacaaaguccgugaguuucaggcgucuuagucauuugaggaagcuagucccuggguuuggaaaggcguauaccaucuucaacaaaaccuugauggaggcugaugcucacuauaaaucaauccggacuuggaaugaaaucauccccucuaaaggguguuuaagaguuggggggagaugucauccucaugugaacgggguguucuucaacggcauuauacuggguccugacggacauguucuaaucccagagaugcaaucgucccuccuccaccagcauauggaauuguuggaguccucagucaucccuuugaugcaucccuuagcagacccgucaacagucuuuaaagacggcgacgaggcagaggacuuuguugagguucaccuuccggaugugcacaagcagaucucggggguugaucuuggucucccaaacugggggaaguaugugcugauaagugcaggugcucugacugcauuaauguugaugauuuucuuaaugacguguugcagaagacuuaauagagcagagucaauacaacacaguccuggagagacagggaggaaagugucgguaacuucucacagcggaagggucauaucuucaugggaaucauauaaaagcggaggugagaccaagcuguga

SEQ ID NO: 62902 - RNA, 1575 nt, Artificial Sequence
  derived and/or modified CDS sequence (wt) from glycoprotein__RABV__EU086144.1
augguuccucaagcccuucuguuuguaccccuucuggccauuccauuguguuuugggaaauuccccauuuacacgauaccagacaaacucggucccuggagucccauugauauacaucaccucagcuguccgaauaauuugguuguggaggaugaaggauguaccaaucugucaggauucucauacauggaacuuaaaguaggauacauuucagccauaaaggugaacggguucacuuguacggguguggugacggaagcagaaaccuacacuaacuuuguuggcuaugucaccaccacguuuaagagaaagcacuuucgaccaacaccggaugcaugcagauccgcauacaauuggaagauggcuggugaccccagauacgaagagucucugcacaaucccuauccugauuaucauuggcuccggacuguaaaaaccaccaaagaguccuuuguuaucauaucuccaaguguggcagaucuagauccguacgauaaaucccuucauucgagaguuuuuccuagaggaaaaugcucaggaauaacggugucuucuaccuacugcuccacuaaccaugacuacaccaucuggaugccugaaaaucccagacuggggaccucuugugauauuuucaccaauagcagagggaagagagcauccaaagggagcaagaccuguggauuuguagaugagagaggcuuguacaaaucucuaaaaggagcaugcaaacugaagcugugugggguucuuggacuuagacuuauggauggaacaugggucgcgauucagacaucagacgagaccaaguggugcccuccugaccagcuagugaaucuacaugacuuucauucggaugagauugaacaucuuguuguggaggaguuggucaagaaaagggaagagugccuagaugcacuggaguccaucaugaccaccaaguccgugaguuuccgacgucucagucacuugaggaaacuugugccuggguucggaaaagcauacaccauauucaauaaaaccuugauggaggcugaugcucacuacaaaucgguccggacuuggaacgagaucauccccucuaaaggguguuugagaguugggggcagaugucauccccaugugaacgggguguuuuuuaaugguauuauccuaggcccugacggccaugucuuaaucccggaaaugcagucaucucuccuucagcagcauauggaguuguuggaauccucggucauccccuuaaugcauccuuuggcagauccaucaacgguuuuuaaagauggugacgaggcggaggauuuuguugagguucaccuuccggaugugcauaagcaggucucaggggucgaucucggucucccaagcugggggaaguauguguugaugagcgcaggcauuuugacugcacugauguugaugauuuucuuaaugacguguugccgaaggacuaauagagcagagucaauacaacacagucuuggagagacaggaaggaaagugucgguaaccucccaaagcgggagggucauaucuucaugggagucauacaaaagcggaggugagaccaagcuguga

SEQ ID NO: 62903 - RNA, 1575 nt, Artificial Sequence
  derived and/or modified CDS sequence (wt) from glycoprotein__RABV__EU086145.1
augauuccccaagcucuucuguuugugccccuccuagucuucucguuguguuucgggaaauuccccaucuauacgauacccgacaaacucgguccauggagucccauugacauacaucaucucagcuguccaaacaauuugguuguggaggaugaaggaugcaccaaucugucuggauuuuccuacauggaacucaaaguaggauacaucucagccauuaaagugaauggauucaccuguacagguguggugacggaagcagagaccuacacuaacuuugucgguuacgucaccaccacguuuaagagaaagcacuuccgcccaacgccagaugcgugcagagccgcauacaacuggaagauggcuggugaccccagguaugaggagucucuacacaauccguacccugacuaccauuggcuucggacuguaaagaccaccaaggagucccuuguuaucauaucuccaaguguggcagauuuagacccguacgauaaaucccuucacucgagaguuuuuccuagcggaaaaugcucaggaauaacaguguccucuaccuacugcucuacuaaccacgacuacaccaucuggaugccugagaaucccagacuggggacuuccugugacauuuucgucaauagcagagggaagagagcaucaaaagggagcaagacuuguggguuuguggaugagagaggccuguacaagucucuaaaaggggcaugcaaacuaaaacuaugugggguucuugggcuuagacuuauggauggaacaugggucgcaauucagacgucagaugagaccaaauggugcccuccugaucaacuagugaaucuacaugacuuucgcucggaugagauugaacaucuuguuguggaggaguuggucaagaaaagggaagagugucuggaugcacuggaguccaucaugaccacaaaguccgugaguuuuagacgccuuagucacuugaggaagcuugucccuggguuuggaaaggcguauacuauauucaacaaaaccuugauggaagcugaugcucacuacaaaucaguccggacuuggaacgaaaucauccccucuaaagggugcuuaagaguuggggggagaugucauccucaugugaaugggguguucuucaaugguaucauacuggguccugacggacauguccugauuccagagaugcaaucaucccuccuccagcagcauauggaguuguuggaguccucagucaucccauugaugcaucccuuggcagacccaucaacgauuuuuaaggacggguacgaggcggaggacuuuguugagguucaccucccagacgugcacaagcaggucucgggggucgaucucggucucccaaacugggggaaguaugugcuaaugagcgcaggcgcucuaacugcauugauguugaugauuuucuuaaugacguguugcaggaagacugauagaacaggaucaacacaccacaguccuggagagacggggaggaaagugucuguaacuucccaaaacgggagggucauagcuucaugggagucauacaaaagcggaggugaaaccaagcuguga

SEQ ID NO: 62904 - RNA, 1575 nt, Artificial Sequence
  derived and/or modified CDS sequence (wt) from glycoprotein__RABV__EU086146.1
augauuccucaaguucuuuuguuuguuccccuucuaguuuucucgucguguuuugggaaauuccccauuuacacgauaccagacaaacuugguccauggagucccaucgauauacaucaucucagcuguccgaacaaucugguuguggaagaugaaggaugcaccaaucugucuggauuuuccuacauggaacucaaagugggauauauuucagccauaaaagugaacggauucaccuguacagguguggugacagaagcagaaaccuacacuaacuuuguugguuaugucaccaccacguuuaagagaaagcacuuucgcccuaugccggaugcgugcagagccgcauacaacuggaagauggcuggugaucccagguaugaagagucuuugcacaauccguaccccgacuaccacuggcuccgaacugucaagaccaccaaggagucccuugucaucauaucuccgagcguugcagauuuggacccguacgauaaaucccuucacucgagaguuuuuccuggcggaaaaugcucaggaauaaccguguccuccacuugcugcucuacuaaccacgacuacaccaucuggaugccugaaaacccuagacugggaacuucgugugacauuuucaccaauaguagagggaaaagggcaucaaaagggggcaagacuuguggauuuguggaugaaagaggcuuguacaagucucuaaagggagcaugcaagcugaagcuaugugggguucuaggacuuagacuuauggacggaacaugggucgcaauucagacaucagaugagaucaaauggugcucuccugaucagcuaguaaaucuacacgacuuucacucggaugagauugaacaucuuguuguggaggaguuggucaaaaagagggaagagugucuggacgcacuggagacuauuaugaccacaaaguccgugaguuucagacgucuuagucauuugaggaagcuagucccuggguuuggaaaggcguauaccauauucaacaaaaccuugauggaggcugaugcucacuacaaaucaauccggacuuggaaugaaaucauccccuccaaaggguguuuaagaguuggggggagaugucauccucaugugaacgggguguucuucaacggcauuauacuggguccugacggacauguucuaaucccagagaugcagucgucccuccuccaccagcauauggaauuguuggaguccucagucaucccuuugaugcaucccuuagcagacccgucaacagucuuuaaagauggcgacgaggcagaggacuuuguugagguucaccuuccggaugugcacaagcagaucucggggguugaucuuggucucccaaacugggggaaguaugugcugauaagugcaggugcucugacugcauuaauguugaugauuuucuuaaugacguguugcagaaagacuaauagagcagagucaauacaacacaguccuggagagacagggaggaaagugucgguaacuucucauaacggaagggucauaucuucaugggaaucauauaaaagcggaggugagaccaagcuguga

SEQ ID NO: 62905 - RNA, 1575 nt, Artificial Sequence
  derived and/or modified CDS sequence (wt) from glycoprotein__RABV__EU086147.1
augauuccucaaguucucuuguuuguuccccuucuaguuuucucgucguguuuugggaaauuccccauuuacacgauaccagacaaacuugguccauggagucccaucgauauacaucaucucagcuguccgaacaaucugguuguggaagaugaaggaugcaccaaucugucuggauuuuccuacauggaacucaaagugggauauauuucagccauaaaagugaacggauucaccuguacagguguggugaccgaagcagaaaccuacacuaacuuuguugguuaugucaccaccacguuuaagagaaagcacuuucgcccuaugccggaugcgugcagagccgcauacaacuggaagauggcuggugaucccagguaugaagagucuuugcacaauccguaccccgacuaccacuggcuccgaacugucaagaccaccaaggagucccuugucaucauaucuccgagcguugcagauuuggacccguacgauaaaucccuucacucgagaguuuuuccugguggaaaaugcucaggaauaaccguguccuccacuugcugcucuacuaaccacgacuacaccaucuggaugccugaaaauccuagacugggaacuucgugugacauuuucaccaauaguagagggaagagggcaucaaaagggggcaagacuuguggauuuguggaugaaagaggcuuguacaagucucuaaagggagcaugcaagcugaagcuaugugggguucuaggacuuagacuuauggacggaacaugggucgcaauucagacaucagaugagaucaaauggugcucuccugaucagcuaguaaaucuacacgacuuucacucggaugagauugaacaucuuguuguggaggaguuagucaaaaagagggaagagugucuggacgcacuggagacuauuaugaccacaaaguccgugaguuucagacgucuuagucauuugaggaagcuagucccuggguuuggaaaggcguauaccauauucaacaaaaccuugauggaggcugaugcucacuacaaaucaauccggacuuggaaugaaaucauccccuccaaaggguguuuaagaguuggggggagaugucauccucaugugaacgggguguucuucaacggcauuauacuggguccugacggacauguucuaaucccagagaugcagucgucccuccuccaccagcauauggaauuguuggaguccucagucaucccuuugaugcaucccuuagcagacccgucaacagucuuuaaagacggcgacgaggcagaggacuuuguugagguucaccuuccggaugugcacaagcagaucucggggguugaucuuggucucccaaacugggggaaguaugugcugauaagugcaggugcucugacugcauuaauguugacgauuuucuuaaugacguguugcagaaagacuaauagagcagagucaauacaacacaguccuggagagacagggaggaaagugucggugacuucucacaacggaagggucauaucuucaugggaaucauauaaaagcggaagugagacuaagcuguga

SEQ ID NO: 62906 - RNA, 1575 nt, Artificial Sequence
  derived and/or modified CDS sequence (wt) from glycoprotein__RABV__EU086148.1
augauuccucaaguucucuuguuuguuccccuucuaguuuucucgucguguuuugggaaauuccccauuuacacgauaccagacaaacuugguccauggagucccaucgauauacaucaucucagcuguccgaacaaucugguuguggaagaugaaggaugcaccaaucugucuggauuuuccuacauggaacucaaagugggauauauuucagccauaaaagugaacggauucaccuguacagguguggugaccgaagcagaaaccuacacuaacuuuguugguuaugucaccaccacguuuaagagaaagcacuuucgcccuaugccggaugcgugcagagccgcauacaacuggaagauggcuggugaucccagguaugaagagucuuugcacaauccguaccccgacuaccacuggcuccgaacugucaagaccaccaaggagucccuugucaucauaucuccgagcguugcagauuuggacccguacgauaagucccuucacucgagaguuuuuccuggcggaaaaugcucaggaauaaccguguccucuacuugcugcucuacuaaccacgacuacaccaucuggaugccugaaaacccuagacugggaacuucgugugacauuuucaccaauaguagagggaaaagggcaucaaaagggggcaagacuuguggauuuguggaugaaagaggcuuguacaagucucuaaagggagcaugcaagcugaagcuaugugggguucuaggacuuagacuuauggacggaacaugggucgcaauucagacgucagaugagaucaaauggugcucuccugaucagcuaguaaaucuacacgacuuucacucggaugagauugaacaucuuguuguggaggaguuggucaaaaagagagaagagugucuggacgcacuggagacuauuaugaccacaaaguccgugaguuucagacgucuuagucauuugaggaagcuagucccuggguuuggaaaggcguauaccauauucaacaaaaccuugauggaggcugaugcucacuauaaaucaauccggacuuggaaugaaaucauccccucuaaaggguguuuaagaguuggggggagaugucauccucaugugaacgggguguucuucaacggcauuauacuggguccugacggacauguucuaaucccagagaugcaaucgugccuccuccaccagcauauggaauuguuggaguccucagucaucccuuugaugcaucccuuagcagacccgucaacagucuuuaaagacggcgacgaggcagaggacuuuguugagguucaccuuccggaugugcacaagcaaauuucggggguugaucuuggucucccaaacugggggaaguaugugcugauaagugcaggugcucugacugcauugaugucgaugauuuucuuaaugacguguugcagaaagacuaauagagcagagucaauacaacacaguccuggagagacagggaggaaagugucgguaacuucucacaacggaagggucauaucuucaugggaaucauauaaaagcggaggugagaccaagcuguga

SEQ ID NO: 62907 - RNA, 1575 nt, Artificial Sequence
  derived and/or modified CDS sequence (wt) from glycoprotein__RABV__EU086149.1
augauuccucaaguucuuuuguuuguuccccuucuaguuucuucgucguguuuugggaaauuccccauuuacacgauaccagacaaacuugguccauggagucccaucgauauacaucaucucagcuguccgaacaaucugguuguggaagaugaaggaugcaccaaucugucuggauuuuccuacauggaacucaaagugggauauauuucagccauaaaagugaacggauucaccuguacagguguggugacagaagcagaaaccuacacuaacuuuguugguuaugucacaaccacguuuaagagaaagcacuuucgcccuaugccggaugcgugcagagccgcauacaacuggaagauggcuggugaccccagguaugaagagucucugcacaauccguacccugacuaccacuggcuccgaacugucaagaccaccaaggagucccuugucaucauaucuccgagcguugcagauuuggacccguacgauaagucccuucacucgagaguuuuuccuggcggaaaaugcucaggaauaaccguguccucuacuugcugcucuacuaaccacgacuacaccaucuggaugccugaaaacccuagacugggaacuucgugugacauuuucaccaauaguagagggaaaagggcaucaaaagggggcaagacuuguggauuuguggaugaaagaggcuuguacaagucucuaaagggagcaugcaagcugaagcuaugugggguucuaggacuuagacuuauggacggaacaugggucgcaauucagacgucagaugagaucaaauggugcucuccugaucagcuaguaaaucuacacgacuuucacucggaugagauugaacaucuuguuguggaggaguuggucaaaaagagagaagagugucuggacgcacuggagacuauuaugaccacaaaguccgugaguuucagacgucuuagucauuugaggaagcuagucccuggguuuggaaaggcguauaccauauucaacaaaaccuugauggaggcugaugcucacuauaaaucaauccggacuuggaaugaaaucauccccucuaaaggguguuuaagaguuggggggagaugucauccucaugugaacgggguguucuucaacggcauuauacuggguccugacggacauguucuaaucccagagaugcaaucgucccuccuccaccagcauauggaauuguuggaguccucagucaucccuuugaugcaucccuuagcagacccgucaacagucuuuaaagacggcgacgaggcagaggacuuuguugagguucaccuuccggaugugcacaagcagaucucggggguugaucuuggucucccaaacugggggaaguaugugcugauaagugcaggugcucugacugcauugaugucgaugauuuucuuaaugacguguugcagaaagacuaauagagcagagucaauacaacacaguccuggagagacagggaggaaagugucgguaacuucucacaacggaagggucauaucuucaugggaaucauauaaaagcggaggugagaccaagcuguga

SEQ ID NO: 62908 - RNA, 1575 nt, Artificial Sequence
  derived and/or modified CDS sequence (wt) from glycoprotein__RABV__EU086150.1
augauucuucaaguucuuuuguuugucccccuucaaguuuucucgucguguuuuggggaauuccccauuuacacgauaccagacaaacuugguccauggagucccaucgauauacaucaucucagcuguccgaacaaucugguugugaaagaugaaggaugcaccaaucugucuggauuuuccuacauggaacucaaagugggauauauuucagccauaaaagugaacggauucaccuguacagguguggugacagaagcagaaaccuacacuaacuuuguugguuaugucaccaccacguuuaagagaaagcacuuucgcccuaugccggaugcgugcagagccgcauacaacuggaagauggcuggugaccccagguaugaagagucucugcacaauccguacccugacuaccacuggcuccgaacugucaagaccaccaaggagucccuugucaucauaucuccgagcguugcagauuuggacccguacgauaaaucccuucacucgagaguuuuuccuggcggaaaaugcucaggaauaaccguguccuccacuugcugcucgaccaaccacgacuacaccaucuggaugccugaaaauccuagacugggaacuucgugugacauuuuuaccaauaguagagggaagagggcaucaaaagggggcaagacuuguggauuuguggaugaaagaggcuuguacaagucucuaaagggagcaugcaagcugaagcuauguggaguucuaggacuuagacuuauggacggaacaugggucgcaauucagacaucagaugagaucaaauggugcccuccugaucagcuaguaaaucuacacgacuuucacucggaugagauugagcaucuuguuguagaggaguuggucaaaaagagggaagagugucuggacgcacuggagacuauuaugacaacaaaauccgugaguuucagacgucucagucauuugaggaagcuagucccuggguuuggaaaggcguauaccauauucaacaaaaccuugauggaggcugaugcucacuauaaaucaauccggacuuggaaugaaaucauccccucuaaaggguguuuaagaguuggggggagaugucauccucaugugaacgggguguucuucaacggcauuauacuggguccugacggacauguucuaaucccagagaugcaaucgucccuccuccaccagcauauggaauuguuggaguccucagucaucccuuugaugcaucccuuagcagacccgucaacaguuuuuaaagacggcgacgaggcagaggacuuuguugagguucaccuuccggaugugcacaagcagaucucggggguugaucuuggucucccaaacugggggaaguacgugcugguaagugcaggugcucugacugcauuaauguugaugauuuucuuaaugacguguugcagaaagacuaauagagcagagucaauacaacacaguccuggagagacagggaggaaagugucgguaacuucucacaacggaagggucauaucuucaugggaaucauauaaaaguggaggugagaccaagcuguga

SEQ ID NO: 62909 - RNA, 1575 nt, Artificial Sequence
  derived and/or modified CDS sequence (wt) from glycoprotein__RABV__EU086151.1
augauuccucaagcucuuuuguuuguaccccuucuaguuuucucguuguguuucgggaaauuccccauuuacacgauaccagacaaacuugguccauggagucccauugauauacaucaucucagcuguccgaauaaucugguuguggaagaugaaggaugcaccaaucugucuggauuuucuuacauggaacucaaaguaggauacauuucagccauaaaagugaacggauuuaccuguacagguguagugacagaagcagaaaccuacaccaacuuuguugguuaugucaccaccacguuuaagagaaagcacuuccgcccgacgccagaugcaugcagagccgcauauaacuggaagauggcuggugaccccagguaugaagagucucugcacaauccauacccagacuaucauuggcuccgaacuguaaagaccaccaaggagucccuugucaucauaucuccaagcgucgcagauuuggacccguacgauaaaucccuucacucgagagucuuuccuaacggaaaaugcucaggaauaacagugucauccaccuacugcucuacuaaccacgacuacaccaucuggaugccugaaaacccuagacuggggacuucgugugacauuuucaccaauagcagagggaagagggcauccaaggggagcaaaacuuguggauuuguagaugaaagaggcuuguacaagucucuaaaaggggcaugcaagcugaagcuaugugggguucuuggacuuagacuuauggauggaacauggguugcacuucagacgucagaugagaccaaauggugcucuccugaucagcuagugaaucuacacgacuuucacucggaugagauugagcaucuuguaguggaggaguuggugaagaagagggaagagugucuagacgcacuggaguccauuaugaccacaaaauccgugaguuucagacgucuuagucacuugaggaagcuagucccuggguuuggaaaggcguauaccauauucaacaaaaccuugauggaggcugaugcucacuacaaaucaauccggacuuggaaugagaucaucccuucuaaagggugucuaagaguuggggggaaaugucauccucauguaaacgggguguucuucaauggcaucauacuggguccugacggacauguuuuaaucccagagaugcaaucuucccuccuccaucagcauauggaguuguuggaguccucagucauccccuugaugcaucccuuagcagacccaucaacggucuuuaaagacggugacgaggcggaggacuuuguugagguccaccuuccggaugugcacaagcagaucucggggguugaucucggucucccaaauugggggaaguacgugcugaugagugcaggcgcucugacugugcugauguugacgaucuucuuagugacguguugcagaaaaacuaauagagcagaaucaauacaacacaguucuggagagacggggaggaaagugucgguaacuucucaaaacggaagagucauaucuucaugggaaucauauaagagcggaggugagaccaagcuguga

SEQ ID NO: 62910 - RNA, 1575 nt, Artificial Sequence
  derived and/or modified CDS sequence (wt) from glycoprotein__RABV__EU086152.1
augauuccucaggcucuuuuguuuguaccccuuuugguuuucucguugugcuucgggaaguuccccaucuacacgauaccagacaaacuugguccuuggagucccaucgauauacaucaucucaguugcccuaacaauuuaguuguggaggaugaagggugcaccaaccugucaggauucuccuacauggaacucaaaguaggguacauuuccgccauaaaagugaacggauucacuugcacggguguggugacagaagcagagaccuacacaaacuuugucggcuacgucaccaccacguuuaagagaaagcacuuucgcccgacacccgaugccugcagagcagcauauaacuggaagauggcaggugaccccagauaugaggaaucucugcauaauccguaucccgauuaucacuggcuccggacuguaaagaccaccaaggagucucuugucaucauaucuccaagugugucggacuuagacccguaugauaaaucucuucauuccagagucuuucccagcgguaaaugcucaggaauaacagugucuucuaccuauugucccacuaaccaugacuauaccaucuggaugccggaaaauccgagacuagggaccucuugugacauuuucaccaauagcagagggaagagagcauccaaagggagcaagaccuguggauuuguggacgaaagaggcuuguacaagucucuaaaaggggcaugcaaauugaaguuauguggaguucuuggacuuagacuuauggacggaacaugggcugcgauucaaacaucugaugaggccaaauggugcccuccugaucaguuagugaauauacaugauuuucgcucggaugagauugaacaucuuguuguggaagaguuaguaaagaaaagggaagagugucuagaugcacuggagucuaucaugaccaccaaguccguaaguuucagacgccucagucacuugaggaagcuuguccccggguuuggaaaggcauauaccauauucaacaaaaccuugauggaggcugaugcucacuacaaaucaguccguacauggaaugagaucauccccucuaaagggugcuuaagaguuggggggagaugucacccccaugugaacgggguguuuuucaaugguaucauucuggguccugauggacauguuuuaaucccagagaugcagucgucucuccuucaacagcauauggaguuguuggaauccucgguaaucccgcuaaugcaucccuuggcagaucccucaacaguuuuuaaggacggugacgaggcggaagauuuugucgagguucaccuuccggauguccacaagcaggucucgggaguugaucucggucucccaagcugggggaaguaugugcugaugaguguaggcgcuaugauugcacugauguugaugauuuucuugaugacguguugcagaaaaucuaauggagcagaaucaauacaacaccgucucggagagacaggaaggaaagugucagucaccucucaaagcgggagggucauaucuuccugggagucguauaaaagugggggugagacuaagcuguga

SEQ ID NO: 62911 - RNA, 1575 nt, Artificial Sequence
  derived and/or modified CDS sequence (wt) from glycoprotein__RABV__EU086153.1
augguuccucagguucuuugguuuguaccccuucugguuuucucaauguguuucggaaaguucccuaucuacacgauaccagacaaacuuggucccuggagcccgauugacauacaucaucucagcuguccaaacaaccugguuguagaagaugaaggauguaccaacuugucggguuucuccuacauggaacuuaaggugggauacauuucagccauaaaaguaaauggguucacgugcacagguguggugacagaggcagagacuuacacuaacuuuguugguuauguuaccaccacguucaaaagaaagcauuuccgcccaacaccagaugcaugucgagcugcuuacaacuggaagauggccggugaccccagauaugaagaaucucugcacaauccguacccugacuaccacuggcuucgaaccgucaaaaccacaaaggagucccucgucaucauauccccaaguguagcggaccuggacccauaugacaaaucccuucacucgagggucuuuccuagcgggaagugcucggggauaacaauaucaucuaccuacugcucuacuaaccaugauuacacaaucuggaugcccgagaauccgagacuggggacaucuugugacaucuuuaccaacaguagagggaagagagcauccaaagggagcaaaacuugcggauuuguugaugaaagaggcuuguauaagucuuugaaaggggcaugcaagcucaaguugugugggguucuuggccuuagacuuauggauggaacaugggucgcgaugcaaacaucggacgagaccaaguggugucccccugaucaguugguaaaucuacaugacuuucgcucggacgagaucgaacaucucguuguagaggaguuggucaagaaaagagaggagugucuggaugcacuagagucuaucaugaccaccaagucggugaguuucagacgucucagccacuugagaaaacuugucccuggguucggaaaagcauacaccauauucaacaaaacccugauggaagcagaugcucauuacaagucagucagaaccuggaaugagaucauccccuccaagggguguuugagaguuggagggaggugucauccucacgugaacgggguguuuuucaacgguauaauacuggguccugauggccauguucucaucccagagaugcaaucaucccuccuucagcagcauauggaguuguuggaauccucaguuaucccucugaugcacccuuuagcagacccgucuacaguuuucaaggacggcgaugaagcagaggauuuugucgagguucaccuucccgauguacacaaacaaaucucagguguugaccugggucucccuaacuggggaaaguauguuuuggugagugcaggggucuugguuguccugauguuggcaauuuucauaaugacauguugcggaagaguaaaucgacccaagucuacacaacacagucucgaagguacagggaggaaggugucggucacuucccagagcgggaaggucauaucuucaugggagucauauaagagcgggggugagaccagacuguga

SEQ ID NO: 62912 - RNA, 1575 nt, Artificial Sequence
  derived and/or modified CDS sequence (wt) from glycoprotein__RABV__EU086154.1
augguuccucagguucuuugguuuguaccccuucugguuuucucaauguguuucggaaaguucccuaucuacacgauaccagacaaacuuggucccuggagcccgauugacauacaucaucucagcuguccaaacaaccugguuguagaagaugaaggauguaccaacuugucggguuucuccuacauggaacuuaaggugggauacauuucagccauaaaaguaaauggguucacgugcacagguguggugacagaggcagagacuuacacuaacuuuguugguuauguuaccaccacguucaaaagaaagcauuuccgcccaacaccagaugcaugucgagcugcuuacaacuggaagauggccggugaccccagauaugaagaaucucugcacaauccguacccugacuaccacuggcuucgaaccgucaaaaccacaaaggagucccucgucaucauauccccaaguguagcggaccuggacccauaugacaaaucccuucacucgagggucuuuccuagcgggaagugcucggggauaacaauaucaucuaccuacugcucuacuaaccaugauuacacaaucuggaugcccgagaauccgagacuggggacaucuugugacaucuuuaccaacaguagagggaagagagcauccaaagggagcaaaacuugcggauuuguugaugaaagaggcuuguauaagucuuugaaaggggcaugcaagcucaaguugugugggguucuuggccuuagacuuauggauggaacaugggucgcgaugcaaacaucggacgagaccaaguggugucccccugaucaguugguaaaucuacaugacuuucgcucggacgagaucgaacaucucguuguagaggaguuggucaagaaaagagaggagugucuggaugcacuagagucuaucaugaccaccaagucggugaguuucagacgucucagccacuugagaaaacuugucccuggguucggaaaagcauacaccauauucaacaaaacccugauggaagcagaugcucauuacaagucagucagaaccuggaaugagaucauccccuccaagggguguuugagaguuggagggaggugucauccucacgugaacgggguguuuuucaacgguauaauacuggguccugauggccauguucucaucccagagaugcaaucaucccuccuucagcagcauauggaguuguuggaauccucaguuaucccucugaugcacccuuuaucagacccgucuacaguuuucaaggacggcgaugaagcagaggauuuugucgagguucaccuucccgauguacacaaacaaaucucagguguugaccugggucucccuaacuggggaaaguauguuuuggugagugcaggggucuugguuguccugauguuggcaauuuucauaaugacauguugcggaagaguaaaucgacccaagucuacacaacacagucucgaagguacagggaggaaggugucggucacuucccagagcgggaaggucauaucuucaugggagucauauaagagcgggggugagaccagacuguga

SEQ ID NO: 62913 - RNA, 1575 nt, Artificial Sequence
  derived and/or modified CDS sequence (wt) from glycoprotein__RABV__EU086155.1
augauuccucaggcucuuuuguuuguacccauucuggucuuuucauuguguuucggaaaauuucccaucuacacgauaccggacaaacuuggucccuggagccccauugauauacaucaucucagcuguccgaacaauuugguuguggaggaugaaggauguaccaaccugucagguuucucguacauggaacucaagguaggauacauuucagccaucaaagugaacggguucacuuguacggguguagugacagaagcagagaccuacaccaacuuuguuggcuaugucacuaccacguuuaagagaaagcacuuccgcccaacgccggaugcaugcagagccgcauauaacuggaagauggcuggugaccccagauaugaagaaucucugcauaauccuuacccugauuaucauuggcuccgaacugugaagaccaccaaagaaucucuuguuaucauaucuccaaguguggcagauuuggacccauacgauaaaucccuucacucgagaguuuuuccuagcggaaaaugcucaggcauaacgguguccucuaccuacugcuccacuaaccacgauuauaccaucuggaugccugaaaauccuagacuagggaccucuugugacauuuucaccaauagcagagggaagagagcauccaaagggagcaagaccuguggauuuguagaugagagaggccuguacaagucucugaaaggagcaugcaaacugaaacuaugugggguucugggacucagacuuauggauggaacaugggccgcgauccagacaucagaugagaccaaauggugcccuccugaucaguuagugaaccuacaugacuuucgcucggaugaaauugaacaucuuguuguggaggaguuggucaagaaaagggaagagugucuagaugcacuggaguccaucaugaccaccaagucugugaguuucagacgucucagucacuugaggaaacuugugcccggguuuggaaaagcauauaccauauucaauaagaccuugauggaggcugaugcucacuacaaaucaguccggacuuggaacgagaucauccccucuaaaggguguuuaagagucggggggagaugucacccucaugugaacgggguguucuucaaugguaucaucuuaggcccugauggccaugugcuaaucccggagaugcagucgucucuccuccagcagcauauggaguuguuggaauccucagucauccccuuaaugcaucccuuggcagauccaucaacaguuuuuaaagaugaugacgaggcggaagauuuuguugagguucaccuuccagaugugcacaagcaggucucaggggucgaucucggucucccaagcugggggaaguauguguugaugagcgcaggcgucuugaccgcacucauguugaugauuuucuuaaugacgugcuguagaagggccaauagaguagaaucagcacaacacagucuuggagagagggggaggaaagugucgguaaccucccaaagcgggcggguuauauccucaugggagucauacaaaaguggaggugagaccaagcuguga

SEQ ID NO: 62914 - RNA, 1575 nt, Artificial Sequence
  derived and/or modified CDS sequence (wt) from glycoprotein__RABV__EU086156.1
auggucccucagguucucuuguuugugccccuucuaguguucucacuguguuucgggaaguuccccaucuacacgauaccagacaagcuuggucccuggaguccuauugacauacaucaucucagcuguccaaacaauuugguuguagaggaugaaggaugcaccaaucugucaggauucuccuacauggaacuuaaagugggauacaucucagccauaaaagugaauggcuuuacuuguacaggcgugguuacagaggcagagacuuacacuaacuucguugguuaugucacuaccacguuuaagagaaagcacuuccgcccaacgccugaugcgugcagagccgcauacaacuggaaacuggccggcgaccccagauaugaagagucccuacacaauccauacccugauuaccauuggcuucggacugugaaaacuaccaaggagucucucgucauaauauccccgaguguggcagaucuagaucccuaugacaaaucccuucacucgagaguuuuuuccggcggaaagugcuccgggauaacaguaucuuccacuuacugcucuacuaaccaugauuacaccaucuggaugccugaaaauccgagacuagggacaucuugugacaucuucgucaacagcagggggaagagggcgucuaaggggggcaagaccuguggguuuguagaugagagaggcuuguauaagucgcuaaaaggagcuugcaaacucaaauuguguggggugcccggacugagacuuauggauggaacgugggcugcgauucaaacgucggaugagaccaaauggugccccccugaucaguuaguaaaucuacaugauuuucgcucagaugaaaucgaacaucuagucguggaagaacuggucaagaaaagagaggagugcuuagaugcacuggaauccaucaugacuaccaagucaguaagcuucagacgucucagucacuugaggaaacuugucccuggguuuggaaaagcauauaccauauucaacaaaaccuugauggaggccgaugcucacuaugagucggucaggacuuggaacgagaucauccccucaaaagggugucuaagaguuggggggagaugucauccucaugugaaugggguguucuuuaaugguauaauauuaggcccggacggccauguucugaucccggaaaugcaaucgucccuccuccaacaacacauggagcuguuggaauccucggucaucccccuaaugcauccauuggcagacccaucaacaguuuuaaaagauggggaugaggcggaagauuuuguugagguucaccuuccggaugugcacaaacugaucucgggaguugaccuuggucuucccagcugggggaaguauguguugaugagugcagguguuuuaacagcacugauguugaugauuuucuugaugacguguugcaggagggguaaucaagcagggucaaaacaacauggucuugaagggacagggaggaaagugucugucacuucccagaauggaaaagucauauccucaugggagucauauaaaagcggaggugagaccaggcuguga

SEQ ID NO: 62915 - RNA, 1575 nt, Artificial Sequence
  derived and/or modified CDS sequence (wt) from glycoprotein__RABV__EU086157.1
augauuccucaggcucuuuuguuuguaccccuuuugguuuucucauugugcuucgggaaauuccccaucuacacgauaccagacaaacuuggcccuuggaguccuauugacauacaucaucucaguugcccuaacaauuuaguuguggaggaugaggggugcaccaaccugucaggauucuccuacauggaacucaaagugggguacauuucagccauaaaagugaacggguucacuugcacggguguggugacagaagcagagaccuacacaaacuuugucggcuacgucaccaccacauuuaagaggaagcacuuccgcccgacaccagaugccugcagagcagcauauaacuggaagauggcaggugaccccagauaugaggaaucucugcauaauccguaucccgauuaucacuggcuccggacuguaaagaccaccaaggagucucuuguuaucauaucuccaagugugucggacuuagacccguacgauaaaucucuucauuccagaguuuuucccagcgguaaaugcucaggaauaacaguaucuucuaccuauugucccacuaaccaugacuauacuaucuggaugccagaaaauccgagacuagggaccucuugugacauuuucaccaauagcagagggaagagagcauccaaagggagcaagaacuguggauuuguggacgaaaggggcuuguacaggucucuaaaaggggcaugcaaauugaaacuauguggaguucuuggacuuagacuuauggacggaacaugggcugcgauucaaacaucugaugaggccaaauggugcccuccugaucaguuagugaauauacaugauuuucgcucggaugagauugaacaucuuguuguggaagaguuaguaaagaaaagggaagagugucuagaugcacuggagucuaucaugaccaccaaguccguaaguuucagacgccucagucacuugaggaagcucgucccuggguuugggaaagcauauaccauauucaacaaaaccuugauggaggcugaugcucauuacaaaucaguccguacauggaaugagaucauccccucuaaaggauguuuaagaguuggggggagaugucacccccaugugaacgggguguuuuucaaugguaucauccuggguccugauggacauguucuaaucccagagaugcagucgucucuccuucaacagcauauggaguuguuggaauccucgguaaucccgcuaaugcaucccuuggcagaucccucaacaguuuuuaaggacggugacgaggcggaagauuuuguugagguucaccuuccggauguccacaagcaggucucgggcguugaucucggccucccaagcugggggaaguaugugcugaugaguguaggcgcucugauugcacugauguugaugauuuucuugaugacguguugcagaaaagcuaauggaguagaaucaaugcaacaccgucucggagagacgggaaggaaagugucugucaccucccaaagcgggagggucauaucuuccugggagucauauaaaagcgggggugagacuaagcuguga

SEQ ID NO: 62916 - RNA, 1575 nt, Artificial Sequence
  derived and/or modified CDS sequence (wt) from glycoprotein__RABV__EU086158.1
augauuccucaggcucuuuuguuuguaccccuuuugguuuucucauugugcuucgggaaauuccccaucuacacgauaccagacaaacuuggcccuuggaguccuauugacauacaucaucucaguugcccuaacaauuuaguuguggaggaugaggggugcaccaaccugucaggauuuuccuacauggaacucaaagugggguacauuucagccauaaaagugaacggguucacuugcacggguguggugacagaagcagagaccuacacaaacuuugucggcuacgucaccaccacauuuaagaggaagcacuuccgcccgacaccagaugccugcagagcagcauauaacuggaagauggcgggugaccccagauaugaggaaucucugcauaauccguaucccgauuaucacuggcuccggacuguaaagaccaccaaggagucucuuguuaucauaucuccgagugugucggacuuagacccguacgauaaaucucuucauuccagaguuuuucccagcgguaaaugcucaggaauaacaguaucuucuaccuauugucccacuaaccaugacuauacuaucuggaugccagaaaauccgagacuagggaccucuugugacauuuucaccaauagcagagggaagagagcauccaaagggagcaagaccuguggauuuguggacgaaaggggcuuguacaggucucuaaaaggggcaugcaaauugaaacuauguggaguucuuggacuuagacuuauggacggaacaugggcugcgauucaaacaucugaugaggccaaauggugcccuccugaucaguuggugaauauacaugauuuucgcucggaugagauugaacaucuuguuguggaagaguuaguaaagaaaagggaagagugucuagaugcacuggagucuaucaugaccaccaaguccguaaguuucagacgccucagucacuugaggaagcucguccccggguuugggaaagcauauaccauauucaacaaaaccuugauggaggcugaugcucauuacaaaucaguccguacauggaaugagaucauccccucuaaaggauguuuaagaguuggggggagaugucacccccauguaaacgggguguuuuucaaugguaucauccuggguccugauggacauguucuaaucccagagaugcagucgucucuccuucgacagcauauggaguuguuggaauccucgguaaucccgcuaaugcaucccuuggcagaucccucaacaguuuuuaaggacggugacgaggcggaagauuuugucgagguucaccuuccggauguccacaaucaaaucucgggaguugaucucggucucccaagcugggggaaguaugugcugaugagugugggagcuaugauugcacugauguuggugauuuuccugacgacguguugcagaaaagcuaacggagcagaaacaauacaacaccgucuuggagagacgggaaggaaagugucggucaccucccaaagcgggagggucaugucuucaugggagucguauaaaagcgggggugagaccaagcuguga

SEQ ID NO: 62917 - RNA, 1575 nt, Artificial Sequence
  derived and/or modified CDS sequence (wt) from glycoprotein__RABV__EU086159.1
augauuccucaggcucuuuuguuuguaccccuuuugguuuucucauugugcuucgggaaauuccccaucuacacgauaccagacaaacuuggcccuuggaguccuauugacauacaccaucucaguugcccgaacaauuuaguuguggaggaugaggggugcaccaaccugucaggguucuccuacauggaacucaaagugggguacauuucagccauaaaagugaacggguucacuuguacggguguggugacagaagcagagaccuacacaaacuuugucggcuacgucaccaccacauuuaagagaaagcacuuucgcccgacaccagaugccugcagagcagcauauaacuggaagauggcaggugaccccagauaugaggaaucucugcauaauccguaucccgauuaucacuggcuccggacuguaaagaccaccaaggagucucuuguuaucauaucuccgagugugucggacuuagacccguacgauaaaucucuucauuccagaguuuuucccagcgguaaaugcucaggaauaacaguaucuucuaccuauugucccacuaaccaugacuauacuaucuggaugccggaaaauccgagacuaggaaccucuugugacauuuucaccaauagcagagggaagagagcauccaaagggagcaagaccuguggauuuguggacgaaagaggcuuguacaagucucuaaaaggagcaugcaaacugaaacuauguggaguucuuggacuuagacuuauggacggaacaugggcugcgauucaaacaucugaugaggccaaauggugcccuccugaucaguuagugaauauacaugauuuucgcucggaugagauugaacaucuuguuguggaagaguuaguaaagaaaagggaagagugucuagaugcacuggagucuaucaugaccaccaagucuguaaguuucagacgccucagucacuugaggaagcucguuccuggguuugggaaagcauauaccauauucaacaaaaccuugauggaggcugaugcucacuacaaaucaguccguacauggaaugagaucauccccucuaaaggauguuuaagaguuggggggagaugucacccccauguaaacgggguguuuuucaaugguaucauccuggguccugauggacauguucuaaucccagagaugcagucgucucuccuucaacagcauauggaguuguuggaauccucgguaaucccgcuaaugcuucccuuggcagaucccucaacaguuuuuaaggacggugacgaggcggaagauuuugucgagguucaccuuccggauguccacaagcaggucucgggaguugaucuaggucucccaagcugggggaaguaugugcugaugaguguaggcgcuaugauugcacugauguugaugauuuuccugacgacguguugcagaaaagcuaacggagcaagaacuaugcaacacgccucgggagagacaggaaggaaagugucggucaccuucccaagcgggagggucauaucuucaugggagucguauaaaagcgggggugagaccaagcuguga

SEQ ID NO: 62918 - RNA, 1575 nt, Artificial Sequence
  derived and/or modified CDS sequence (wt) from glycoprotein__RABV__EU086160.1
augauuccucaggcucuuuuguuuguaccccuuuugguuuucucauugugcuucgggaaauuccccaucuacacgauaccagacaaacuuggcccuuggaguccuauugacauacaccaucucaguugcccgaacaauuuaguuguggaggaugaggggugcaccaaccugucaggguucuccuacauggaacucaaagugggguacauuucagccauaaaagugaacggguucacuugcacggguguggugacagaagcagagaccuacacaaacuuugucggcuacgucaccaccacauuuaagagaaagcacuuucgcccgacaccagaugccugcagagcagcauauaacuggaagauggcaggugaccccagauaugaggaaucucugcauaauccguaucccgauuaucacuggcuccggaccguaaagaccaccaaggagucucuuguuaucauaucuccgagugugucggacuuagacccguacgauaaaucucuucauuccagaguuuuucccagcgguaaaugcucaggaauaacaguaucuucuaccuauugucccacuaaccaugacuauacuaucuggaugccggaaaauccgagacuaggaacuucuugugacauuuucaccaauaguagagggaagagagcauccaaggggagcaagaccuguggauuuguggacgaaagaggcuuguacaagucucuaaaaggggcaugcaaauugaaacuauguggaguucuuggacuuagacuuauggacggaacaugggcugcgauucaaacaucugaugaggccaaauggugcccuccugaucaguuagugaauauacaugauuuucgcucggaugagauugaacaucuuguuguggaagaguuaguaaagaaaagggaagagugucuagaugcacuggagucuaucaugaccaccaagucuguaaguuucagacgccucagucacuugaggaagcucgucccuggguuugggaaagcauauaccauauucaacaaaaccuugauggaggcugaugcucacuacaaaucaguccguacauggaaugagaucauccccucuaaaggauguuuaagaguuggggggagaugucacccccauguaaacgggguguuuuucaaugguaucauccuggguccugauggacauguucuaaucccagagaugcagucgucucuccuucaacagcauauggaguuguuggaauccucgguaaucccgcuaaugcaucccuuggcagaucccucaacaguuuuuaaagacggugacgaggcggaagauuuugucgagguucaccuuccggauguccacaagcaggucucgggaguugaucucggucucccaagcugggggaaguaugugcugaugaguguaggcgcuaugauugcacugauguugaugauuuuccugacgacguguugcagaaaagcuaacggagcagaaacaauacaacaccgucucggagagacaggaaggaaagugucggucaccucccaaagcgggagggucauaucuuccugggagucguauaagagcgggggugagaccaagcuguga

SEQ ID NO: 62919 - RNA, 1575 nt, Artificial Sequence
  derived and/or modified CDS sequence (wt) from glycoprotein__RABV__EU126641.1
augguuccucagguucuuuuguuuguacuccuucugggguuuucguuguguuucgggaaguuccccauuuacacgauaccagacaaacuuggucccuggagcccuauugacauacaccaucuccgcuguccaaauaaccugguuguggaggaugaaggauguaccaaccuguccggguucuccuauauggaacucaaagugggauacaucucagccaucaaagugaacggguucacuugcacagguguugugacagaggcagagaccuacaccaacuuuguugguuaugucacaaccacauucaagagaaagcauuuccgccccaccccagacgcauguagagccgcguauaacuggaagauggccggugaccccagauaugaagagucccuacaaaauccauaccccgacuaccacuggcuucgaacuguaagaaccaccaaagagucccucauuaucauauccccaagugugacagauuuggacccauaugacaaaucccuucacucaagggucuucccuggcggaaagugcucaggaauaacgguguccucuaccuacugcucaacuaaccaugauuacaccauuuggaugcccgaggauccgagaccagggacaccuugugacauuuuuaccaauagcagagggaagagagcauccaacgggaacaagacuugcggcuuuguggaugaaagaggccuguauaagucucuaaaaggagcaugcaggcucaaguuauguggaguucuuggacuuagacuuauggauggaacaugggucgcgaugcaaacaucagaugagaccaaauggugcucuccagaucaguuggugaauuugcacgacuuucgcucaaacgagauugagcaucucguuguggaggauuuagucaagaaaagagaggaaugucuggauacauuagaguccaucaugaccaccaagucaguaaguuucagacgucucagucaccugagaaaacuugucccaggguuuggaaaagcauauaccauauucaacaaaaccuugauggaggcugauguucacuacaagucaguccggaccuggaaugagaucauccccucaaaaggguguuugaaaguuggaggaaggugccauccucaugugaacgggguguuuuucaaugguauaauauuagggccugacgaccguguccuaaucccagagaugcaaucaucccuccuccggcaacauauggaguuguuggaaucuucaguuaucccccugaugcacccccuggcugacccuucuacaguuuucaaagaaggugaugaggcugaggauuuuguugaaguucaccuccccgauguguacaaaaagaucucagggguugaccugggucucccgaacuggggaaaguauguauugaugacugcaggggccaugauuggccugguguugauauuuucccuaaugacauggugcagaagagccaaucgaccagaaucgaaacaacgcaguuuuggagggacaggggggaaugugucagucacuucccaaagcggaaaagucauaccuucaugggaaucauauaagaguggaggugagaucagacuguaa

SEQ ID NO: 62920 - RNA, 1575 nt, Artificial Sequence
  derived and/or modified CDS sequence (wt) from glycoprotein__RABV__EU182346.1
augguuccucaggcucuccuguuuguaccccuucugguuuuuccauuguguuuugggaaauucccuauuuacacgauaccagacaagcuuggucccuggagcccgauugacauacaucaccucagcugcccaaacaauuugguaguggaggacgaaggaugcaccaaccugucaggguucuccuacauggaacuuaaaguuggauacaucuuagccauaaaaaugaacggguucacuugcacaggcguugugacggaggcugaaaccuacacuaacuucguugguuaugucacaaccacguucaaaagaaagcauuuccgcccaacaccagaugcauguagagccgcguacaacuggaagauggccggugaccccagauaugaagagucucuacacaauccguacccugacuaccgcuggcuucgaacuguaaaaaccaccaaggagucucucguuaucauaucuccaaguguggcagauuuggacccauaugacagaucccuucacucgagggucuucccuagcgggaagugcucaggaguagcggugucuucuaccuacugcuccacuaaccacgauuacaccauuuggaugcccgagaauccgagacuagggaugucuugugacauuuuuaccaauaguagagggaagagagcauccaaagggagugagacuugcggcuuuguagaugaaagaggccuauauaagucuuuaaaaggagcaugcaaacucaaguuauguggaguucuaggacuuagacuuauggauggaacaugggucgcgaugcaaacaucaaaugaaaccaaauggugcccucccgaucaguuggugaaccugcacgacuuucgcucagacgaaauugagcaccuuguuguagaggaguuggucaggaagagagaggagugucuggaugcacuagaguccaucaugacaaccaagucagugaguuucagacgucucagucauuuaagaaaacuugucccuggguuuggaaaagcauauaccauauucaacaagaccuugauggaagccgaugcucacuacaagucagucagaacuuggaaugagauccucccuucaaaaggguguuuaagaguuggggggaggugucauccucaugugaacgggguguuuuucaaugguauaauauuaggaccugacggcaaugucuuaaucccagagaugcaaucaucccuccuccagcaacauauggaguuguuggaauccucgguuaucccccuugugcacccccuggcagacccgucuaccguuuucaaggacggugacgaggcugaggauuuuguugaaguucaccuucccgaugugcacaaucaggucucaggaguugacuugggucucccgaacugggggaaguauguauuacugagugcaggggcccugacugccuugauguugauaauuuuccugaugacauguuguagaagagucaaucgaucagaaccuacgcaacacaaucucagagggacagggagggaggugucagucacuccccaaagcgggaggaucauaucuucaugggaaucacacaagagugggggugagaccagacuguga

SEQ ID NO: 62921 - RNA, 1575 nt, Artificial Sequence
  derived and/or modified CDS sequence (wt) from glycoprotein__RABV__EU182347.1
augguuccucaggcucuccuguuuguaccccuucugguuuuuccauuguguuuugggaaauucccuauuuacacgauaccagacaagcuuggucccuggagcccgauugacauacaucaccuaagcugcccaaacaauuugguaguggaggacgaaggaugcaccaaccugucaggguucuccuacauggaacuuaaaguuggauacaacuuagccauaaaaaugaacggguucacuugcacaggcguugugacggaggcugaaaccuacacuaacuucguugguuaugucacaaccacguucaaaagaaagcauuuccgcccaacaccagaugcauguagagccgcguacaacuggaagauggccggugaccccagauaugaagagucucuacacaauccguacccugacuaccgcuggcuucgaacuguaaaaaccaccaaggagucucucguuaucauaucuccaaguguggcagauuuggacccauaugacagaucccuucacucgagggucuucccuagcgggaagugcucaggaguagcggugucuucuaccuacugcuccacuaaccacgauuacaccauuuggaugcccgagaauccgagacuagggaugucuugugacauuuuuaccaauaguagagggaagagagcauccaaagggagugagacuugcggcuuuguagaugaaagaggccuauauaagucuuuaaaaggagcaugcaaacucaaguuauguggaguucuaggacuuagacuuauggauggaacaugggucgcgaugcaaacaucaaaugaaaccaaauggugcccucccgaucaguuggugaaccugcacgacuuucgcucagacgaaauagagcaccuuguuguagaggaguuggucaggaagagagaggagugucuggaugcacuagaguccaucaugacaaccaagucagugaguuucagacgucucagucauuuaagaaaacuugucccuggguuuggaaaagcauauaccauauucaacaagaccuugauggaagccgaugcucacuacaagucagucagaacuuggaaugagauccucccuucaaaaggguguuuaagaguuggggggaggugucauccucaugugaacgggguguuuuucaaugguauaauauuaggaccugacggcaaugucuuaaucccagagaugcaaucaucccuccuccagcaacauauggaguuguuggaauccucgguuaucccccuugugcacccccuggcagacccgucuaccguuuucaaggacggugacgaggcugaggauuuuguugaaguucaccuucccgaugugcacaaucaggucucaggaguugacuugggucucccgaacugggggaaguauguauuacugagugcaggggcccugacugccuugauguugauaauuuuccugaugacauguuguagaagagucaaucgaucagaaccuacgcaacacaauaucagagggacagggagggaggugucagucacuccccaaagcgggaagaucauaucuucaugggaaucacacaagagugggggugagaccagacuguga

SEQ ID NO: 62922 - RNA, 1575 nt, Artificial Sequence
  derived and/or modified CDS sequence (wt) from glycoprotein__RABV__EU253477.1
augacuccucaagcucuuuuguuuguuccccuucuaguuuucucgucguguuuugggaaauuccccauuuacacgauaccagacaaacuugguccauggagucccaccgauauacaucaucucagcuguccgaacaaucugguuguggaagaugaaggaugcaccaaucugucuggauuuuccuacauggaacucaaagugggauauauuucagccauaaaagugaacggauucaccuguacagguguggugaccgaagcagaaaccuacacuaacuuuguugguuaugucaccaccacguuuaagagaaagcacuuucgcccuaugccggaugcgugcagagccgcauacaacuggaagauggcuggugaccccagguaugaagagucucugcacaauccguaccccgacuaccacuggcuccgaacugucaagaccaccaaggagucccuugucaucauaucuccgagcguugcagauuuggacccguacgauaaaucccuucacucgagaguuuuuccuggcggaaaaugcucaggaauaaccguguccuccacuugcugcucuacuaaccacgacuacaccaucuggaugccugaaaauccuagacugggaacuucaugugacauuuucaccaauaguagagggaagagggcaucaaaagggggcaagacuuguggauuuguggaugaaagaggcuuguacaagucucuaaagggagcaugcaagcugaagcuaugugggguucuaggacuuagacuuauggacggaacaugggucgcgauucagacaucagaugagaucaaauggugcucuccugaucagcuaguaaaucuacacgacuuucacucggaugagauugaacaucuuguuguggaggaguuggucaaaaagagggaagagugucuggacgcacuggagacuauuaugaccacaaaguccgugaguuucagacgucuuagucauuugaggaagcuagucccuggauuuagaaaggcguauacuauauucaacaaaaccuugauggaggcugaugcucacuacaaaucaauccggacuuggaaugaaaucauccccuccaaaggguguuuaagaguuggggggagaugucauccucaugugaacgggguguucuucaacggcauuauacuggguccugacggacauguucuaaucccagagaugcagucgucccuccuccaccagcauauggaauuguuggaguccucagucaucccuuugaugcaucccuuagcagacccgucaacagucuuuaaagacggcgacgaggcagaggacuuuguugagguucaccuuccggaugugcacaagcagaucucgggggucgaucuuggucucccaaacugggggaaguaugugcugauaagugcaggugcucugacugcauuaauguugacgauuuucuuaaugacguguugcagaaagacuaauagagcagagucaauacaacacaguccuggagagacagggaggaaagugucggugacuucucacaacggaagggucauaucuucaugggaaucauauaaaagcggaggugagaccaagcuguaa

SEQ ID NO: 62923 - RNA, 1575 nt, Artificial Sequence
  derived and/or modified CDS sequence (wt) from glycoprotein__RABV__EU267742.1
augauuccucaaguucuuuugcuuguuccccuucuaguuuucucgucguguuuugggaaauuccccauuuacacgauaccagacaaacuugguccauggagucccaucgauauacaucaucucagcuguccgaacaaucugguuguggaagaugaaggaugcaccaaucugucuggauuuuccuacauggaacucaaagugggauauauuucagccauaaaagugaacggauucaccuguacagguguggugacagaagcagaaaccuacacgaacuuuguugguuaugucaccaccacguuuaagagaaagcacuuucgcccuacgccggaugcgugcagagccgcauacaacuggaagauggcuggugaccccagguaugaagagucucugcacaauccguacccugauuaccacugguuccgaacugucaagaccuccaaggagucccuugucaucauaucuccgagcguugcagauuuggacccguacgauaaaucccuucacucgagaguuuuuccuggcggaaaaugcucaggaauaaccguguccuccacuugcugcucuacuaaccacgacuacaccaucuggaugccugaaaauccuagacugggaacuucgugugacauuuucaccaauaguagagggaagagggcaucaaaagggggcaagacuuguggauuuguggaugaaagaggcuuguacaagucucuaaagggagcaugcaagcugaagcuaugugggguucuaggacuuagacuuauggacggaacaugggucgcaauucagacaucagaugagaucaaauggugcucuccggaucagcuaguaaaucuacacgacuuucacucagaugagauugaacaucuuguuguggaggaguuggucaaaaagagggaagagugucuggacgcacuggagacuauuaugaccacaaaguccgugaguuucaggcgucuuagucacuugaggaagcuagucccuggguuuggaaaagcguauaccauauucaacaaaaccuugauggaggcugaugcucacuauaaaucaauccggacuuggaaugaaaucauccccucuaaaggguguuuaagaguuggggggagaugucauccucaugugaacgggguuuucuacaacggcauuauacuggguccugacggacauguucuaaucccagagaugcaaucgucccuccuccaccagcauauggaauuguuggaguccucagucaucccuuugaugcaucccuuagcagacccgucaacaguuuuuaaagacggcgacgaggcagaggacuuuguugagguucaccuuccggaugugcacaagcagaucucggggguugaucuuggucucccaaacugggggaaguacgugcugguaagugcaggugcucugacugcauuaauguugaugauuuucuuaaugacguguugcagaaagacuaauagagcagagucaauacaacacaguccuggagagacagggaggaaagugucgguaacuucucacaacggaagggucauaucuucaugggaaucauauaaaaguggaggugagaccaagcuguga

SEQ ID NO: 62924 - RNA, 1575 nt, Artificial Sequence
  derived and/or modified CDS sequence (wt) from glycoprotein__RABV__EU267743.1
augauuccucaaguucuuuuguuuguuccccuucuaguuuucucgucguguuuugggaaauuccccauuuacacgacaucagacaaacuugguccauggagucccaucgauaugcaucaucucagcuguccgaacaaucugguuguggaagaugaaggaugcaccaaucugucuggauuuuccuacauggaacucaaagugggauauauuucagccauaaaagugaacggauucaccuguacagguguggugacagaagcagaaaccuacacuaacuuuguugguuaugucacaaccacguuuaagagaaagcacuuucgcccuaugccggaugcgugcagagccgcauacaacuggaagauggcuggugaccccagguaugaagagucucugcacaauccguacccugacuaccacuggcuccgaacugucaagaccaccaaggagucccuugucaucauaucuccgagcguugcagauuuggacccguacgauaagucccuucacucgagaguuuuuccuggcggaaagugcucaggaauaaccguguccuccacuugcugcucuacuaaccacgacuacaccaucuggaugccugaaaacccuagacugggaacuucgugugacauuuucaccaauaguagagggaaaagggcaucaaaagggggcaagacuuguggauuuguggaugaaagaggcuuguacaagucucuaaagggagcaugcaagcugaagcuaugugggguucuaggacuuagacuuauggacggaacaugggucgcaauucagacgucagaugagaucaaauggugcucuccugaucagcuaguaaaucuacacgacuuucacucggaugagauugaacaucuuguuguggaggaguuggccaaagagagagaagagugucuggacgcacuggaggcuauuaugaccacaaaguccgugaguuucagacgucuuagucauuugaggaagcuagucccuggguuuggaaaggcguauaccauauucaacaaaaccuugauggaggcugaugcucacuauaaaucaauccggacuuggaaugaaaucauccccucuaaaggguguuuaagaguuggggggagaugucauccucaugugaacgggguguucuucaacggcauuauacuggguccugacggacauguucuaaucccagagaugcaaucgucccuccuccaccagcauauggaauuguuggaguccucagucaucccuuugaugcaucccuuagcagacccgucaacagucuuuaaagacggcgacgaggcagaggacuuuguugaggaucaccuuccagaugugcacaagcagauuucggggguugaucuuggucucccaaacugggggaaguaugugcugauaagugcaggugcucugacugcauugaugucgaugauuuucuuaaugacguguugcagaaagacuaauagagcagagucaauacaacacaguccuggagagacagggaggaaagugucgguaacuucucacaacggaagggucauaucuucaugggaaucauauaaaagcggaggugagaccaagcuguga

SEQ ID NO: 62925 - RNA, 1575 nt, Artificial Sequence
  derived and/or modified CDS sequence (wt) from glycoprotein__RABV__EU267744.1
augguuccucaaguucuuuuguuuguuccccuucuaguuuucucgucauguuucgggaaauuccccauuuacacgauaccagacaaacuuggcccauggagucccaucgauauacaucaucucagcuguccgaacaaucuuguuguggaagaugaagggugcaccaaucugucuggauuuuccuacauggaacucaaagugggauauauuucagccauaaaagugaacggauucaccuguacagguguggugacagaagcagaaaccuacacgaacuuuguugguuaugucaccaccacguuuaagagaaagcacuuucgcccuaugccggaugcgugcagagccgcauacaacuggaagauggcuggugaccccagguacgaagagucucugcacaauccguacccugacuaccacuggcuccgaacugucaagaccaccaaggagucccuugucaucauaucuccgagcguugcagauuuggacccguacgauaaaucccuucacucgagaguuuuuccuggcggaaaaugcucaggaauaaccguguccuccacuugcugcucuacuaaccacgacuacaccaucuggaugccugaaaauccuagacugggaacuucgugugacauuuucaccaauaguagagggaagagggcaucaaaagggggcaagacuuguggauuuguggaugaaagaggcuuguacaagucucuaaagggagcaugcaagcugaagcuaugugggguuccaggacuuagacuuauggacggaacauggguugcaauucagacgucagaugagaucaaauggugcucuccugaucagcuaguaaaucuacacgacuuucacucggaugagauugaacaucuuguuguggaggaguuggucaaaaagagggaagagugucuggacgcacuggagacuauuauggccacaaaguccgugaguuucagacgucuuagucauuugaggaagcuagucccuggguuuggaaaggcauauaccauauucaacaaaaccuugauggaggcugaugcucacuauaaaucaauccggacuuggaaugaaaucauccccucuaaaggguguuuaagaguuggggggagaugucauccucaugugagcgggguguucuucaacggcauuauacuggguccugacggacauguucuaaucccagagaugcaaucgucccuccuccaccagcauauggaauuguuggaguccucagucaucccguugaugcaucccuuagcagacccgucaacagucuuuaaagacggcgacgaggcagaggacuuuguugagguucaccuuccggaugugcacaagcagaucucggggguugaucuuggucucccaaacugggagaaguaugugcugauaagugcaggugcucugacugcauuaauguugaugauuuucuuaaugacguguugcagaaaggcuaauagagcagagucaauacaacacaauccuggagagacagggaggaaagugucgguaacuucucacaacggaagggucauaucuucaugggaaucauauaaaagcggaggugaggccaaacuguga

SEQ ID NO: 62926 - RNA, 1575 nt, Artificial Sequence
  derived and/or modified CDS sequence (wt) from glycoprotein__RABV__EU267745.1
augguuccucaggcucuccuguuuguaccccuucugguuuuuccauuguguuuugggaaauucccuauuuacacgauaccagacaagcuuggucccuggagcccgauugacauacaucaccucagaugcccaaacaauuugguaguggaggacgaaggaugcaccaaccugucaggguucuccuacauggaacuuaaaguuggauacaucuuagccauaaaaaugaacggguucacuugcacaggcguugugacggaggcugaaaccuacacuaacuucguugguuaugucacaaccacguucaaaagaaagcauuuccgcccaacaccagaugcauguagagccgcguacaacuggaagauggccggugaccccagauaugaagagucucuacacaauccguacccugacuaccgcuggcuucgaacuguaaaaaccaccaaggagucucucguuaucauaucuccaaguguggcagauuuggacccauaugacagaucccuucacucgagggucuucccuagcgggaagugcucaggaguagcggugucuucuaccuacugcuccacuaaccacgauuacaccauuuggaugcccgagaauccgagacuagggaugucuugugacauuuuuaccaauaguagagggaagagagcauccaaagggagugagacuugcggcuuuguagaugaaagaggccuauauaagucuuuaaaaggagcaugcaaacucaaguuauguggaguucuaggacuuagacuuauggauggaacaugggucgcgaugcaaacaucaaaugaaaccaaauggugcccucccgaucaguuggugaaccugcacgacuuucgcucagacgaaauugagcaccuuguuguagaggaguuggucaggaagagagaggagugucuggauguacuagaguccaucaugacaaccaagucagugaguuucagacgucucagucauuuaagaaaacuugucccuggguuuggaaaagcauauaccauauucaacaagaccuugauggaagccgaugcucacuacaagucagucagaacuuggaaugagauccucccuucaaaaggguguuuaagaguuggggggaggugucauccucaugugagcgggguguuuuucaaugguauaauauuaggaccugacggcaaugucuuaaucccagagaugcaaucaucccuccuccagcaacauauggaguuguuggaauccucgguuaucccccuugugcacccccuggcagacccgucuaccguuuucaaggacggugacgaggcugaggauuuuguugaaguucaccuucccgaugugcacaaucaggucucaggaguugacuugggucucccgaacugggggaaguauguauuacugagugcaggggcccugacugccuugauguugauaauuuuccugaugacauguuguagaagagucaaucgaucagaaccuacgcaacacaaucucagagggacagggagggaggugucagucacuccccaaagcgggaagaucauaucuucaugggaaucacacaagagugggggugagaccagacuguga

SEQ ID NO: 62927 - RNA, 1575 nt, Artificial Sequence
  derived and/or modified CDS sequence (wt) from glycoprotein__RABV__EU267746.1
augguuccucaagcccuucuguuuguaccccuucuggccauuccauuguguuuugggaaauucccuauuuacacgauaccagacaaacucggucccuggagucccauugauauacaucaccucagcuguccgaauaauuugguuguggaggaugaaggauguaccaaucugucaggauucucauacauggaacuuaaaguaggauacauuucagccauaaaggugaacggguucacuuguacggguguggugacggaagcagaaaccuacacuaacuuuguuggcuaugucaccaccacguuuaagagaaagcacuuucgaccaacaccggaugcaugcagauccgcauacaauuggaagauggcuggugaccccagauacgaagagucucugcacaaucccuauccugauuaucauuggcuucggacuguaaaaaccaccaaagaguccuuuguuaucauaucuccaaguguggcagaucuagauccguacgauaaaucccuccauucgagaguuuuuccuagaggaaaaugcucaggaauaacgguuucuucuaccuacugcucuaccaaccaugacuacaccaucuggaugccugaaaaucccagacuggggaccucuugugauauuuucaccaauaguagagggaagagagcauccaaagggagcaagaccuguggauuuguagaugagagaggcuuguacaaaucucuaaaaggagcaugcaaacugaagcugugugggguucucggacuuagacuuauggauggaacaugggucgcgauucagacaucagucgagaccaaguggugcccuccugaccagcuagugaaucuacaugacuuucauucggaugagauugaacaucuuguuguggaggaguuggucaagaaaagggaagagugccuagaugcacuggaguccaucaugaccaccaaguccgugaguuuccgacgucucagucacuugaggaaacuugugccuggguucggaaaagcauacaccauauucaauaagaccuugauggaggcugaugcucacuacaagucgguccggacuuggaacgagaucauccccucuaaaggguguuugagaguuggaggcagaugucauccccaugugaacgggguguuuuuuaaugguauuauccuaggcccugacggccaugucuuaaucccggaaaugcagucaucucuccuucagcagcauauggaguuguuggaauccucggucaucccccuaaugcauccuuuggcagauccaucaacgguuuuuaaagauggugacgaggcggaggauuuuguugagguucaccuuccagaugugcauaagcaggucucaggggucgaucucggucucccaagcugggggaaguauguguugaugagcgcaggcauuuugacugcacugaugcugaugaucuucuuaaugacauguugccgaaggacuaauagagcagagucaauacaacacagucuuggagagacagggaggaaagugucgguaaccucccaaagcgggagggucauaucuucaugggagucauacaaaagcggaggugagaccaaguuguaa

SEQ ID NO: 62928 - RNA, 1575 nt, Artificial Sequence
  derived and/or modified CDS sequence (wt) from glycoprotein__RABV__EU267747.1
augguuccucaagcccuucuguuuguaccccuucuggccauuccauuguguuuugggaaauucccuauuuacacgauaccagacaaacucggccccuggagucccauugauauacaucaccucagcuguccgaauaauuugguuguggaggaugaaggauguaccaaucugccaggauucucauacauggagcuuaaaguaggauacauuucagccauaaaggugaacggguucacuuguacggguguggugacggaagcagaaaccuacacuaacuuuguuggcuaugucaccaccacguuuaagagaaagcacuuucgaccaacaccggaugcaugcagauccgcauacaauuggaagauggcuggugaccccagauacgaagagucuccgcacaaucccuauccugauuaucauuggcuucggacuguaaaaaccaccaaagaguccuuuguuaucauaucuccaaguguggcagaucuagauccguacgauaaaucccuccauucgagaguuuuuccuagaggaaaaugcucaggaauaacggugucuucuaccuacugcucuaccaaccaugacuacaccaucuggaugccugaaaaucccagacuggggaccucuugugauauuuucaccaauaguagagggaagagagcauccaaagggagcaagaccuguggauuuguagaugagagaggcuuguacaaaucucuaaaaggagcaugcaaacugaagcugugugggguucucggacuuagacuuauggauggaacaugggucgugauucagacaucagacgagaccaaguggugcccuccugaccagcuagugaaucuacaugacuuucauucggaugagauugaacaucuuguuguggaggaguuggucaagaaaagggaagagugccuagaugcacuggaguccaucaugaccaccaaguccgugaguuuccgacgucucagucacuugaggaaacuugugccuggguucggaaaagcauacaccauauucaauaagaccuugauggaggcugaugcucacuacaagucgguccggacuuggaacgagaucauccccucuaaaggguguuugagaguuggaggcagaugucauccccaugugaacgggguguuuuuuaaugguauuauccuaggcccugacggccaugucuuaaucccggaaaugcagucaucucuccuucagcagcauauggaguuguuggaauccucggucaucccccuaaugcauccuuuggcagauccaucaacgguuuuuaaagauggugacgaggcggaggauuuuguugagguacgccuuccagaugugcauaagcaggucucaggggucgaucucggucucccaagcugggggaaguauguguugaugagcgcaggcauuuugacugcacugaugcugaugaucuucuuaaugacauguugccgaaggacuaauggagcagagucaauacaacacagucuuggagagacagggaggaaagugucgguaaccucccaaagcgggagggucauaucuucaugggagucauacaaaagcggaggugagaccaaguuguaa

SEQ ID NO: 62929 - RNA, 1575 nt, Artificial Sequence
  derived and/or modified CDS sequence (wt) from glycoprotein__RABV__EU267748.1
augauuccucaaguucuuuuguuuuuuccccuucuaguuuucucgucguguuuugggaaauuccccauuuacacgauaccagacaaacuugguccauggagucccauugauauacaucaucucagcuguccgaacaaucugguuguggaagaugaaggaugcaccaaucugucuggauuuuccuacauggaacucaaagugggauauauuucagccauaaaagugaacggauucaccuguacagguguggugacagaagcagaaaccuacacuaacuuuguugguuaugucacaaccacguuuaagagaaagcacuuucgcccuaugccggaugcgugcagagccgcauacaacuggaagauggcuggugaccccagguaugaagagucucugcacaauccguacccugacuaccacuggcuccgaacugucaagaccaccaaggagucccuugucaucauaucuccgagcguugcagauuuggacccguacgauaggucccuucacucgagaguuuuuccuggcggaaaaugcucaggaauaaccguguccuccacuugcugcucuacuaaccacgacuacaccaucuggaugccugaaaacccuagacugagaacuucgugugacauuuucaccaauaguagagggaaaagggcaccaaaagggggcaagacuuguggauuuguggaugaaagaggcuuguacaagucucuaaagggagcaugcaagcugaagcuaugugggguucuaggacuuagacuuauggacggaacaugggucgcaauucagacgucagaugagaucaaauggugcucuccugaucagcuaguaaaucuacacgacuuucacucggaugagauugaacaucuuguuguggaggaguuggucaaaaagagagaagagugucuggacgcacuggagacuauuaugaccacaaaguccgugaguuucagacgucuuagucauuugaggaagcuagucccuggguuuggaaaggcguauaccauauucaacaaaaccuugauggaggcugaugcucacuauaaaucaauccggacuuggaaugaaaucauccccucuaaaggguguuuaaggguuggggggagaugucauccucaugugaacgggguguucuucaacggcauuauacuggguccugacggacauguucuaaucccagagaugcaaucgucccuccuccaccagcauauggaauuguuggaguccucagucaucccuuugaugcaucccuuagcagacccgucaacagucuuuaaagacggcgacgaggcagaggacuuuguugagguucaccuuccagaugugcacaagcagauuucggggguugaucuuggucucccaaacugggggaaguaugugcugauaagugcaggugcucugacugcauugaugucgaugauuuucuuaaugacguguugcagaaagacuaauagagcagaaucaauacaacacaguccuggagagacagggaggaaagugucgguaacuucucacaacggaagggucauaucuucaugggaaucauauaaaagcggaggugagaccaagcuguga

SEQ ID NO: 62930 - RNA, 1575 nt, Artificial Sequence
  derived and/or modified CDS sequence (wt) from glycoprotein__RABV__EU267749.1
augguuccucaaguucuuuuguuuguuccccuucuaguuuucucgucauguuucgggaaauuccccauuuacacgauaccagacaaacuugguccauggagucccaucgauauacaucaucucagcuguccgaacaaucuuguuguggaagaugaaggaugcaccaaucugucuggauuuuccuacauggaacucaaagugggauauauuucagccauaaaagugaacggauucaccuguacagguguggugacagaagcagaaaccuacacgaacuuuguugguuaugucaccaccacguuuaagagaaagcacuuucgcccuaugccggaugcgugcagagccgcauacaacuggaagauggcuggugaccccagguaugaagagucucugcacaauccguacccugacuaccacuggcuccgaacugucaagaccaccaaggagucccuugucaucauaucuccgagcguugcagauuuggacccguacgauaaaucccuucacucgagaguuuuuccuggcggaaaaugcucaggaauaaccguguccuccacuugcugcucuacuaaccacgacuacaccaucuggaugccugaaaauccuagacugggaacuucgugugacauuuucaccaauaguagagggaagagggcaucaaaagggggcaagacuuguggauuuguggaugaaagaggcuuguacaagucucuaaagggagcaugcaagcugaagcuaugugggguucuaggacuuagacuuauggacggaacauggguugcaauucagacaucagaugagaucaaauggugcucuccugaucagcuaguaaaucuacacgacuuucacucggaugagauugaacaucuuguuguggaggaguuggucaaaaagagggaagagugucuggacgcacuggagacuauuaugaccacaaaguccgugaguuucagacgucuuagucauuugaggaagcuagucccuggguuuggaaaggcguauaccauauucaacaaaaccuugaugggggcugaugcucacuauaaaucaauccggacuuggaaugaaaucauccccucuaaaggguguuuaagaguuggggggagaugucauccucaugugaacgggguguucuucaacggcauuauacuggguccugacggacaugcucuaaucccagagaugcaaucgucccuccuccaccagcauauggaauuguuggaguccucagucaucccguugaugcaucccuuagcagacccgucaacagucuuuaaagacggcgacgaggcagaggacuuuguugagguucaccuuccggaugugcacaagcagaucucggggguugaucuuggucucccaaacugggggaaguaugugcugauaagugcaggugcucugacugcauuaauguugaugauuuucuuaaugacguguugcagaaaggcugauagagcagagucaauacaacacaauccuggagagacagggaggaaagugucgguaacuucucgcaacggaagggucauaucuucaugggaaucauauaaaagcggaggugagaccaaacuguga

SEQ ID NO: 62931 - RNA, 1575 nt, Artificial Sequence
  derived and/or modified CDS sequence (wt) from glycoprotein__RABV__EU267750.1
augguuccucaaguucuuuuguuuguuccccuucuaguuuucucgucauguuucgggaaauuccccauuuacacgauaccagacaaacuugguccauggagucccaucgauauacaucaucucagcuguccgaacaaucuuguuguggaagaugaagggugcaccaaucugucuggauuuuccuacauggaacucaaagugggauauauuucagccauaaaagugaacggauacaccuguacagguguggugacagaagcagaaaccuacacgaacuuuguugguuaugucaccaccacguuuaagagaaagcacuuucgcccuaugccggaugcgugcagagccgcauacaacuggaagauggcuggugaccccagguaugaagagucucugcauaauccguacccugacuaccacuggcuccgaacugucaagaccaccaaggagucccuugucaucauaucuccgagcguugcagauuuggacccguacgauaaaucccuucacucgaggguuuuuccuggcggaaaaugcucaggaauaaccguguccuccacuugcugcucuacuaaccacgacuacaccaucuggaugccugaaaauccuagacugggaacuucgugugacauuuucaccaauaguagagggaagagggcaucaaaagggggcaagacuuguggauuuguggaugaaagaggcuuguacaagucucuaaagggagcaugcaagcugaagcuaugugggguucuaggacuuagacuuauggacggaacauggguugcaauucagacaucagaugagaucaaauggugcucuccugaucagcuaguaaaucuacacgacuuucacucggaugagauugaacaucuuguuguggaggaguuggucaaaaagggggaagagugucuggacgcacuggagacuauuaugaccacaaaguccgugaguuucagacgucuuagucauuugaggaagcuagucccuggguuuggaaaggcguauaccauauucaacaaaaccuugauggaggcugaugcucacuauaaaucaauccggacuuggaaugaaaucauccccucuaaaggguguuuaagaguuggggggagaugucauccucaugugaacgggguguucuucaacggcauuauacuggguccugacggacauguucugaucccagagaugcaaucgucccuccuccaccagcauauggaauuguuggaguccucagucaucccguugaugcaucccuuagcagacccgucaacagucuuuaaagacggcgacgaggcagaggacuuuguugagguucaccuuccggaugugcacaagcagaucucggggguugaucuuggucucccaaacugggggagguaugugcugauaagugcaggugcuuugacugcauuaauguugaugauuuucuuaaugacguguugcagaaaggcuaauagagcagagucaauacaacacaauccugaagagacagggaggaaagugucgguaacuucucacaacggaagggucauaucuucaugggaaucauauaaaagcggaggugagaccaaacuguga

SEQ ID NO: 62932 - RNA, 1575 nt, Artificial Sequence
  derived and/or modified CDS sequence (wt) from glycoprotein__RABV__EU267751.1
augguuccucaaguucuuuuguuuguuccccuucuaguuuucucgucauguuucgggaaauuccccauuuacacgauaccagacaaacuugguccauggagucccaucgauauacaucaucucggcuguccgaacaaucuuguuguggaagaugaagggugcaccaaucugucuggauuuuccuacauggaacucaaagugggauauauuucagccauaaaagugaacggauucaccuguacagguguggugacagaagcagaaaccuacacgaacuuuguugguuaugucaccaccacguuuaagagaaagcacuuucgcccuaugccggaugcgugcagagccgcauacaacuggaagauggcuggugaccccagguaugaagagucucugcacaauccguacccugacuaccacuggcuccgaacugucaagaccaccaaggagucccuugucaucauaucuccgagcguugcagauuuggacccguacgauaaaucccuucacucgagaguuuuuccuggcggaaaaugcucaggaauaaccguguccuccacuugcugcucuacuaaccacgacuacaccaucuggaugccugaaaauccuagacugggaacuucgugugacauuuucaccaauaguagagggaagagggcaucaaaagggggcaagacuuguggauuuguggaugaaagaggcuuguacaagucucuaaagggagcaugcaagcugaagcuaugugggguucuaggacuuagacuuauggacagaacauggguugcaauucagacaucagaugagaucaaauggugcucuccugaucagcuaguaaaucuacacgacuuucacucggaugagauugaacaucuuguuguggaggaguuggucaaaaagagggaagagugucuggacgcacuggagacuauuaugaccacaaaguccgugaguuucagacgucuuagucauuugaggaagcuagucccuggguuuggaaaggcguauaccauauucaacaaaaccuugauggaggcugaugcucacuauaaaucaauccggacuuggaaugaaaucauccccucuaaaggguguuuaagaguuggggggagaugucauccucaugugaacgggguguucuucaacggcauuauacuggguccugacggacauguucuaaucccagagaugcaaucgucccuccuccaccagcauauggaauuguuggaguccucagucaucccguugaugcaucccuuagcagacccgucaacagucuuuaaagacggcgacgaggcagaggacuuuguugagguucaccuuccggaugugcacaagcagaucucggggguugaucuuggucucccaaacugggggaaguaugugcugauaagugcaggugcucugacugcauuaauguugaugauucucuuaaugacguguugcagaaaggcuaauagagcagagucaauacaacacaauccuggagagacagggaggaaagugucgguaacuucucacaacggaagggucauaucuucaugggaaucauauaaaagcggaggugagaccaaacuguga

SEQ ID NO: 62933 - RNA, 1575 nt, Artificial Sequence
  derived and/or modified CDS sequence (wt) from glycoprotein__RABV__EU267752.1
augauuccucaaguucuuuuguuuguuccccuucuaguuuucucgucguguuuugggaaauuccccauuuacacgauaccagacaaacuugguccauggagucccaucuucauacauccucuccugcgaccgaacaaucugguuguggaagaugaaggaugcaccaauuugucuggauuuuccuacauggaacucaaagugggauauauuucagccauaaaagugaacggauucaccuguacagguguggugacugaagcagaaaccuacacuaacuuuguugguuaugucaccaccacguuuaagagaaagcacuuucgcccuaugccggaugcgugcagagccgcauacaacuggaagauggcuggugaccccagguaugaagagucucugcacaauccguaccccgacuaccacuggcuccgaacugucaagaccaccaaggagucccuugucaucauaucuccgagcguugcagauuuggacccguacgauaaaucccuucacucgagaguuuuuccuggcggaaaaugcucaggaauaaccguguccuccacuugcugcucuacuaaccacgacuacaccaucuggaugccugaaaauccuagacugggaacuucaugugacauuuucaccaauaguagagggaagagggcaucaaaagggggcaagacuuguggauuuguggaugaaagaggcuuguacaagucucuaaagggagcaugcaagcugaagcuaugugggguucuaggacuuagacuuauggacggaacaugggucgcgauucagacaucagaugagaucaaauggugcucuccugaucagcuaguaaaucuacacgacuuucacucggaugagauugaacaucuuguuguggaggaguuggucaaaaagagggaagagugucuggacgcacuggagacuauuaugaccacaaaguccgugaguuucagacgucuuagucauuugaggaagcuagucccuggguuuggaaaggcguauaccauauucaacaaaaccuugauggaggcugaugcucacuacaaaucaauccggacuuggaaugaaaucauccccuccaaaggguguuuaagaguuggggggagaugucauccucaugugaacgggguguucuucaacggcauuauacuggguccugacggacauguucuaaucccagagaugcagucgucccuccuccaccagcauauggaguuguuggaguccucagucaucccuuugaugcaucccuuagcagacccgucaacagucuuuaaagacggcgacgaggcagaggacuuuguugagguucaccuuccggaugugcacaagcagaucucggggguugaucuuggucucccaaacugggggaaguaugugcugauaagugcaggugcuuugacugcauuaauguugacgauuuucuuaaugacguguugcagaaagacuaauagagcagggucaauacaacacaguccuggagagacagggaggaaagugucggugacuucucacaacggaagggucauaucuucaugggaaucauauaaaagcggaagugagaccaagcuguga

SEQ ID NO: 62934 - RNA, 1575 nt, Artificial Sequence
  derived and/or modified CDS sequence (wt) from glycoprotein__RABV__EU267753.1
augauuccucaaguucuuuuguuuguuccccuucuaguuuucucgucguguuuugggaaauuccccauuuacacgauaccagacaaacuugguccauggagucccaucgauauacaucaucucagcuguccgaacaaucugguuguggaagaugaaggaugcaccaaucugucuggauuuuccuacauggaacucaaagugggauauauuucagccauaaaagugaacggauucaccuguacagguguggugacagaagcagaaaccuacacgaacuuuguugguuaugucaccaccacguuuaagagaaagcacuuucgcccuacgccggaugcgugcagagccgcauacaacuggaagauggcuggugaccccagguaugaagagucucugcacaauccguacccugauuaccacuggcuccgaacugucaagaccuccaaggagucccuugucaucauaucuccgagcguugcagauuuggacccguacgauaaaucccuucacucgagaguuuuuccuggcggaaaaugcucaggaauaaccguguccuccacuugcugcucuacuaaccacgacuacaccaucuggaugccugaaaauccuagacugggaacuucgugugacauuuucaccaauaguagagggaagagggcaucaaaagggggcaagacuuguggauuuguggaugaaagaggcuuguacaagucucuaaagggagcaugcaaguugaagcuaugugggguucuaggacuuagacuuauggacggaacaugggucgcaauucagacaucagaugagaucaaauggugcucuccggaucagcuaguaaaucuacacgacuuucacucagaugagauugaacaucuuguuguggaggaguuggucaaaaagagggaagagugucuggacgcacuggagacuauuaugaccacaaaguccgugaguuucaggcgucuuagucauuugaggaagcuagucccuggguuuggaaaagcguauaccauauucaacaaaaccuugauggaggcugaugcucacuauaaaucaauccggacuuggaaugaaaucauccccucuaaaggguguuuuagaguuggggggagaugucauccucaugugaacgggguuuucuucagcggcauuauacuggguccugacggacauguucuaaucccagagaugcaaucgucccuccuccaccagcauauggaauuguuggaguccucagucaucccuuugaugcaucccuuagcagacccgucaacaguuuuuaaagacggcgacgaggcagaggacuuuguugagguucaccuuccggaugugcacaagcagaucucggggguugaucuuggucucccaaacugggggaaguacgugcugguaggugcaggugcucugacugcauuaauguugaugauuuucuuaaugacguguugcagaaagacuaauagagcagagucaauacaacacaguccuggagagacagggaggaaagugucgguaacuucucacaacggaagggucauaucuucaugggaaucauauaaaaguggaggugagaccaagcuguga

SEQ ID NO: 62935 - RNA, 1575 nt, Artificial Sequence
  derived and/or modified CDS sequence (wt) from glycoprotein__RABV__EU267754.1
augauuccucagguucuuuuguuuguuccccuucuaguguucucgucguguuuugggaaauuccccauuuacacgauaccagacagacuugguccauggagucccaucgauauacaucaucucagcuguccgaacaauaugguuguggaagaugaaggaugcaccaaucugucuggauuuuccuacauggaacucaaagugggauauauuucagccauaaaagugaacggguucaccuguacagguguggugacagaagcagaaaccuacacuaacuuuguugguuaugucaccaccacguuuaagagaaagcacuuucgcccuaugccggaugcaugcagagccgcauacaacuggaagauggcuggugaccccagguaugaggagucucugcacaauccguacccugacuaccacuggcuccgcacugucaagaccaccaaggagucccuugucaucauaucuccgagcguugcagauuuggacccguacgauaaaucccuucacucgagaguuuuuccuggcggaaaaugcucaggaauaaccguguccuccacuugcugcucuacuaaccacgacuacaccaucuggaugccugaaaauccuagacugggaacuucgugugacauuuucaccaauaguagagggaagagggcaucaaaagggggcaagacuuguggauuuguggaugaaagaggcuuguacaagucucuaaagggagcaugcaagcugaggcugugugggguucuaggacuuagacuuauggacggaacaugggucgcaauucagacaucagaugagaucaaauggugcucuccugaucagcuaguaaaucuacaugacuuucacucggaugagauugaacaucuuguugcggaggaguuggucaaaaagagggaagagugucuggacgcacuggagacuauuaugaccacaaaguccguaaguuucagacgucuuagucauuugaggaagcuagucccuggguuuggaaaggcguauaccauauucaacaaaaccuugauggaggcugaugcucacuauaagucaauccggacuuggaaugaaaucauccccucuaaaggguguuuaagaguuggggggagaugucauccucaugugaacgggguguucuucaacggcauuauacuggguccugacggacauguucuaaucccagagaugcaaucgucccuccuccaccagcauauggaauuguuggaguccucagucaucccuuugaugcaucccuuagcagacccgucaacagucuuuaaggacggcgacgaggcagaggacuuuguugagguucaccuuccggaugugcacaagcagaucucggggguugaucuuggucucccaaacugggggaaguaugugcugauaagugcaggugcucugacugcauuaauguugacgauuuucuuaaugacguguugcagaaagacuaguagagcagagucgauacaacacaguccuggagagacagggaggaaagugucgguaacuucucacaacggaagggucauaucuucaugggaaucauauaaaagcggaggugagaccaagcuguga

SEQ ID NO: 62936 - RNA, 1575 nt, Artificial Sequence
  derived and/or modified CDS sequence (wt) from glycoprotein__RABV__EU267755.1
augauuccucaaguucuuuuguuuguuccccuucuaguguucucgucgugcuuugggaaauuccccauuuacacgauaccagacaaacuugguccauggagucccaucgauauacaucaucucagcuguccgaacaaucugguuguggaagaugaaggaugcaccaaucugucuggauuuuccuacauggaacucaaagugggauauauuucagccauaaaagugaacggauucaccuguacagguguggugacagaagcagaaaccuacacgaacuuuguugguuaugucaccaccacguuuaagagaaagcacuuucgcccuacgccggaugcgugcagagccgcauacaacuggaagauggcuggugaccccagauaugaagagucucugcacaguccguacccugauuaucacuggccccgaacugucaagaccuccaaggagucccuugucaucauaucuccgggcguugcagauuuggacccguacgauaaaucccuucacucgagaguuuuucccggcggaaaaugcucaggaauaaccguguccuccacuugcugcucuacuaaccacgacuacaccaucuggaugccugaaaauccuagacugggaacuucgugugacauuuucaccaauaguagagggaagagggcaucaaaagggggcaagacuuguggauuuguggaugaaagaggcuuguacaagucucuaaagggagcaugcaagcugaagcuaugugggguucuaggacuuagacuuauggacggaacaugggucgcaauucagacaucagaugagaucgaauggugcucuccugaucagcuaguaaaucuacacgacuuucacucagaugagauugaacaucuuguuguggaggaguuugucaaaaagagggaagagugucuggacgcacuggagacuauuaugaccacaaaguccgugaguuucaggcgucuuagucauuugaggaagcuaguccccggguuuggaaaggcguauaccauauucaacaaaaccuugauggaggcugaugcucacuauaaaucaauccggacuuggaaugaaaucauccccucuaaaggguguuuaagaguuggggggagaugucauccucauguguacgggguguucuucaacggcauuauacuggguccugacggacauguucuaaucccagagaugcaaucgucccuccuccgccagcauauggaauuguuggaguccucagucaucccuuugaugcaucccuuagcagacccgucaacaguuuuuaaagacggcgacgaggcagaggacuuuguugagguucaccuuccggaugugcacaagcagaucucggggguugauccuggucucccaaacugggggaaguauguguugguaagugcaggugcucugacugcauuaauguugaugauuuucuugacgacguguugcagaaagacuaauagagcagagucaauacaacacaguccuggagagacagggaggaaagugucgguaacuucucacaacggaagggucauaucuucaugggaaucauauaaaaguggaggugagaccaagcuguga

SEQ ID NO: 62937 - RNA, 1575 nt, Artificial Sequence
  derived and/or modified CDS sequence (wt) from glycoprotein__RABV__EU267756.1
augauuccucaaguucuuuuguuuguuccccuucuaguguucucguuguguuuugggaaauuccccauuuacacgauaccagacaaacuugguccauggagucccaucgauauacuucaucucagcuguccgaacaaucugguuguggaagaugaaggaugcaccgaucugucuggauuuuccuacauggaacucaaagugggauauauuucagccauaaaagugaacggauucaccuguacagguguggugacagaagcagaaaccuacacgaacuuuguugguuaugucaccaccacguuuaagagaaagcacuuucgcccuacgccggaugcgugcagagccgcauacaacuggaagauggcuggugaccccagguaugaagagucucugcacaauccguacccugauuaucacuggcuccgaacugucaagaccuccaaggagucccuugucaucauaucuccgagcgaugcagauuuggacccguacgauaaaucccuucacucgagaguuuuucccggcggaaaaugcucaggaauaaccguguccuccacuugcugcucuacuaaccacgacuacaccaucuggaugccugaaaauccuagacugggaacuucgugugacauuuucaccaauaguagagggaagagggcaucaaaagggggcaagacuuguggauuuguggaugaaagaggcuuguacaagucucuaaagggagcaugcaagcugaagcuaugugggguucuaggacuuagacuuauggacggaacaugggucgcaauucagacaucagaugagaucaaauggugcucuccugaucagcuaguaaaucuacacgacuuucacucagaugagauugaacaucuuguuguggaggaguuggucaaaaagagggaagagugucuggacgcacuggagacuauuaugaccacaaaguccgugaguuucaggcgucuuagucauuugaggaagcuagucccuggguuuggaaaggcguauaccauauucaacaaaaccuugauggaggcugaugcucacuauaaaucaauccggacuuggaaugaaaucauccccucuaaaggguguuuaagaguuggggggagaugucauccucaugugaacgggguguucuucaacggcauuauacuggguccugacggacauguucuaaucccagagaugcaaucgucccuccuccaccagcauauggaauuguuggaguccucagucaucccuuugaugcaucccuuagcagacccgucaacaguuuuuaaagacggcgacgaggcagaggacuuuguugagguucaccuuccggaugugcacaagcagaucucggggguugaucuuggucucccaaacugggggaaguacgugcugguaagugcaggugcucugacugcauuaauguugaugauuuucuugaugacguguugcagaaagacuaauagagcagagucaauacaacacaguccuggagagacagggaggaaagugucgguaacuucucacaacggaagggucauaucuucaugggaaucauauaaaaguggaggugagaccaagcuguga

SEQ ID NO: 62938 - RNA, 1575 nt, Artificial Sequence
  derived and/or modified CDS sequence (wt) from glycoprotein__RABV__EU267757.1
augauuccucaaguucuuuuguuuguuccccuucuaguguucucgucgugucuugggaaauuccccauuuacacgauaccagacaaacuugguccauggaguccuaucgauauacaucaucucagcuguccgaacaaucugguuguggaagaugaaggaugcaccaaucugucuggauuuuccuacauggaacucaaagugggauauauuucagccauaaaagugaacggauucaccuguacagguguggugacagaagcagaaaccuacacgaacuuuguugguuaugucaccaccacguuuaagagaaagcacuuucgcccuacgccggaugcgugcagagccgcauacaacuggaagauggcuggugaccccagguaugaagagucucugcacaauccguacccugauuaucacuggcuccgaacugucaagaccuccaaggagucccuugucaucauaucuccgagcguugcagauuuggacccguacgauaaaucccuucacucgagaguuuuucccggcggaaaaugcucaggaauaaccguguccuccacuugcugcucuacuaaccacgacuacaccaucuggaugccugaaaauccuagacugggaacuucgugugacauuuucaccaauaguagagggaagagggcaucaaaagggggcaagacuuguggauuuguggaugaaagaggcuuguacaagucucuaaagggagcaugcaagcugaagcuaugugggguucuaggacuuagacuuauggacggaacaugggucgcaauucagacaucagaugagaucaaauggugcucuccugaucagcuaguaaaucuacacgacuuucacucagaugagauugagcaucuuguuguggaggaguuggucgaaaagagggaagagugucuggacgcacuggggacuauuaugaccacaaaguccgugaguuucgggcgucuuagucauuugaggaagcuagucccuggguuuggaaaggcguauaccauauucaacaaaaccuugauggaggcugaugcucacuauaaaucaauccggacuuggaaugaaaucauccccucuaaaggguguuuaagaguuggggggagaugucauccucaugugaacgggguguucuucaacggcauuauacuggguccugacagacauguucuaaucccagagaugcaaucgucccuccuccaccagcauauggaauuguuggaguccucagucaucccuuugaugcaucccuuagcagacccgucaacaguuuuuaaagacggcgacgaggcagaggacuuuguugagguucaccuuccggaugugcacaagcagaucucggggguugaucuuggucucccaaacugggggaaguacgugcugguaagugcaggugcucugacugcauuaauguugaugauuuucuugaugacguguugcagaaagacuaauagagcagagucaauacaacacagcccuggagagacagggaggaaagugucgguaacuucucacaacggaagggucauaucuucaugggaaucauauaaaaguggaggugagaccaagcuguga

SEQ ID NO: 62939 - RNA, 1575 nt, Artificial Sequence
  derived and/or modified CDS sequence (wt) from glycoprotein__RABV__EU267758.1
augauuccucaaguucuuuuguuuguuccccuucuaguuuucucgucguguuuugggaaauuccccauuuacacgauaccagacaaacuugguccauggauucccaucgauauacaucaucucagcuguccgaacaaucugguuguggaagaugaaggaugcaccaaucugucuggauuuuccuacauggaacucaaagugggauauauuucagccauaaaagugaacggauucaccuguacagguguggugacagaagcagaaaccuacacuaacuuuguugguuaugucacaaccacguuuaagagaaagcacuuucgcccuaugccggaugugugcagagccgcauacaacuggaagauggcuggugaccccagguaugaagagucucugcacaauccguacccugacuaccacuggcuccgaacugucaagaccaccaaggagucccuugucaucauaucuccgagcguugcagauuuggacccguacgauaagucccuucacucgagaguuuuuccuggcggaaaaugcucaggaauaaccguguccucuacuugcugcucuacuaaccacgacuacaccaucuggaugccugaaaacccuagacugggaacuucgugugacauuuucaccaauaguagagggaaaagggcaucaaaagggggcaagacuuguggauuuguggaugaaagaggcuuguacaagucucuaaagggagcaugcaggcugaagcuaugugggguucuaggacuuagacuuauggacggaacaugggucgcaauucagacgucagaugagaucaaauggugcucuccugaucagcuaguaaaucuacacgacuuucacucggaugagauugaacaucuuguuguggaggaguuggucaaaaagagaggagagugucuggacgcacuggagacuauuaugaccacaaaguccgugaguuucagacgucuuagucauuugaggaagcuagucccuagguuuggaaaggcguauaccauauucaacaaaaccuugauggaggcugaugcucacuauaaaucaauccggacuuggaaugaaaucauccccucuaaaggguguuuaagaguuggggggagaugucguccucaugugaacgggguguucuucaacggcauuauacuggguccugacggacauguucuaaucccagagaugcaaucgucccuccuccaccagcauauggaauuguuggaguccucagucaucccuuugaugcaucccuuagcagacccgucaacagucuuuaaagacggcgacgaggcagaggacuuuguugagguuuaccuuccagaugugcacaagcaaauuucggggguugaucuuggucucccaaacugggggaaguaugugcugauaagugcaggugcucugacugcauugaugucgaugauuuucuuaaugacguguugcagaaagacuaauagagcagagucaauacaacacaguccuggagagacagggaggaaagugucgguaacuucucacaacggaagggacauauuuucaugggaaucauauaaaagcggaggugagaccaagcuguga

SEQ ID NO: 62940 - RNA, 1575 nt, Artificial Sequence
  derived and/or modified CDS sequence (wt) from glycoprotein__RABV__EU267759.1
augauuccucaaguucuuuuguuuguuccccuucuaguuuucucgucguguuuugggaaauuccccauuuacacgauaccagacaaacuugguccauggagucccaucgauauacaucaucucagcuguccgaacaaucugguuguggaagaugaaggaugcaccaaucugucuggauuuuccuacauggaacucaaagugggauauauuucagccauaaaagugaacggauucaccuguacagguguggugacagaagcagaaaccuacacgaacuuuguugguuaugucaccaccacguuuaagagaaagcacuuucgcccuacgccggaugcgugcagagccgcguacaacuggaagauggcuggugaccccagguaugaagagucucugcacaauccguacccugauuaucacuggcuccgaacugucgagaccuccaaggagucccuugucaucauaucuccgagcguugcagauuuggacccguacgauaaaucccuucacucgagaguuuuuccuggcggaaaaugcucaggaauaaccguguccuccacuugcugcucuacuaaccacgacuacaccaucuggaugccugaaaauccuagacugggaacuucgugugacauuuucaccaauaguagagggaagagggcaucaaaagggggcaagacuuguggauuuguggaugaaagaggcuuguacaagucucuaaagggagcaugcaagcugaagcuaugugggguucuaggacuuagacuuauggacggaacaugggucgcaauucagacaucagaugagaucaaauggugcucuccugaucagcuaguaaaucuacacggcuuucacucagaugagauugaacaucuuguuguggaggaguuggucaaaaagagggaagagugucuggacgcacuggagacuauuaugaccacaaaguccgugaguuucaggcgucuuagucauuugaggaagcuagucccuggguuuggaaaggcguauaccauauucaacaaaaccuugauggaggcugaugcucacuauaaaucaauccggacuuggaaugaaaucauccccucuaaaggguguuuaagaguuggggggagaugucauccucaugugaacgggguguucuucaacggcauuauacuggguccugacggacauguucuaaucccagagaugcaaucgucccuccuccaccagcauauggaauuguuggaguccucagucaucccuuugaugcaucccuuagcagacccgucaacaguuuuuaaagacggcgacgaggcagaggacuuuguugagguucaccuuccggaugugcacaagcagaucucggggguugaucuuggucucccaaacugggggaaguacgugcugguaagugcaggugcucugacugcauuaauguugaugauuuucuuaaugacguguugcagaaagacuaauagagcagagucaauacaacacaguccuggagagacagggaggaaagugucgguaacuucucacaacggaagggucauaucuucaugggaaucauauaaaagcggaggugagaccaagcuguga

SEQ ID NO: 62941 - RNA, 1575 nt, Artificial Sequence
  derived and/or modified CDS sequence (wt) from glycoprotein__RABV__EU267760.1
augauuccucaaguucuuuuguuuguuccccuucuaguuuucucgucguguuuugggaaauuccccauuuauacgauaccagacaaacuugguccauggagucccaucgacauacaucaucucagcuguccgaacaaucugguuguggaagaugaaggaugcaccaaucugucugguuuuuccuacauggaacucaaagugggauacauuucagccauaaaagugaacggauucaccuguacagguguggugacaguagcagaaaccuacacuaacuuuguugguuaugucaccaccacguuuaaaagaaagcacuuucgcccuaugccggaugcaugcagagccgcauacaauuggaagauggcuggugaccccagguaugaagagucucugcacaauucguacccugacuaccacuggcuccgaacugucaagacccccaaggagucccuugucaucauaucuccgagcguugcagauuuggacccguacgauaaaucccuucacucgagaguuuuuccuggcggaaaaugcucaggaauaaccguguccuccacuugcugcucuaccaaccacgauuacaccaucuggaugccugaaaauccuagacugggaacuucgugugacauuuucaccaauaguagagggaagagggcaucaaaagggggcaagacuuguggauuuguggaugaaagaggcuuguacaagucucugaagggagcaugcaagcugaaacuaugugggguucuaggacuuagacuuauggacggaacaugggucgcaauucagacaucagaugagaucaaauggugcucuccugaucagcuagugaaucuacacgacuuucacucggaugagauugaacaucuuguuguggaggaguuggucaaaaagagggaagagugucuggacgcacuggagacuauuaugaccacaaaguccgugaguuucagacgucuuagucauuugaggaagcuagucccuggguuuggaaaggcguauaccauauucaacaaaacccugauggaggcugaugcucacuauaaaucaauccggacuuggaaugaaaucauccccucuaaaggguguuugagaguuggggggagaugucauccucaugugaacgggguguucuucaacgguauuauacuggguccugacggacauguucuaaucccagagaugcaaucgucccuccuccaccagcauauggaauuguuggaguccucagucaucccuuugaugcaucccuuagcagacccgucaacagucuuuaaagacggcgacgaggcagaggacuuuguugagguucaccuuccggaugugcacaagcagaucucggggguugaucuuggucucccaaacugggggaaguaugugcugauaagugcaggugcucugacugcauuaauguugaugauuuucuuaaugacguguugcagaaagacuaauagagcagagucaauacaacacaguccuggagagacagggaggaaagugucgguaacuucucacaauggaagggucauaucuucaugggaaccauauaaaagcggaggugagaccaagcuguga

SEQ ID NO: 62942 - RNA, 1575 nt, Artificial Sequence
  derived and/or modified CDS sequence (wt) from glycoprotein__RABV__EU267761.1
augauuccucaaguucuuuuguuuguuccccuucuaguuuucucgucguguuuugggaaauuccccauuuauacgauaccagacaaacuugguccauggagucccaucgauauacaucaucucagcuguccgaacaaucugguuguggaagaugaaggaugcaccaaucugucugguuuuuccuacauggaacucaaagugggauauauuucagccauaaaagugaacggauucaccuguacagguguggugacagaagcagaaaccuacacuaacuuuguugguuaugucaccaccacguuuaagagaaagcacuuucgcccuaugccggaugcaugcagagccgcauacaauuggaagauggcuggugaccccagguaugaagagucucugcacaauccguacccugacuaccacuggcuccgaacugucaagaccaccaaggagucccuugucaucauaucuccgagcguugcagauuuggacccguacgauaaaucccuucacucgagaguuuuuccuggcggaaaaugcucaggaauaaccguguccuccacuugcugcucuaccaaccacgauuacaccaucuggaugccugaaaauccuagacugggaacuucgugugacauuuucaccaauaguagagggaagagggcaucaaaagggggcaagacuuguggauuuguggaugaaagaggcuuguacaagucucuaaagggagcaugcaagcugaaacuaugugggguucuaggacuuagacuuauggacggaacaugggucgcaauucagacaucagaugagaucaaauggugcucuccugaucagcuaguaaaucuacacgacuuucacucggaugagauugaacaucuuguuguggaggaguuggucaaaaagagggaagagugucuggacgcacuggagacuauuaugaccacaaaguccgugaguuucagacgucuuagucauuugaggaagcuagucccuggguuuggaaaggcguauaccauauucaacaaaacccugauggaggcugaugcucacuauaaaucaauccggacuuggaaugaaaucauccccucuaaaggguguuugagaguuggggggagaugucauccucaugugaacgggguguucuucaacggcauuauacuggguccugacggacauguucuaaucccagagaugcaaucgucccuccuccaccagcauauggaauuguuggaguccucagucaucccuuugaugcaucccuuagcagacccgucaacagucuuuaaagacggcgacgaggcagaggacuuuguugagguucaccuuccggaugugcacaagcagaucucggggguugaucuuggucucccaaacugggggaaguaugugcugauaagugcuggugcucugacugcauuaauguugaugauuuucuuaaugacguguugcagaaagacuaauagagcagagucaauacaacacaguccuggagagacagggaggaaagugucgguaacuucucacaacggaagggucauaucuucaugggaaucauauaaaagcggaggugagaccaagcuguga

SEQ ID NO: 62943 - RNA, 1575 nt, Artificial Sequence
  derived and/or modified CDS sequence (wt) from glycoprotein__RABV__EU267762.1
augauuccucagguucuucuguuuguuccccuucuaguuuucucgucguguuuugggaaauuccccauuuacacgauaccagacaaacuugguccauggagucccaucgauauacaucaucucagcuguccgaacaaucugguuguggaagaugaaggaugcaccaaucugucuggauuuuccuacauggaacucaaagugggauauauuucagcaauaaaagugaacggauucaccuguacagguguggugacagaagcagaaaccuacacuaacuuuguugguuaugucacaaccacguuuaagagaaagcacuuucgcccuaugccggaugcgugcagagccgcauacaacuggaagauggcuggugaccccagguaugaagagucucugcacaauccguacccugacuaccacuggcuccgaacugucaagaccaccaaggagucccuugucaucauaucuccgagcguugcagauuuggacccguacgauaagucccuucacucgagaguuuuuccuggcggaaaaugcucaggaauaaccguguccuccacuugcugcucuacuaaccacgacuacaccaucuggaugccugaaaacccuagacugggaacuucgugugacauuuucaccaauaguagagggaagagggcaucaaaagggggcaagacuuguggauuuguggaugaaagaggcuuguacaagucucuaaagggagcaugcaagcugaagcuaugugggguucuaggacuuagacuuauggacggaacaugggucgcaauucagacgucagaugagaucaaauggugcucuccugaucagcuaguaaaucuacacgacuuucacucggaugagauugaacaucuuguuguggaggaguuggucaaaaagagagaagagugucuggacgcacuggagacuauuaugaccacaaaguccgugaguuucagacgucuuagucauuugaggaagcuagucccuggguuuggaaaggcguauaccauauucaacaaaaccuugauggaggcugaugcccacuauaaaucaauccggacuuggaaugaaaucauccccucuaaaggguguuuaagaguuggggggagaugucauccucaugugaacgggguguucuucaacggcauuauacuggguccugacggacauguucuaaucccagagaugcaaucgucccuccuccaccagcauauggaauuguuggaguccucagucaucccuuugaugcaucccuuagcagacccgucaacagucuuuaaagacggcgacgaggcagaggacuuuguugagguucaccuuccagaugugcacaagcagauuucggggguugaucuuggucucccaaacugggggaaguaugugcugauaagugcaggugcucugacugcauuaaugucgaugauuuucuuaaugacguguugcagaaagacuaauagagcagagucaauacaacacaguccuggagagacggggaggaaagugucgguaacuucucacaacggaagggucauaucuucaugggaaucauauaaaagcggaggugagaccaagcuguga

SEQ ID NO: 62944 - RNA, 1575 nt, Artificial Sequence
  derived and/or modified CDS sequence (wt) from glycoprotein__RABV__EU267763.1
augauuccucaaguucuuuuguuuguuccccuucuaguuuucucgucguguuuugggaaauuccccauuuacacgauaccagacaaacuugguccauggagucccaucgauauacaucaucucagcuguccgaacaaucugguuguggaagaugaaggaugcaccaaucugucuggauuuuccuacauggaacucaaagugggauauauuucagccauaaaagugaacggauucaccuguacagguguggugacagaagcagaaaccuacacuaacuuuguugguuaugucacaaccacgcuuaagagaaagcacuuucgcccuaugccggaugcgugcagagccgcauacaacuggaagauagcuggugaccccagguaugaagagucucugcacaauccguacccugacuaccaccggcuccgaacugucaagaccaccaaggagucccuugucaucauaucuccgagcguugcagauuuggacccguacgauaagucccuucacucgagaguuuuuccuggcggaaaaugcucaggaauaaccguguccuccacuugcugcucuacuaaccacgacuacaccaucuggaugccugaaaacccuagacugggaacuucgugugacauuuucaccaauaguagagggaaaagggcaucaaaagggggcaagacuuguggauuuguggaugaaagaggcuuguacaagucucuaaagggagcaugcaagcugaagcuaugugggguucuaggacuuagacuuauggacggaacaugggucgcaauucagacgucagaugagaucaaauggugcucuccugaucagcuaguaaaucuacacgacuuucacucggaugagauugaacaucuuguuguggaggaguuggucaaaaugagagaagagugucuggacgcacuggagacuauuaugaccacaaaguccgugaguuucagacgucuuagucauuugaggaagcuagucccuggguuuggaaaggcguauaccauauucaacaaaaccuugauggaggcugaugcucacuauaaaucaauccggacuuggaaugaaaucauccccucuaaaggguguuuaagaguuggggggagaugucauccucaugugaacgggguguucuucaacggcauuauacuggguccugacggacauguucuaaucccagagaugcaaucgucccuccuccaccagcauauggaauuguuggaguccucagucaucccuuugaugcaucccuuagcagacccgucaacagucuuuaaagacggcgacgaggcagaggacuuuguugagguucaccuuccagaugugcacaagcagauuucggggguugaucuuggucucccaaacugggggaaguaugugcugauaagugcaggugcucugacugcauugaugucgaugauuuucuuaaugacguguugcagaaagacuaauagagcagagucaauacaacacaguccuggagagacagggaggaaagugucgguaacuucucacaacggaagggucauaucuucaugggaaucauauaaaagcggaggugagaccaagcuguga

SEQ ID NO: 62945 - RNA, 1575 nt, Artificial Sequence
  derived and/or modified CDS sequence (wt) from glycoprotein__RABV__EU267764.1
augauuccucaaguucuuuuguuuguuccccuucuaguuuccucgucauguuuugggaaauuccccauuuacacgauaccagacaaacuugguccauggagucccaucgauauacaucaucucagcuguccgaacaaucugguuguggaagaugaaggaugcaccagucugucuggauuuuccuacauggaacucaaagugggauauauuucagccauaaaagugaacggauucaccuguacagguguggugacagaagcagaaaccuacacuaacuuuguugguuaugucacaaccacguuuaagagaaagcacuuucgcccuaugccggaugcgugcagagccgcauacaacuggaagauggcuggugaccccagguaugaagagucucugcacaauccguacccugacuaccacuggcuccgaacugucaagaccaccaaggagucccuugucaucauaucuccgagcguugcagauuuggacccguacgauaagucccuucacucgagaguuuuuccuggcggaaaaugcucaggaauaaccguguccuccacuugcugcucuacuaaccacgacuacaccaucuggaugccugaaaacccuagacugggaacuucgugugacguuuucaccaauaguagagggaagagggcaucaaaagggggcaagacuuguggauuuguggaugaaagaggcuuguacaagucucuaaagggagcaugcaagcugaagcuaugugggguucuaggacuuagacuuauggacggaacaugggucgcaauucagacgucagaugggaucaaauggugcucuccugaucagcuaguaaaucuacacgacuuucacucggaugagauugaacaucuuguuguggaggaguuggucaaaaagagagaagagugucuggacgcacuggagacuauuaugaccacaaaguccgugaguuucagacgucuuagucauuugaggaagcuagucccuggguuuggaaaggcguauaccauauucaacaaaaccuugauggaggcugaugcucacuauaaaucaauccggacuuggaaugaaaucauccccucuaaaggguguuuaagaguuggggggagaugucauccucaugugaacgggguguucuucaacggcauuauacuggguccugacggacauguucuaaucccagagaugcaaucgucccuccuccaccagcauauggaauuguuggaguccucagucaucccuuugaugcaucccuuagcagacccgucaacagucuuuaaagacggcgacgaggcagaggacuuuguugagguucaccuuccagaugugcacaagcagauuucggggguugaucuaggucucccaaacugggggaaguaugugcugauaagugcaggugcucugacugcauuaaugucgaugauuuucuuaaugacguguugcagaaagacuaauagagcagagucaauacaacacaguccuggagagacagggaggaaagugucgguaacuucucacaacggaagggucauaucuucaugggaaucauauaaaagcggaggugagaccaagcuguga

SEQ ID NO: 62946 - RNA, 1575 nt, Artificial Sequence
  derived and/or modified CDS sequence (wt) from glycoprotein__RABV__EU267765.1
augauuccucaaguucuuuuguuuguuccccuucuaguuuucucgucauguuuuuggaaauuccccauuuacacgauaccagacaaacuugguccauggagucccaucgauauacaucaucucaguuguccgagcaaucugguuguggaagaugaaggaugcaccaaucuguuuggauuuuccuacauggaacucaaagugggauauauuucagccauaaaagugaacggauucaccuguacagguguggugacagaagcagaaaccuacacuaacuuuguugguuaugucacaaccacguuuaagagaaagcacuuucgcccuaugccggaugcgugcagagccgcauacaacuggaagauggcuggugaccccagguaugaagagucucugcacaauccguacccugacuaccacuggcuccgaacugucaagaccaccaaggagucccuugucaucauaucuccgagcguugcagauuuggacccguacgauaagucccuucacucgagaguuuuuccuggcggaaaaugcucaggaauaaccguguccuccacuugcugcucuacuaaccacgacuacaccaucuggaugccugaaaacccuagacugggaacuucgugugacauuuucaccaauaguagagggaagagggcaucaaaagggggcaagacuuguggauuuguggaugaaagaggcuuguacaagucucuaaagggagcaugcaagcugaagcuaugugggguucuaggacuuagacuuauggacggaacaugggucgcaauucagacgucagaugagaucaaauggugcucuccugaucagcuaguaaaucuacacgacuuucacucggaugagauugaacaucuuguuguggaggaguuggucaaaaagagagaagagugucuggacgcacuggagacuauuaugaccacaaaguccgugaguuucagacgucuuagucauuugaggaagcuagucccuggguuuggaaaggcguauaccauauucaacaaaaccuugauggaggcugaugcucacuauaaaucaauccggacuuggaaugaaaucauccccucuaaaggguguuuaagaguuggggggagaugucauccucaugugaacgggguguucuucaacggcauuauacuggguccugacggacauguucuaaucccagagaugcaaucgucccuccuccaccagcauauggaauuguuggaguccucagucaucccuuugaugcaucccuuagcagacccgucaacagucuuuaaagacggcgacgaggcagaggacuuuguugagguucaccuuccagaugugcacaagcagauuucggggguugaucuaggucucccaaacugggggaaguaugugcugauaagugcaggugcucugacugcauuaaugucgaugauuuucuuaaugacguguugcagaaagacuauuagagcagagucaauacaacacaguccuggagagacagggaggaaagugucgguaacuucucacaacggaagggucauaucuucaugggaaucauauaaaagcggaggugagaccaagcuguga

SEQ ID NO: 62947 - RNA, 1575 nt, Artificial Sequence
  derived and/or modified CDS sequence (wt) from glycoprotein__RABV__EU267766.1
augauuccucaaguucuuuuguuuguuccccuucuaguuuucucgucguguuuugggaaauuccccauuuacacgauaccagacaaacuugguccauggagucccaucgauauacaucaucucagcuguccgaacaaucugguuguggaagaugacggaugcaccaaucugucuggacuuuccuacauggaacucaaagugggauauauuucagccauaaaagugaacggauucaccuguacagguguggugacagaagcagaaaccuacacuaacuuuguugguuaugucacaaccacguuuaagagaaagcacuuucgcccuaugccggaugcgugcagagccgcauacaacuggaagauagcuggugaccccagguaugaagagucucugcacaauccguacccugacuaccacuggcuccgaacugucaagaccaccaaggaguccccugucaucauaucuccgagcguugcagauuuggacccguacgauaagucccuucacucgagaguuuuuccuggcggaaaaugcucaggaauaaccguguccuccacuugcugcucuacuaaccacgacuacaccaucuggaugccugaaaacccuagacugggaacuucgugugacauuuucaccaauaguagagggaaaagggcaucaaaagggggcaagacuuguggauuuguggaugaaagaggcuuguacaagucucuaaagggagcaugcaagcugaagcuaugugggguucuaggacuuaaacuuauggacggaacaugggucgcaauucagacgucagaugagaucaaauggugcucuccugaucagcuaguaaaucuacacgacuuucacucggaugagauugaacaucuuguuguggaggaguuggucaaaaagagagaagagugucuggacgcacuggagacuauuaugaccacaaaguccgugaguuucagacgucuuagucauuugaggaagcuagucccuggguuuggaaaggcguauaccauauucaacaaaaccuugauggaggcugaugcucacuauaaaucaauccggacuuggaaugaaaucauccccucuaaaggguguuuaagaguuggggggagaugucauccucaugugaacgggguguucuucaacggcauuauacuggguccugacggacauguucuaaucccagagaugcaaucgucccuccuccaccagcauauggaauuguuggaguccucagucaucccuuugaugcaucccuuagcagacccgucaacagucuuuaaagacggcgacgaggcagaggacuuuguugagguucaccuuccagaugugcacaagcagauuucggggguugaucuuggucucccaaacugggggaaguaugugcugauaagugcaggugcucugacugcauugaugucgaugauuuucuuaaugacguguugcagaaagacuaauagagcagagucaauacaacacaguccuggagagacagggaggaaagugucgguaacuucucacaacggaagggucauaucuucaugggaaucauauaaaagcggaggugagaccaagcuguga

SEQ ID NO: 62948 - RNA, 1575 nt, Artificial Sequence
  derived and/or modified CDS sequence (wt) from glycoprotein__RABV__EU267767.1
augacuccucaaguucuuuuguuuguuccccuucuaguuuucucgucguguuuugggagauuccccauuuacacgauaccagacaaacuugguccauggagucccaucgauauacaucaucucagcuguccgaacaaucugguuguggaagaugaaggaugcaccaaucugucuggauuuuccugcauggaacucaaagugggauauauuucagccauaaaagugaacggauucaccuguacagguguggugacagaagcagaaaccuacacuaacuuuguugguuaugucacaaccacguuuaagagaaagcacuuucgcccuaugccggaugcgugcagagccgcauacaacuggaagauggcuggugaccccagguaugaagagucucugcacaauccguacccugacuaccacuggcuccgaacugucaagaccaccaaggagucccuugucaucauaucuccgagcguugcagauuuggacccguacgauaagucccuucacucgagaguuuuuccuggcggaaaaugcucaggaauaaccguguccucuacucgcugcucuacuaaccacgacuacaccaucuggaugccugaaaacccuagacugggaacuucgugugacauuuucaccaauaguagagggaaaagggcaucaaaagggggcaagacuuguggauuuguggaugaaagaggcuuguacaagucucuaaagggagcaugcaagcugaagcuaugugggguucuagaacuuagacuuauggacggaacaugggccgcaauucagacgucagaugagaucaaauggugcucuccugaucagcuaguaaaucuacacgacuuucacucggaugagauugaucaucuuguuguggaggaguuggucaaaaagagagaagagugucuggacgcacuggagacuauuaugaccacaaaguccgugaguuucagacgucuuagucauuugaggaagcuagucccuggguuuggaaaggcguauaccauauucaacaaaaccuugauggaggcugaugcucacuauaaaucaauccggacuuggaaugaaaucauccccucuaaaggguguuuaagaguuggggggagaugucauccucaugugaacgggguguucuucaacggcauuauacuggguccugacggacauguucuaaucccagagaugcaaucgucccuccuccaccagcauauggaauuguuggaguccucagucaucccuuugaugcaucccuuagcaggcccgucaacagucuuuaaagacggcgacgaggcagaggacuuuguugagguucaccuuccagaugugcacaagcaaauuucggggguugaucuuggucucccaaacugggggaaguaugugcugauaagugcaggugcucugacugcauugaugucgaugauuuucuuaaugacguguugcagaaagacuaauagagcagagucaauacaacacaguccuggagagacagggaggaaagugucgguaacuucucacaacggaagggucauaucuucaugggaaucauauaaaagcggaggugagaccaagcuguga

SEQ ID NO: 62949 - RNA, 1575 nt, Artificial Sequence
  derived and/or modified CDS sequence (wt) from glycoprotein__RABV__EU267768.1
augauuccccaaguucuuuuguuuguuccccuucuaguuuucucgucguguuuugggaaauuccccauuuacacgauaccagacaaacuugguccauggagucccaucgauauacaucaucucagcuguccgaacaaucugguuguggaagaugaaggaugcaccaaucugucuggauuuuccuacauggaacuuaaagugggauauauuucagccauaaaagugagcggauucaccuguacagguguggugacagaagcagaaaccuacacuaacuuuguugguuaugucacaaccacguuuaagagaaagcacuuucgcccuaugccggaugcgugcagagccgcauauaacuggaagauggcuggugaccccagguaugaagagucucugcacaauccguacccugacuaccacuggcuccgaacugucaagaccaccaaggagucccuugucaucauaucuccgagcguugcagauuuggacccguacgauaagucccuucacucgagaguuuuuccuggcggaaaaugcucaggaauaaccguguccuccacuugcugcucuacuaaccacgacuacaccaucuggaugccugaaaacccuagacugggaacuucgugugacauuuucaccaauaguagagggaagagggcaucaaaagggggcaagacuuguggauuuguggaugaaagaggcuuguacaagucucuaaagggagcaugcaagcugaagcugugugggguucuaggacuuagacuuauggacggaacauggguugcaauucagacgucagaugagaucaaauggugcucucccgaucagcuaguaaaucuacacgacuuucacucggaugagauugaacaucuuguuguggaggagcuggucaaaaagagagaagagugucuggacgcacuggagacuguuaugaccacaaaguccgugaguuucagacgucuuagucauuugaggaagcuagucccuggguuuggaaaggcguauaccauauucaacaaaaccuugauggaggcugaugcucacuauaaaucaauccggacuuggaaugaaaucauccccucuaaaggguguuuaagaguuggggggagaugucauccucaugugaacgggguguucuucgacggcauuauacuggguccugacggacguguucuaaucccagagaugcaaucgucccuccuccaccagcauauggaauuguuggaguccucagucaucccuuugaugcaucccuuagcagacccgucaacagucuuuaaagacggcgacgaggcagaggacuuuguugagguucaccuuccagaugugcacaagcugauuucggggguugaucuuggucucccaaacugggggaaguaugugcugauaagugcaggugcucugacugcauuaaugucgaugauuuucuuaaugacguguugcagaaagacuaauagagcagagucaauacaacacaguccuggagagacagggaggaaagugucgguaacuucucacaacggaagggucauaucuucaugggaaucauauaaaagcggaggugagaccaagcuguga

SEQ ID NO: 62950 - RNA, 1575 nt, Artificial Sequence
  derived and/or modified CDS sequence (wt) from glycoprotein__RABV__EU267769.1
augauuccucagguucuuuuguuuguuccccuucuaguguucucgucguguuuugggaaauuccccauuuacacgauaccagacaaacuugguccauggagucccaucgauauacaucaucucagcuguccgaacaauaugguuguggaagaugaaggaugcaccaaucugucuggauuuuccuacauggaacucaaagugggauauauuucagccauaaaagugaacggguucaccuguacagguguggugacagaagcagaaaccuacacuaacuuuguugguuaugucaccaccacguuuaagagaaagcacuuucgcccuaugccggaugcaugcagagccgcauacaacuggaagauggcuggugaccccagguaugaggagucucugcacaauccguacccugacuaccacuggcuccgcacugucaagaccaccaaggagucccuugucaucauaucuccgagcguugcagauuuggacccguacgauaaaucccuucacucgagaguuuuuccuggcggaaaaugcucaggaauaaccgcguccuccacuugcugcucuacuaaccacgacuacaccaucuggaugccugaaaauccuagacugggaacuucgugugauauuuucaccaauaguagagggaagagggcaucaaaagggggcaagacuuguggauuuguggguggaagaggcuuguacaagucucuaaagggagcaugcaagcugaagcugugugggguucuaggacuuagacuuauggacggaacaugggucgcaauucagacaucagaugggaucaaauggugcucuccugaucagcuaguaaaucuacaugacuuucacucggaugagauugaacaucuuguuguggaggaguuggucaaaaagagggaagagugucuggacgcacuggugacuauuaugaccacaaaguccgugaguuucagacgucuuagucauuugaggaagcuagucccuggguuuggaaaggcguauaccauauucaacaaaaccuugauggaggcugaugcucacuauaagucaauccggacuuggaaugaaaucauccccucuaaaggguguuuaagaguuggggggagaugucauccucaugugaacgggguguucuucaacggcauuauacuggguccugacggacauguucuaaucccagagaugcaaucgucccuccuccaccagcauauggaauuguuggaguccucagucaucccuuugaugcaucccuuagcagacccgucaacagucuuuaaggacggcgacgaggcagaggacuuuguugagguucaccuuccggaugugcacaagcagaucucggggguugaucuuggucucccaaacugggggaaguaugugcugauaagugcaggugcucugacugcauuaauguugacgauuuucuuaaugacguguugcagaaagacuaguagagcagagucgauacaacacaguccuggagagacagggaggaaagugucgguaacuucucacaacggaagggucauaucuucaugggaaucauauaaaagcggaggugagaccaagcuguga

SEQ ID NO: 62951 - RNA, 1575 nt, Artificial Sequence
  derived and/or modified CDS sequence (wt) from glycoprotein__RABV__EU267770.1
augauuccucagguucuuuuguuuguuccccuucuaguguucucgucguguuuugggaaauuccccauuuacacgauaccagacaaacuugguccauggagucccaucgauauacaucaucucagcuguccgaacaauaugguuguggaagaugaaggaugcaccaaucugucuggauuuuccuacauggaacucaaagugggauauauuucagccauaaaagugaacggguucaccuguacagguguggugacagaagcagaaaccuacacuaacuuuguugguuaugucaccaccacguuuaagagaaagcacuuucgcccuaugccggaugcaugcagagccgcauacaacuggaagauggcuggugaccccagguaugaggagucucugcacaauccguacccugacuaccacuggcuccgcacugucaagaccaccaaggagucccuugucaucauaucuccgagcguugcagauuuggacccguacgauaaaucccuucacucgagaguuuuuccuggcggaaaaugcucaggaauaaccguguccuccacuugcugcucuacuaaccacgacuacaccaucuggaugccugaaaauccuagacugggaacuucgugugacauuuucaccaauaguagagggaagagggcaucaaaagggggcaagacuuguggauuuguggaugaaagaggcuuguacaagucucuaaagggagcaugcaagcugaagcugugugggguucuaggacuuagacuuauggacggaacaugggucgcaauucagacaucagaugagaucaaauggugcucuccugaucagcuaguaaaucuacaugacuuucacucggaugagauugaacaucuuguuguggaggaguuggucaaaaagagggaagagugucuggacgcacuggagacuauuaugaccacaaaguccgugaguuucagacgucuuaaccauuugaggaagcuagucccuggguuuggaaaggcguauaccauauucaacaaaaccuugauggaggcugaugcucacuauaagucaauccggacuuggaaugaaaucauccccucuaaaggguguuuaagaguuggggggagaugucauccucaugugaacgggguguucuucaacggcauuauacuggguccugacggacauguucuaaucccagagaugcaaucgucccuccuccaccagcauauggaauuguuggaguccucagucaucccuuugaugcaucccuuagcagacccgucaacagucuuuaaggacggcgacgaggcagaggacuuuguugagguucaccuuccggaugugcacaagcagaucucggggguugaucuuggucucccaaacugggggaaguaugugcugauaagugcaggugcucugacugcauuaauguugacgauuuucuuaaugacguguugcagaaagacuaguagagcagagucgauacaacacaguccuggagagacagggaggaaagugucgguaacuucucacaacggaagggucauaucuucaugggaaucauauaaaagcggaggugagaccaagcuguga

SEQ ID NO: 62952 - RNA, 1575 nt, Artificial Sequence
  derived and/or modified CDS sequence (wt) from glycoprotein__RABV__EU267771.1
augauuccucagguucuuuuguuuguuccccuucuaguguucucaucguguuuugggaaauuccccauuuacacgauaccagacaaacuugguccauggagucccaucgauauacaucaucucagcuguccgaacaauaugguuguggaagaugaaggaugcaccaaucugucuggauuuuccuacauggaacucaaagugggauauauuucagccauaaaagugagcggguucaccuguacagguguggugacagaagcagaaaccuacacuaacuuuguugguuaugucaccaccacguuuaagagaaagcacuuucgcccuaugccggaugcgugcagagccgcauacaacuggaagauggcuggugaccccagguaugaggagucucugcacaauccgcacccugacuaccacuggcuccgcacugucaagaccaccaaggagucccuugucaucauaucuccgagcguugcagauuuggacccguacgauaaaucccuucacucgagaguuuuuccuggcggaaaaugcucaggaauaaccguguccuccacuugcugcucuacuaaccacgacuacaccaucuggaugccugaaaauccuagacugggaacuucgugugacauuuucaccaauaguagagggaagagggcaucaaaagggggcaagacuuguggauuuguggaugaaagaggcuuguacaagucucuaaagggagcaugcaagcugaagcugugugggguucuaggacuuagacuuauggacggaacaugggucgcaauucagacaucagaugagaucaaauggugcucuccugaucagcuaguaaaucuacaugacuuucacucggaugggauugaacaucuuguuguggaggaguuggucaaaaagagggaagagugucuggacgcacuggagacuauuaugaccacaaaguccgugaguuucagacgucuuagucauuugaggaagcuagucccuggguuuggaaaggcguauaccauauucaacaaaaccuugauggaggcugaugcucacuauaagucaauccggacuuggaaugaaaucauccccucuaaaggguguuuaagaguuggggggagaugucauccucaugugaacgggguguucuucaacggcauuauacuggguccugacggacauguucuaaucccagagaugcaaucgucccuccuccaccagcauauggaauuguuggaguccucagucaucccuuugaugcaucccuuagcagacccgucaacagucuuuaaggacggcgacgaggcagaggacuuuguugagguucaccuuccggaugugcacaagcagaucucggggguugaucuuggucucccaaacugggggaaguaugugcugauaagugcaggugcucugacugcauuaauguugacgauuuucuuaaugacguguugcagaaagacuaguagagcagagucgauacaacacaguccuggagagacagggaggaaagugucgguaacuucucacagcggaagggucauaucuucaugggaaucauauaaaagcggaggugagaccaagcuguga

SEQ ID NO: 62953 - RNA, 1575 nt, Artificial Sequence
  derived and/or modified CDS sequence (wt) from glycoprotein__RABV__EU267772.1
augguuccucaggcucuccuguuuguaccccuucugguuuuuccauuguguuuugggaaauucccuauuuacacgauaccagacaagcuuggucccuggagcccgauugacauacaucaccucagcugcccaaacaauuugguaguggaggacgaaggaugcaccaaccugucaggguucuccuacauggaacuuaaaguuggauacaucuuagccauaaaaaugaacggguucacuugcacaggcguugugacggaggcugaaaccuacacuaacuucguugguuaugucacaaccacguucaaaagaaagcauuuccgcccaacaccagaugcauguagagccgcguacaacuggaagauggccggugaccccagauaugaagagucucuacacaauccguacccugacuaccgcuggcuucgaacuguaaaaaccaccaaggagucucucguuaucauaucuccaaguguggcagauuuggacccauaugacagaucccuucacucgagggucuucccuagcgggaagugcucaggaguagcggugucuucuaccuacugcuccacuaaccacgauuacaccauuuggaugcccgagaauccgagacuagggaugucuugugacauuuuuaccaauaguagagggaagagagcauccaaagggagugagacuugcggcuuuguagaugaaagaggccuauauaagucuuuaaaaggagcaugcaaacucaaguuauguggaguucuaggacuuagacuuauggauggaacaugggucgcgaugcaaacaucaaaugaaaccaaauggugcccucccgaucaguuggugaaccuguacgacuuucgcucagacgaaauugagcaccuuguuguagaggaguuggucaggaagagagaggagugucuggaugcacuagaguccaucaugacaaccaagucagugaguuucagacgucucagucauuuaagaaaacuugucccuggguuuggaaaagcauauaccauauucaacaagaccuugauggaagccgaugcucacuacaagucagucagaacuuggaaugagauccucccuucaaaaggguguuuaagaguuggggggaggugucauccucaugugaacgggguguuuuucaaugguauaauauuaggaccugacggcaaugucuuaaucccagagaugcaaucaucccuccuccagcaacauauggaguuguuggaauccucgguuaucccccuugugcacccccuggcagacccgucuaccguuuucaaggacggugacgaggcugaggauuuuguugaaguucaccuucccgaugugcacaaucaggucucaggaguugacuugggucucccgaacugggggaaguauguauuacugagugcaggggcccugacugccuugauguugauaauuuuccugaugacauguuguagaagagucaaucgaucagaaccuacgcaacacaaucucagagggacagggagggaggugucagucacuccccaaagcgggaagaucauaucuucaugggaaucacacaagagugggggugagaccagacuguga

SEQ ID NO: 62954 - RNA, 1575 nt, Artificial Sequence
  derived and/or modified CDS sequence (wt) from glycoprotein__RABV__EU267773.1
augauuccucaaguucuuuuguuuguuccccuucuaguuuucucgucguguuuugggaaauuccccauuuacacgauaccagacaaacuugguccauggagucccaucgauauacaucaucucagcuguccgaacaaucugguuguggaagaugaaggaugcaccaaucugucuggauuuuccuacauggaacucaaagugggauauauuucagccauaaaagugaacggauucaccuguacagguguggugaccgaagcagaaaccuacacuaacuuuguugguuaugucaccaccacguuuaagagaaagcacuuucgcccuaugccggaugcgugcagagccgcauacaacuggaagauggcuggugaccccagguaugaagagucucugcacaauccguaccccgacuaccacuggcuccgaacugucaagaccaccaaggagucccuugucaucauaucuccgagcguugcagauuuggacccguacgauaaaucccuucacucgagaguuuuuccuggcggaaaaugcucaggaauagccguguccuccacuugcugcucuacuaaccacgacuacaccaucuggaugccugaaaauccuagacugggaacuucaugugacauuuucaccaauaguagagggaagagggcaucaaaagggggcaagacuuguggauuuguggaugaaagaggcuuguacaagucucuaaagggagcaugcaagcugaagcuaugugggguucuaggacuuagacuuauggacggaacaugggucgcgauucagacaucagaugagaucaaauggugcucuccuguucagcuaguaaaucuacacgacuuucacucggaugagauugaacaucuugucguggaggaguuggucaaaaagagggaagagugucuggacguacuggagacuauuaugaccacaaaguccgugaguuucagacgucuuagucauuugaggaagcuagucccuggguuuggaaaggcguauacuauauucaacaaaaccuugauggaggcugaugcucacuacaaaucaauccggacuuggaauaaaaucauccccuccaaaggguguuuaagaguuggggggagaugucauccucaugugaacgggguguucuucaacggcauuauacuggguccugacggacauguucuaaucccagagaugcagucgucccuccuccaccagcauauggaauuguuggaguccucagucaucccuuugaugcaucccuuagcagacccgucaacagucuuuaaagacggcgacgaggcagaggacuuuguugagguucaccuuccggaugugcacaagcagaucucggggguugaucuuggucucccaaacugggggaaguaugugcugauaagugcaggugcucugacugcauuaauguugacgauuuucuuaaugacguguugcagaaagacuaauagagcagagucaauacaacacaguccuggagagacagggaggaaagugucggugacuucucacaacggaagggucauaucuucaugggaaucauauaaaagcggaagugagaccaagcuguga

SEQ ID NO: 62955 - RNA, 1575 nt, Artificial Sequence
  derived and/or modified CDS sequence (wt) from glycoprotein__RABV__EU267774.1
augauuccccaaguucuuuuguuuguuccccuucuaguuuucucgucguguuuugggaaauuccccauuuacacgauaccagacaaacuugguccauggagucccaccgauauacaucaucucagcuguccgaacaaucugguuguggaagaugaaggaugcaccaaucugucuggauuuuccuacauggaacuuaaagugggauauauuucagccauaaaagugaacggauucaccuguacagguguggugacagaagcagaaaccuacacuaacuuuguugguuaugucacaaccacguuuaagagaaagcacuuucgcccuaugccggaugcgugcagagccgcauauaacuggaagauggcuggugaccccagguaugaagagucucugcacaauccguacccugacuaccacuggcuccgaacugucaagaccaccaaggagucccuugucaucauaucuccgagcguugcagauuuggacccguacgauaagucccuucacucgagaguuuuuccuggcggaaaaugcucaggaauaaccguguccuccacuugcugcucuacuaaccacgacuacaccaucuggaugccugaaaacccuagacugggaacuucgugugacauuuucaccaauaguagagggaagagggcaucaaaagggggcaagacuuguggauuuguggaugaaagaggcuuguacaagucucuaaagggagcaugcaagcugaagcugugugggguucuaggacuuagacuuauggacggaacauggguugcaauucagacgucagaugagaucaaauggugcucuccugaucagcuaguaaaucuacacgacuuucacucggaugagauugaacaucuuguuguggaggagcuggucaaaaagagagaggagugucuggacgcacuggagacuauuaugaccacaagguccgugaguuucagacgucuuagucauuugaggaagcuagucccuggguuuggaaaggcguauaccauauucaacaaaaccuugauggaggcugaugcucacuauaaaucaauccggacuuggaaugaaaucauccccucuaaaggguguuuaagaguuggggggagaugucauccucaugugaacgggguguucuucaacggcauuauacuggguccugacggacauguucuaaucccagagaugcaaucgucccuccuccaccagcauauggaauuguuggaguccucagucaucccuuugaugcaucccuuagcagacccgucaacggucuuuaaagacggcggcgaggcagaggacuuuguugagguucaccuuccagaugugcacaagcagauuucggggguugaucuuggucucccaaacugggggaaguaugugcugauaagugcaggugcucugacugcauuaaugucgaugauuuucuuaaugacguguugcagaaagacuaauagagcagagucaauacaacacaguccuggagagacagggaggaaagugucgguaacuucucacaacggaagggucauaucuucaugggaaucauauaaaagcggaggugagaccaagcuguga

SEQ ID NO: 62956 - RNA, 1575 nt, Artificial Sequence
  derived and/or modified CDS sequence (wt) from glycoprotein__RABV__EU267775.1
augauuccucaaguucuuuuguuuguuccccuucuaguuuucucgucguguuucaggaaauuccccauuuacacgauaccagacaaacuugguccauggagucccaucgauauacaucaccucagcugucugaacaaucugguuguggaagaugaaggaugcaccaaucugucuggauuuuccuacauggaacucaaagugggauauauuucagccauaaaagugaacggauucaccuguacagguguggugaccgaagcagaaaccuacacuaacuuuguugguuaugucaccaccacguuuaagagaaagcacuuucgcccuaugccggaugcgugcagagccgcauacaacuggaagauggcuggugaccccagguaugaagagucucugcacaauccguaccccgacuaccacuggcuccgaacugucaagaccaccaaggagucccuugucaucauaucuccgagcguugcagauuuggacccguacgauaaaucccuucacucgagaguuuuuccuagcggaaaaugcucaggaauaaccguguccuccacuugcugcucuacuaaccacgacuacaccaucuggaugccugaaaauccuagacugggaacuucaugugacauuuucaccaauaguagagggaagagggccucaaaagggggcaagacuuguggauuuguggaugaaagaggcuuguacaagucucugaggggagcaugcaagcugaagcuaugugggguucuaggacuuagacuuauggacggaacaugggucgcaauucagacaucagaugagaucaaauggugcucuccugaucagcuaguaaaucuacacgacuuucacucggaugagaucgaacaucuuguuguggaggaguuggucaaaaagagggaagagugucuggacgcacuggagacuaucaugaccacaaaguccgugaguuucagacgucuuagucauuugaggaagcuagucccuggguuuggaaaggcguauaccauauucaacaagaccuugauggaggcugaugcucaccauaaaucaauccggacuuggaaugaaaucauccccuccaaaggguguuuaagaguuggggggagaugucauccucaugugaacgggguguucuccaacggcauuauacuggguccugacggacauguucucaucccagagaugcagucgucccuccuccaccagcauauggaauuguuggaguccucagucaucccuuugaugcaucccuuagcagacccgucaacagucuuuaaagacagcgacgaggcagaggacuuuguugagguucaccuuccggaugugcacaagcagaucucggggguugaucuuggucucccaaacugggggaaguaugugcugauaagugcaggugcucugacugcauuaauguugaugauuuucuuaaugacguguugcagaaagacuaauagagcagagucaauacaacacaguccuggagagacagggaggaaagugucggugacuucucacaacggaagggucauaucuucaugggaaucauauaaaagcggaagugagaccaagcuguga

SEQ ID NO: 62957 - RNA, 1575 nt, Artificial Sequence
  derived and/or modified CDS sequence (wt) from glycoprotein__RABV__EU267776.1
augauuccucaaguucuuuuguuuguuccccuucuaguuuucucgucguguuucgggaaauuccccauuuacacgauaccagacaaacuugguccauggagucccaucgauauacaucaccucagcuguccgaacaaucugguuguggaagaugaaggaugcaccaaucugucuggauuuuccuacauggaacucaaagugggauauauuucagccauaaaagugaacggauucaccuguacagguguggugaccgaagcagaaaccuacacuaacuuuguugguuaugucaccaccacguuuaagagaaagcacuuucgcccuaugccggaugcgugcagagccgcauacaacuggaagauggcuggugaccccagguaugaagagucucugcacaauccguaccccgacuaccacuggcuccgaacugucaagaccaccaaggagucccuugucaucauaucuccgagcguugcagauuuggacccguacgauaaaucccuucacucgagaguuuuuccuagcggaaaaugcucaggaauaaccguguccuccacuugcugcucuacuaaccacgacuacaccaucuggaugccugaaaauccuagacugggaacuucaugugacauuuucaccaauaguagagggaagagggccucaaaagggggcaagacuuguggauuuguggaugaaagaggcuuguacaagucucugaggggagcaugcaagcugaagcuaugugggguucuaggacuuagacuuauggacggaacaugggucgcaauucagacaucagaugagaucaaauggugcucuccugaucagcuaguaaaucuacacgacuuucacucggaugagaucgaacaucuuguuguggaggaguuggucaaaaagagggaagagugucuggacgcacuggagacuaucaugaccacaaaguccgugaguuucagacgucuuagucauuugaggaagcuagucccuggguuuggaaaggcguauaccauauucaacaagaccuugauggaggcugaugcucacuauaaaucaauccggacuuggaaugaaaucauccccuccaaaggguguuuaagaguuggggggagaugucauccucaugugaacgggguguucuucaacggcauuauacuggguccugacggacauguucucaucccagagaugcagucgucccuccuccaccagcauauggaauuguuggaguccucagucaucccuuugaugcaucccuuagcagacccgucaacagucuuuaaagacggcgacgaggcagaggacuuuguugagguucaccuuccggaugugcacaagcagaucucggggguugaucuuggucucccaaacugggggaaguaugugcugauaagugcaggugcucugacugcauuaauguugaugauuuucuuaaugacgugucgcagaaagacuaauagagcagagucaauacaacacaguccuggagagacagggaggaaagugucggugacuucucacaacggaagggucauaucuucaugggaaucauauaaaagcggaagugagaccaagcuguga

SEQ ID NO: 62958 - RNA, 1575 nt, Artificial Sequence
  derived and/or modified CDS sequence (wt) from glycoprotein__RABV__EU275240.1
augauuccucaagcucuuuuguuuguuccccuucuaguuuucucgucauguuucgggaaauuccccauuuacacgauaccagacaaacuugguccauggagucccaucgauauacaucaucucagcuguccgaacaaucuuguuguggaagaugaagggugcaccaaucugucuggauuuuccuacauggaacucaaagugggauauauuucagccauaaaagugaacggauucaccuguacagguguggugacagaagcagaaaccuacacaaacuuuguugguuaugucaccaccacguuuaagagaaagcacuuucgcccuaugccggaugcgugcagagccgcauacaacuggaagauggcuggugaccccagguaugaagagucucugcacaauccguacccugacuaccacuggcuccgaacugucaagaccaccaaggagucccuugucaucauaucuccgagcguugcagauuuggacccguacgauaaaucccuucacucgagaguuuuuccugacggaaaaugcucaggaauaaccguguccuccacuugcugcucuacuaaccacgacuacaccaucuggaugccugaaaauccuagacugggaacuucgugugacauuuucaccaauaguagagggaagagggcaucaaaagggggcaagacuuguggauuuguggaugaaagaggcuuguacaagucucuaaagggagcaugcaagcugaagcuaugugggguucuaggacuuagacuuauggacggaacauggguugcaauucagacaucagaugagaucaaauggugcucuccugaucagcuaguaaaucuacacgacuuucacucggaugagauugaacaucuuguuguggaggaguuggucaaaaagagggaagagugucuggacgcacuggagacuauuaugaccacaaaguccgugaguuucagacgucuuagucauuugaggaagcuagucccuggguuuggaaaggcguauaccauauucaacaaaaccuugauggaggcugaugcucacuauaaaucaauccggacuuggaaugaaaucauccccucuaaaggguguuuaagaguuggggggagaugucauccucaugugaacgggguguucuucaacggcauuauacuggguccugacggacauguucuaaucccagagaugcaaucgucccuccuccaccagcauauggaauuguuggaguccucagucaucccguugaugcaucccuuagcagacccgucaacagucuuuaaggacggcgacgaggcagaggacuuuguugagguucaccuuccggaugugcacaagcagaucucggggguugaucuuggucucccaaacugggggaaguaugugcugauaagugcaggugcucugacugcauuaauguugaugauuuucuuaaugacguguugcagaaaggccaauagagcagagucaauacaacacaauccuggagagacagggaggaaagugucgguaacuucucacaacggaagggucauaucuucaugggaaucauauaaaagcggaagugagaccaagcuguaa

SEQ ID NO: 62959 - RNA, 1575 nt, Artificial Sequence
  derived and/or modified CDS sequence (wt) from glycoprotein__RABV__EU275241.1
augauuccucaagcucuuuuguuuguuccccuucuaguuuucucgucgcguuuugggaaauuccccauuuacacgauaccagacaaacuugguccauggagucccaucgauauacaucaucucagcuguccgaacuaucugguuguggaagaugaaggaugcaccaaucugucuggauuuuccuacauggaacucaaagugggauauauuucagccauaaaagugaacggauucaccuguacagguguggugacagaagcagaaaccuacacgaacuuuguugguuaugucaccaccacuuuuaagagaaagcacuuucgcccuacgccagaugcgugcagagccgcguacaacuggaagauggcuggugaccccagguaugaagagucucugcacaauccguacccugauuaucacuggcuccgaacugucaagaccuccaaggagucccuugucaucauaucuccgagcguugcagauuuggacccguacgauaaaccccuucacucgagaguuuuuccuggcggaaaaugcucuggaauaaccguguccuccacuugcugcucuacuaaccacgacuacaccaucuggaugccugaaaaucccagacugagaacuucgugugacauuuucaccaauaguagagggaagagggcaucaaaagggggcaagacuuguggauuuguggaugaaagaggcuuguacaagucucuaaagggagcaugcaagcugaagcuaugugggguucuaggacuuagacuuauggacggaacaugggucgcaauucagacaucagaugagaucaaauggugcucuccugaucagcuaguaaaucuacacgacuuucacucagaugagauugaacaucuuguuguggaggaguuggucaaaaagagggaagagugucuggacgcacuggagacuauuaugaccacaaaguccgugaguuucaggcgucuuagucauuugaggaagcuagucccuggguuuggaaaggcguauaccauauucaacaaaaccuugauggaggcugaugcucacuauaaaucaauccggacuuggaaugaaaucauccccucuaaaggguguuuaagaguuggggggagaugucauccucaugugaacgggguguucuucaacggcauuauacuggguccugacgggcauguucuaaucccagagaugcaaucgucccuccuccaccagcauauggaauuguuggaguccucagucaucccuuugaugcaucccuuagcagacccgucaacaguuuuuaaagacggcgacgaggcagaggacuuuguugagguucaccuuccggaugugcacaagcagaucucggggguugaucuuggucucccaaacugggggaaguacgugcugguaagugcaggugcucugacugcauuaauguugaugauuuucuuaaugacguguugcagaaagacuaauagagcagagucaauacaacacaguccuggagagacagggaggaaagugucgguaacuucucacaacggaagggucauaucuucaugggaaucauauaaaaguggaagugagaccaagcuguaa

SEQ ID NO: 62960 - RNA, 1575 nt, Artificial Sequence
  derived and/or modified CDS sequence (wt) from glycoprotein__RABV__EU275242.1
augacuccucaagcucuuuuguucguaccccuuuugguuuucucauuguguuucgggaaauuccccaucuacacgauaccagacaaacuuggccccuggaguccuauugauauacaucaucucaguugcccuaacaauuuaguuguggaggaugaggggugcaccaaccugccaggauucuccuacauggaacucaaaguaggguacauuucagccauaaaagugaacggguucacuugcacggguguugugacagaagcagagaccuacacaaacuuugucggcuacgucaccaccacguuuaagagaaagcacuuccgcccgacaccagaugccugcagagcggcauacaacuggaagauggcaggugaccccagauaugaggagucucugcauaauccguauccggauuaucacuggcuucggacuguaaagaccaccaaggagucgcucguuaucauaucuccaagugugucggacuuaggcccguacgacaaaucucuucauuccagaguuuuucccagugguaaaugcucaggaauaacagugucuucuaccuauugucccacuaaccaugauuauaccaucuggaugccugaaaauccgagacuagggaccucuugugacauuuucaccaauagcagagggaagagggcauccaaaggaagcaaaaccuguggauuuguggacgaaagaggcuuguacaagucuuuaaaaggagcaugcaaauugaagcuauguggaguucuuggacuuagacuuauggacggaacaugggcugcgauucaaacaucagaugaggccaaauggugccccccugaucaguuagugaauauacaugacuuucgcucggaugagaucgaacaucuuguuguggaggaguuagugaagaaaagggaagagugucuagaugcacuggagucuaucaugaccaccaaguccguaaguuuuagacgucucagucacuugaggaagcucguccccggguuuggaaaagcauauaccauauucaacaagaccuugauggaggcugaugcucacuacaaaucaguccguacauggaaugagaucaucccuuccaaagggugcuuaagaguuggggggagaugucacccccaugcuaacgggguguuuuucaacgguaucauccuggguccggauggacauguucuaaucccagaaaugcagucgucucuccuucaacagcauauggaguuguuggaauccucgguaaucccgcuaaugcaccccuuggcagauccuucaacgguuuuuaaggauggugacgaggcggaagauuuuguugagguucaccuuccggaugugcacaagcaggucucgggaguugaucucggucucccaagcugggggaaguaugugcugaugaguguaggcgcucugauugcacugauguugaugauuuucuuggcgacguguugcagaaaggcgaauggagcagaaucaauacaacaccgucuuggagagacgggaaggaaagugucagucaccucccagaacgggagggucauaucuuccugggagucguauaaaagcggaggugagaccaagcuguaa

SEQ ID NO: 62961 - RNA, 1575 nt, Artificial Sequence
  derived and/or modified CDS sequence (wt) from glycoprotein__RABV__EU293111.1
augauuccucaggcucuuuuguuuuuaccccuuuugguuuucucauuguguuccgggaaguuccccaucuacacaauaccagacaaacuuggcccuuggaguccuauugauauacaucaucucaguugcccuaacaaucuaguuguggaggaugaggggugcaccaaccugucaggauucuccuacauggaacucaaaguaggguacauuucagccauaaaagugaacggguucacuugcacggguguggugacagaagcagagaccuacacaaacuuuguuggcuaugucaccaccacguuuaagagaaagcacuuccgcccgacaccagaugcaugcagagcagcauauaacuggaagauggcaggugaccccagauaugaggaaucucuccauaauccguaucccgauuaucauuggcuccggacuguaaagaccaccaaggagucucuuguuaucauaucuccaagugugucggauuuagacccguacgauaaaucucuucauuccagaguuuuucccagugguaaaugcucgggaauaacagugucuucuaccuauugucccacuagccaugauuauaccaucuggaugccugaaaauccgagacuagggacuucuugugacauuuucaucaauagcagagggaagagagcauccaaagggagcaagaccuguggauuuguggacgaaagaggccuguacaagucucuaaaaggggcauguaaauugaagcuauguggaguucuuggacuuagacuuauggauggaacauggguugcgauucaaacaucugaugaggccaaauggugcccuccugaucaguuagugaauauacaugauuuucacucggaugagaucgaacaucuuguuguggaggaguuaguaaagaaaagggaagagugucuagaugcacuggagucuaucaugaccaccaaguccguaaguuuccgacgccucagucacuugaggaagcucguccccggguuuggaaaagcauauaccauauucaacaaaaccuugauggaggcugaugcucacuacaaaucaguccggacauggaaugagaucauccccucuaaaggguguuuaagaguuggggggagaugucacccccaugugaacgggguguuuuucaaugguaucauucuggguccugauggacauguucuaaucccagagaugcagucgucucuccuucaacagcauauggaguuguuggaauccucgguaaucccgcuaaugcaucccuuggcagaucccucaacaguuuuuaaagacggugacgaggcggaagauuucguugagguucaccuuccggauguccacaagcaggucucgggaguugaucucggucucccgaacugggggaaguaugugcuggugaguguaggcgcucugauugcacugauguugaugauuuucuugaugacguguugcagaaaagcuaauggaguagaaucaaugcaacaccgucucggagagacgggaaggaaagugucugucaccucccaaagcgggagggucauaucuuccugggagucauauaaaagcgggggugagacuaagcuguaa

SEQ ID NO: 62962 - RNA, 1575 nt, Artificial Sequence
  derived and/or modified CDS sequence (wt) from glycoprotein__RABV__EU293115.1
augguuccucaggcucuuuuguuuguaccccuucugguuuuuucauuguguuucgggaaauucccuauuuacacaauaccagacaaacuugguccuuggagcccgaucgacauacaucaucucagcugcccaaacaauuugguuguggaggacgaaggaugcaccaaccugucaggguucuccuacauggaacuuaaaguuggauacaucucauccauaaaagugaacggguuuacuugcacgggcguugugacagaggcagaaaccuacacuaacuuuguugguuaugucaccaccacguucaaaagaaagcauuuccguccaaccccagaugcauguagagcugcguacaacuggaaaauggcuggugacccccgauaugaggagucucuacauaauccguacccugacuaccauuggcuucgaacuguaaaaaccaccaaggagucucucguuaucauauccccaaguguggcagauuuagacccauaugacaaaucucuucacucaagggucuucccugguggaaagugcucaggaauaacggugucuucuaccuacugcucaacuaaccacgauuacaccauuuggcugcccgagaauccgagacuagggacaucuugugacauuuuuaccaauaguagagggaagagagccuccaaagggaguaagaccugcggcuucguagaugagagaggccuguauaagucacuaaaaggagcaugcaaacucaaguuauguggaguucuuggacuuagacuuauggauggaacaugggucgcgaugcaaacaucagaugagaccaaauggugcccuccugaucaguuggugaaucugcacgacuuucgcucggaugagauugagcaucuuguuguagaggaguuggucaagaaaagagaggagugucuggaugcacuagaguccaucaugaccaccaagucagugaguuucagacgccucagucauuuaagaaaacuugucccuggguuuggaaaagcauauaccauauucaacaagaccuugauggaggcugaugcucacuacaagucaguccggacauggaaugagaucauccccucaaaaggguguuuaagaguuggagggaggugucaucaucaugugaacgggguguuuuucaaugguauaauauuagggccugacggccauguucuaaucccagagaugcaaucaucccuccuccagcaacauauggaguuguuggaauccucagucauuccccugaugcacccccuggcagacccguccacaguuuucaaggacggugaugaggcugaggauuuuguugaaguucaccuucccgaugugcacaaacaggucucagggguugacuugggccucccaaacugggguaaguauguauuauugagugcaggggcccugguugccuugauguugauaaucuucuuaaugacauguuguagaagagucaaucgaccggagucuacgcggcgcaguuucggagggacagagaggaaggugucgaucacuccccaaagcgggaaggucauaucuucaugggagucauauaagagugggagugagacuagacuguga

SEQ ID NO: 62963 - RNA, 1575 nt, Artificial Sequence
  derived and/or modified CDS sequence (wt) from glycoprotein__RABV__EU293116.1
augauccuucaggcucuucuguuugugccucuccugauuucuucauuguguuucgggaaguuccccaucuacacgauaccagacaagcucggcccuuggagucccaucgacauacaucaucucaguuguccuaacaauuugguuguggaggacgagggguguacaagucugucaggguuuucuuacauggaauugaaggugggauacauaucugccauaaaagugaacggguucaccuguacagguguugugacagaagcugagaccuacaccaacuuuguugguuaugucaccaccacauucaagaggaaacauuuucgcccuacgcccgacgcaugcagggcugccuacaacuggaagguggccggugauccuagauaugaggagucucuucaaaauccuuaucccgauuaccauuggcuacggacuguaaagaccaccaaggagucucuuaucaucauaucuccaaguguggcugauuuggacccauacgacaaaucccuucauuccagaguguucccuagugggaaguguuuggggauaacaauuuccuccacuuacugcucuacuaaccaugauuacaccaucuggaugcccgaagaagcgagacucgggacaucuugugacaucuuuaccaacagcaaagggaagaaagccucuaaagggggcaggacuugcggauucguggaugaaaggggccuguauaagucuuuaaaaggagccuguaaacucaaacugugcggaguucccggacuuagacuuauggacggaacaugggucacaauucagacaucagaugagaccaaauggugcccuccugaucaauuggugaaucuacaugacuuucacucagaugagauagagcaucucgucguggaggaguuggucaagaagagggaagaauguuuagaugcauuggaguccaucaugaccaccaaaucuguaagcuucagacgucucagccacuugagaaaacuugucccuggguuugggaaggcauauacuauauucaacaagaccuugauggaagcugaugcucacuacaagucaguucgaacuuggaacgagaucauccccucaaaggggugcuuaaaagucggagggaggugucauccucauguggacggaguauuuuucaaugguauaauucuggguccagacgggaaugucuugauccccgagaugcaaucuucccuacuucaacaacauauggagcuguuggaguccucuguaaucccucuaaugcaucccuuggcagacccaucaacagucuucaaggacggugaugaggcggaggauuuuguugaaguucaccuuccggauguucacaagcaaaucucagggguugacuugggucucccgaacugggggaaguaucuacugaugauugcaggugcucuggcuggacuaauucugauaaucuucuugauggcauguuguagaagggccaagagaacagagucaagacgacgagguucuggggagucagaaaggaaagugccaguaccuccccaaaacgggaaagucauaucuucaugggaguuguacaagagugaaggcgagaccgggcuguga

SEQ ID NO: 62964 - RNA, 1575 nt, Artificial Sequence
  derived and/or modified CDS sequence (wt) from glycoprotein__RABV__EU293121.1
augauuccucaggcucuuuuguuuguaccccuuuugguuuucucauugugcuucgggaaauuccccaucuacacgauaccagacaaacuuggcccuuggaguccuauugacauacaucaucucaguugcccuaacaauuuaguuguggaggaugaggggugcaccaaccugucaggauuuuccuacauggaacucaaagugggguacauuucagccauaaaagugaacggguucacuugcacggguguggugacagaagcagagaccuacacaaacuuugucggcuacgucaccaccacauuuaagaggaagcacuuccgcccgacaccagaugccugcagagcagcauauaacuggaagauggcgggugaccccagauaugaggaaucucugcauaauccguaucccgauuaucacuggcuccggacuguaaagaccaccaaggagucucuuguuaucauaucuccgagugugucggacuuagacccguacgauaaaucucuucauuccagaguuuuucccagcgguaaaugcucaggaauaacaguaucuucuaccuauugucccacuaaccaugacuauacuaucuggaugccagaaaauccgagacuggggaccucuugugacauuuucaccaauagcagagggaagagagcauccaaagggagcaagaccuguggauuuguggacgaaaggggcuuguacaggucucuaaaaggggcaugcaaauugaaacuauguggaguucuuggacuuagacuuauggacggaacaugggcugcgauucaaacaucugaugaggccaaauggugcccuccugaucaguuggugaauauacaugauuuucgcucggaugagauugaacaucuuguuguggaagaguuaguaaagaaaagggaagagugucuagaugcacuggagucuaucaugaccaccaaguccguaaguuucagacgccucagucacuugaggaagcucguccccggguuugggaaagcauauaccauauucaacaaaaccuugauggaggcugaugcucauuacaaaucaguccguacauggaaugagaucauccccucuaaaggauguuuaagaguuggggggagaugucacccccauguaaacgggguguuuuucaaugguaucauccuggguccugauggacauguucuaaucccagagaugcagucgucucuccuucgacagcauauggaguuguuggaauccucgguaaucccgcuaaugcaucccuuggcagaucccucaacaguuuuuaaggacggugacgaggcggaagauuuugucgagguucaccuuccggauguccacgagcaaaucucgggaguugaucucggucucccaagcugggggaaguaugugcugaugagugugggagcuaugauugcacugauguuggugauuuuccugacgacguguugcagaaaagcuaacggagcagaaacaauacaacaccgucuuggagagacgggaaggaaagugucggucaccucccaaagcgggagggucauaucuucaugggagucguauaaaagcgggggugagaccaagcuguag

SEQ ID NO: 62965 - RNA, 1575 nt, Artificial Sequence
  derived and/or modified CDS sequence (wt) from glycoprotein__RABV__EU352767.1
augguuccucagguucuuuuguuuguaccccuucuggguuuuucguuguguuucgggaaguuccccauuuacacgauaccagacgaacuuggucccuggagcccuauugacauacaccaucucagcuguccaaauaaccugguuguggaggaugaaggauguaccaaccuguccgaguucuccuacauggaacucaaagugggauacaucucagccaucaaagugaacggguucacuugcacagguguugugacagaggcagagaccuacaccaacuuuguugguuaugucacaaccacauucaagagaaagcauuuccgccccaccccagacgcauguagagccgcguauaacuggaagauggccggugaccccagauaugaagagucccuacacaauccauaccccgacuaccacuggcuucgaacuguaagaaccaccaaagagucccucauuaucauauccccaagugugacagauuuggacccauaugacaaaucccuucacucaagggucuucccuggcggaaagugcucaggaauaacgguguccucuaccuacugcucaacuaaccaugauuacaccauuuggaugcccgaggauccgagaccaaggacaccuuguaacauuuuuaccaauagcagagggaagagagcauccaaagggaacaagacuugcggcuuuguggaugaaagaggccuguauaagucucuaaaaggagcaugcaggcucaaguuauguggaguucuuggacuuagacuuauggauggaacaugggucgcgaugcaaacaucagaugagaccaaauggugcccuccagaucaguuggugaauuugcacgacuuucacucagacgagauugagcaucucguuguggaggaguuagucaagaaaagagaggaaugucuggaugcauuagaguccaucaugaccaccaagucaguaaguuucagacgucucagucaccugagaaaacuugucccaggguuuggaaaagcauauaccauauucaacaaaaccuugauggaggcugaugcucacuacaagucaguccggaccuggaaugagaucauccccucaaaaggguguuugaaaguuggaggaaggugccauccucaugugaacgggguguuuuucaaugguauaauauuagggccugacggccauguccuaaucccagagaugcaaucaucccuccuccagcaacauauggaguuguugaaaucuucaguuaucccccugaugcacccccuggcagacccuucuacaguuuucaaagaaggugaugaggcugaggauuuuguugaaguucaccuccccgauguguacaaacggaucucagggguugaccugggucucccgaacuggggaaaguauguauugaugacugcaggggccaugauuggccugguguugauauuuucccuaaugacauggugcagaagagccaaucgaccagaaucgaaacaacgcaguuuuggagggacagggaggaaugugucagucacuucccaaagcggaaaagucauaccuucaugggaaucauauaagaguggaggugagaucagacuguaa

SEQ ID NO: 62966 - RNA, 1575 nt, Artificial Sequence
  derived and/or modified CDS sequence (wt) from glycoprotein__RABV__EU549783.1
augauuccucaaguucuuuuguuuguuccccuucuaguuuucucgucguguuuugggaaauuccccauuuacacgauaccagacaaacuugguccauggagucccaucgauauacaucaucucagcuguccgaacaaucugguuguggaagaugaaggaugcaccaauuugucuggauuuuccuacauggaacucaaagugggauauaguucagccauaaaagugaacggauucaccuguacagguguggugaccgaagcagaaaccuacacuaacuuuguugguuaugucaccaccacguuuaagagaaagcacuuucgcccuaugccggaugcgugcagagccgcauacaacuggaagauggcuggugaccccagguaugaagagucucugcacaauccguaccccgacuaccacuggcuccgaacugucaagaccaccaaggagucccuugucaucauaucuccgagcguuacagauuuggacccguacgauaaaucccuucacucgagaguuuuuccuggcggaaaaugcucaggaauaaccguguccuccacuugcugcucuacuaaccacgacuacaccaucuggaugccugaaaauccuagacugggaacuucaugugacauuuucaccaauaguagagggaagagagcauccaaagggggcaagacuuguggauuuguggaugaaagaggcuuguacaagucucuaaagggagcaugcaagcugaagcuaugugggguucuaggacuuagacuuauggacggaacaugggucgcgauucagacaucagaugagaucaaauggugcucuccugaucagcuaguaaaucuacacgacuuucacucggaugagauugaacaucuuguuguggaggaguuggucaaaaagagggaagagugucuggacgcacuggagacuauuaugaccacaaaguccgugaguuucagacgucuuagucauuugaggaagcuagucccuggguuuggaaaggcguauaccauauucaacaaaaccuugauggaggcugaugcucacuacaaaucaauccggacuuggaaugaaaucauccccuccaaaggguguuuaagaguuggggggagaugucauccucaugugaacgggguguucuucaacggcauuauacuggguccugacggacauguucuaaucccagagaugcagucgucccuccuccaccagcauauggaauuguuggaguccucagucaucccuuugaugcaucccuuagcagacccgucaacagucuuuaaagacggcgacgaggcagaggacuuuguugagguucaccuuccggaugugcacaagcagaucucggggguugaucuuggucucccaaacugggggaaguaugugcugauaagugcaggugcuuugacugcauuaauguugacgauuuucuuaaugacguguugcagaaagacuaauagagcagggucaauacaacacaguccuggagggacagggaggaaagugucggugacuccucacaacggaagggucauauguucaugggaaucauauaaaagcggaagugagaccaagcuguga

SEQ ID NO: 62967 - RNA, 1575 nt, Artificial Sequence
  derived and/or modified CDS sequence (wt) from glycoprotein__RABV__EU643590.1
augguuccucaagcccuucuguuuguaccccuucuggccguuccauuguguuuugggaaauuccccauuuacacgauaccagacaaacuuggucccuggagucccauugacauacaucaucucagcuguccgaauaauuugguuguggaagaugaaggauguaccaaucugucaggauuuuccuacauggaacuuaaaguaggauacauuucagccauaaaggugaacggguucacuuguacggguguggugacggaagcagaaaccuacacuaacuuuguuggcuaugucaccaccacguuuaagagaaagcacuuucgaccaacuccggaugcaugcagauccgcauacaauuggaagauggcuggugaccccagauacgaagagucucugcacaaucccuauccugauuaucauuggcuccggacuguaaaaaccaccaaagaguccuuuguuaucauaucuccaaguguggcagaucuagauccguacgauaaaucccuucauucgagaguuuuuccuagaggaaaaugcucaggaauaacggugucuucuaccuacugcucuacuaaccaugacuacaccaucuggaugccugaaaaucccagacuggggaccucuugugauauuuucaccaauaguagagggaagagagcauccaaagggagcaagaccuguggauuuguagaugagagaggcuuguacaaaucucuaaaaggagcaugcaaacugaagcugugugggguucuuggacuuagacuuauggauggaacaugggucgcgauucagacaucagacgagaccaaguggugcccuccugaccagcuagugaaucuacaugacuuucauucagaugagauugaacaucuuguuguggaggaguuggucaagaaaagggaagagugucuagaugcacuggaguccaucaugaccaccaaguccgugaguuuccgacgucucagucacuugaggaaacuugugcccggguucggaaaagcauacaccauauucaauaagaccuugauggaggcugaugcucacuacaaaucgguccggacuuggaacgagaucauccccucuaaaggguguuugagaguuggaggcagaugucauccucauguaaacgggguguuuuuuaaugguauuauccuaggcccugacggccaugucuugaucccggaaaugcagucaucucuccuucagcaacauauggaguuguuggaauccucggucauccccuuaaugcauccuuuggcagauccaucaacgguguuuaaagauggugacgaggcggaggauuuuguugagguucaccuuccagaugugcauaagcaggucucaggggucgaucucggucucccaagcugggggaaguauguguugaugagcgcaggcauuuugacugcacugauguugacgauuuucuuaaugacguguugccgaaggacuaauagagcagaaucgauacaacacagucuuggagagacagggaggaaagugucgguaaccucccaaagcgggagggucauaucuucaugggagucauacaaaagcggaggugagaccaagcuguaa

SEQ ID NO: 62968 - RNA, 1575 nt, Artificial Sequence
  derived and/or modified CDS sequence (wt) from glycoprotein__RABV__EU700029.1
augauuccucaaguucuuuuguuuguuccccuucuaguuuucucgucguguuuugggaaauuccccauuuacacgauaccagacaaacuugguccauggagucccaucgauauacaucaucucagcuguccgaacaaucugguuguggaagaugaaggaugcaccaauuugucuggauuuuccuacauggaacucaaagugggauauauuucagccauaaaagugaacggauucaccuguacagguguggugaccgaagcagaaaccuacacuaacuuuguugguuaugucaccaccacguuuaagagaaagcacuuucgcccuaugccggaugcgugcagagccgcauacaacuggaagauggcuggugaccccagguaugaagagucucugcacaauccguaccccgacuaccacuggcuccgaacugucaagaccaccaaggagucccuugucaucauaucuccgagcguugcagacuuggacccguacgauaaaucccuucacucgagaguuuuuccuggcggaaaaugcucaggaauaaccguguccuccacuugcugcucuacuaaucacgacuacaccaucuggaugccugaaaauccuagacugggaacuucaugugacauuuucaccaauaguagagggaagagggcaucaaaagggggcaagacuuguggauuuguggaugaaagaggcuuguacaagucucuaaagggagcaugcaagcugaagcuaugugggguucuaggacuuagacuuauggacggaacaugggucgcgauucagacaucagaugagaucaaauggugcccuccugaucagcuaguaaaucuacacgacuuucacucggaugagauugaacaucuuguuguggaggaguuggucaaaaagagggaagagugucuggacgcacuggagacuauuaugaccacaaaguccgugaguuucagacgucuuagucauuugaggaagcuagucccuggguuuggaaaggcguauaccauauucaacaaaaccuugauggaggcugaugcccacuacaaaucaauccggacuuggaaugaaaucauccccuccaaaggguguuuaagaguuggggggagaugucauccucaugugaacgggguguucuucaacggcauuauacuggguccugacggacauguucuaaucccagagaugcagucgucccuccuccaccagcauauggaauuguuggaguccucagucaucccuuugaugcaucccuuagcagacccgucaacagucuuuaaagacggcgacgaggcagaggacuuuguugagguucaccuuccggaugugcacaagcagaucucggggguugaucuuggucucccaaacugggggaaguaugugcugauaagugcaggugcuuugacugcauuaauguugacgauuuucuuaaugacguguugcagaaagacuaauagagcagggucaauacaacacaguccuggagagacagggaggaaagugucggugacuucucacaacggaagggucauaucuucaugggaaucauauaaaagcggaagugagaccaagcuguga

SEQ ID NO: 62969 - RNA, 1575 nt, Artificial Sequence
  derived and/or modified CDS sequence (wt) from glycoprotein__RABV__EU700030.1
augguuccucuagcucuuuugcuuguaccccuucuaguuuucucguccuguuuugggaaauuccccauuuacacgauaccagacaaacuugguccauggagucccaucgauauacaucaucucagcuguccgaacaaucugguuguggaagaugaaggaugcaccaaucugucuggauuuuccuacauggaacucaaagugggauauauuucagccauaaaagugaacggauucaccuguacagguguggugaccgaagcagaaaccuacacuaacuuuguugguuaugucaccaccacguuuaagagaaagcacuuucgcccuaugccggaugcgugcagagccgcauacaacuggaagauggcuggugaccccagguaugaagagucucugcacaauccguaccccgacuaccacuggcuccgaacugucaagaccaccaaggagucccuugucaucauaucuccgagcguugcagauuuggacccguacgauaaaucccuucacucgagaguuuuuccuggcggaaaaugcucaggaauaaccguguccuccacuugcugcucuacuaaccacgacuacaccaucuggaugccugaaaauccuagacugggaacuucaugugacauuuucaccaauaguagagggaagagggcaucaaaagggggcaagacuuguggauuuguggaugaaagaggcuuguacaagucucuaaagggagcaugcaagcugaagcuaugugggguucuaggacuuagacuuauggacggaacaugggucgcgauucagacaucagaugagaucaaauggugcucuccugaucagcuaguaaaucuacaugacuuucacucggaugagauugaacaucuuguuguggaggaguuggucaaaaagagggaagagugucuggacgcacuggagacuauuaugaccacaaaguccgugaguuucagacgucuuagucauuugaggaagcuagucccuggguuuggaaaggcguauaccauauucaacaaaaccuugauggaggcugaugcucacuacaaaucaauccggacuuggaaugaaaucauccccuccaaaggguguuuaagaguuggggggagaugucauccucaugugaacgggguguucuuuaauggcauuauacuggguccugacggacauguucuaaucccagagaugcagucgucccuccuccaccagcauauggaauuguuggaguccucagucaucccuuugaugcaucccuuagcagacccgucaacagucuuuaaagacggcgacgaggcagaggacuuuguugagguucaccuuccggaugugcacaagcagaucucggggguugaucuuggucucccaaacugggggaaguaugugcugauaagugcaggugcucugacugcauuaauguugacgauuuucuuaaugacguguugcagaaagacuaauagagcagagucaauacaacacaguccuggagagauagggaggaaagugucggugacuucucacaacggaagggucauaucuucaugggaaucauauaaaagcggaagugagaccaagcuguga

SEQ ID NO: 62970 - RNA, 1575 nt, Artificial Sequence
  derived and/or modified CDS sequence (wt) from glycoprotein__RABV__EU827276.1
augguuccucugacucuuuugguugcaccccucuugguuuugucacuguguucagggaaauuccccaucuacacgauaccagauaaacuaggccccuggagccccauugacauacaucaucucagcuguccaaacaaucuggucguggaggacgagggaugcaccaaucugucaggauuuuccuacauggaacuuaaaguaggauacaucucagccauaaaagugaacggguuuacuuguacaggcguggugacagaggcagaaacuuauacuaauuucgucgguuaugucaccaccacguucaggagaaagcacuuucgcccuacaccggacgcauguaggaccgcauacaacuggaagauggcaggugacccuagauaugaagagucuuugcacaauccauacccugacuaucauuggcuccgaacgguaaaaaccacgaaggagucccuuguuauuauaucuccgaguguugcagauuuagacccauaugauagaucucuucacucgagaguauucccuaaugggaaguguucggggauaaccguauccuccaccuacugcccuaccaaccacgauuacaccaucuggaugccagagaauccgagacuggggacaucuugugacauuuuugucaacaguagagggaagagagcgucuaaagggagcaaaacuugcggguuuguggaugaaagaggucuguacaagucucuaaaaggggcaugcaaacucaaguuaugugggguacucggacuuagacuuauggaugggacaugggucgcaaugcgaacgucggacgagaccaaauggugcccuccugaccaauuagugaauauacaugauuuucacucagaugagaucgaacaucucguuguagaggaguugguuaagaagagagaagagugucuagaugcacuagaguccaucaugaccaccaagucagugaguuuucgacgucucagucauuugaggaaacuuguccccggguucggaaaagcauacaccauauucaacaaaacccuaauggaagcugaugcucacuacaagucaguccggaccugggaugaaaucauccccucaaaaggguguuugagaguuggggggaggugucauccccauguucacggaguguuuuuuaaugguauaauauuggguccugacggucauguucuaaucccagaaaugcaaucaucccuccuucagcagcacauggaguuguuggaguccucaguuaucccucuaaugcaccccuuggcagacccaucaacaguuuuuaaggaugaugaugaggcugaggauuuuguagaggugcaccuuccugaugugcacaaacaaaucucagggguugaccugggucucccgaacuggggaaaauauguucuaaugagugcaggugcucugaucgcccugaugcugcuaaucuuccuaaugacauguuguagaaaaauuaagcgaccagaauccacacagcauaguccccgaggaacagggaggaaagugucggucacuucccaaaacgggaagguaauaucuucaugggaaucauauaagagcggaggugagaccaggcuguaa

SEQ ID NO: 62971 - RNA, 1575 nt, Artificial Sequence
  derived and/or modified CDS sequence (wt) from glycoprotein__RABV__EU827277.1
augguuccucugacucuuuugguuguaccccucuugguuuuaucacuguguucagggaaauuccccaucuacacgauaccagauaaacuaggccccuggagccccauugacauacaucaucucagcuguccaaacaaucuggucguggaggacgagggaugcaccaaccugucaggauuuuccuacauggaacuuaaaguaggauacauuucagccauaaaagugaauggauuuacuuguacaggcguggugacagaggcagaaacuuauaccaauuucgucgguuaugucaccaccacguucaggagaaagcacuuucgcccuacaccggacgcauguaggaccgcauacaacuggaagauggcaggugacccuagauacgaagagucuuugcacaauccauacccugacuaucauuggcuccgaacgguaaaaaccacgaaggagucccuuauuauuauaucuccgaguguugcagauuuagacccauaugauagaucucuucacucgagaguauucccuaaugggaagugcucggggauaaccguauccuccaccuacugcccuaccaaccacgauuacaccaucuggaugccggagaauccgagacuggggacaucuugugacauuuuugucaacaguagagggaagagagcaucuaaagggagcaagacuuccggguuuguggaugaaagaggucuguacaagucucuaaaaggggcaugcaaacucaaguuaugugggguacucggacuuagacuuauggaugggacaugggucgcaaugcggacgucggacgagaccaaauggugcccuccaguccaacuagugaauauacaugauuuucacucagaugagaucgaacaucucguuguagaggaguugguuaagaagagagaagagugucuagaugcacuagaguccaucaugaccaccaagucagugaguuuucgacgucucagucauuugaggaaacuuguccccggguucggaaaagcauacaccauauucaacaaaacccuaauggaggcugaugcucacuacaagucaguccggaccugggaugaaaucauccccucaaaaggguguuugagaguuggggggaggugucauccccauguucacggaguguuuuuuaaugguauaauauuggguccugauggucauguucuaaucccagaaaugcaaucaucccuccuucagcagcacauggaguuguuggaguccucaguuaucccucuaaugcaccccuuggcagacccgucaacaguuuuuaaggauggugaugaggcugaggauuuuguagaggugcaccuuccugaugugcacaaacaaaucucagggguugaccugggucucccaaacuggggaaaauauguucuaaugagugcaggugcucugauagcccugaugcugauaaucuuccuaaugacauguuguagaaaaauuaagcgaccagaauccacacagcauagucccggaggaacagggaggaaagugucggucacuucccaaaacgggaagguaauaucuucaugggaaucauauaagagcggaggugagaccaggcuguaa

SEQ ID NO: 62972 - RNA, 1575 nt, Artificial Sequence
  derived and/or modified CDS sequence (wt) from glycoprotein__RABV__EU877067.1
augguuccucaggcucuccuguuuguaccccuucugguuuuuccauuguguuuugggaaauucccuauuuacacgauaccagacaagcuuggucccuggaguccgauugacauacaucaccucagcugcccaaacaauuugguaguggaggacgaaggaugcaccaaccugucaggguucuccuacauggaacuuaaaguuggauacaucuuagccauaaaagugaacggguucacuugcacaggcguugugacggaggcugaaaccuacacuaacuucguugguuaugucacaaccacguucaaaagaaagcauuuccgcccaacaccagaugcauguagagccgcguacaacuggaagauggccggugaccccagauaugaagagucucuacacaauccguacccugacuaccgcuggcuucgaacuguaaaaaccaccaaggagucucucguuaucauaucuccaaguguggcagauuuggacccauaugacagaucccuucacucgagggucuucccuagcgggaagugcucaggaguagcagugucuucuaccuacugcuccacuaaccacgauuacaccauuuggaugcccgagaauccgagacuagggaugucuugugacauuuuuaccaauaguagagggaagagagcauccaaagggagugagacuugcggcuuuguagaugaaagaggccuauauaagucuuuaaaaggagcaugcaaacucaaguuauguggaguucuaggacuuagacuuauggauggaacaugggucucgaugcaaacaucaaaugaaaccaaauggugcccucccgauaaguuggugaaccugcacgacuuucgcucagacgaaauugagcaccuuguuguagaggaguuggucaggaagagagaggagugucuggaugcacuagaguccaucaugacaaccaagucagugaguuucagacgucucagucauuuaagaaaacuugucccuggguuuggaaaagcauauaccauauucaacaagaccuugauggaagccgaugcucacuacaagucagucagaacuuggaaugagauccucccuucaaaaggguguuuaagaguuggggggaggugucauccucaugugaacgggguguuuuucaaugguauaauauuaggaccugacggcaaugucuuaaucccagagaugcaaucaucccuccuccagcaacauauggaguuguuggaauccucgguuaucccccuugugcacccccuggcagacccgucuaccguuuucaaggacggugacgaggcugaggauuuuguugaaguucaccuucccgaugugcacaaucaggucucaggaguugacuugggucucccgaacugggggaaguauguauuacugagugcaggggcccugacugccuugauguugauaauuuuccugaugacauguuguagaagagucaaucgaucagaaccuacgcaacacaaucucagagggacagggagggaggugucagucacuccccaaagcgggaagaucauaucuucaugggaaucacacaagagugggggugagaccagacuguaa

SEQ ID NO: 62973 - RNA, 1575 nt, Artificial Sequence
  derived and/or modified CDS sequence (wt) from glycoprotein__RABV__FJ418876.1
augauuccccaagcucuucuguuugugccccuccuagucuucucguuguguuucgggaaauuccccaucuauacgauacccgacaaacucgguccauggagucccauugacauacaucaucucagcuguccaaacaauuugguuguggaggaugaaggaugcaccaaucuaucuggauuuuccuacauggaacucaaaguaggauacaucucagccauuaaagugaauggauucaccuguacagguguggugacggaagcagagaccuacacuaacuuugucgguuacgucaccaccacguuuaagagaaagcacuuccgcccaacgccagaugcgugcagagccgcauacaacuggaagauggcuggugaccccagguaugaggagucucuacacaauccguacccugacuaccauuggcuucggacuguaaagaccaccaaggagucccuuguuaucauaucuccaaguguggcagauuuagacccguacgauaaaucccuucacucgagaguuuuuccuagcggaaaaugcucaggaauaacaguguccucuaccuacugcucuacuaaccacgacuacaccaucuggaugccugagaaucccagacuggggacuucuugugacauuuucgucaauagcagagggaagagagcaucaaaagggagcaagacuuguggguuuguggaugagagaggccuguacaagucucuaaaaggggcaugcaaaauaaaacuaugugggguucuugggcuuagacuuauggauggaacaugggucgcaauucagacgucagaugagaccaaauggugcccuccugaucaacuagugaaucuacaugacuuucgcucggaugagauugaacaucuuguuguggaggaguuggucaagaaaagggaagagugucuggaugcacuggaguccaucaugaccacaaaguccgugaguuuuagacgccugagucacuugaggaagcuugucccuggguuuggaaaggcauauacuauauucaacaaaaccuugauggaagcugaugcucacuacaaaucaguccggacuuggaacgaaaucauccccucuaaagggugcuuaagaguuggggggagaugucauccucaugugaaugggguguucuucaaugguaucauacuggguccugacggacauguccugauuccagagaugcaaucaucccuccuccagcagcacauggaauuguuggaguccucagucaucccauugaugcaucccuuagcagacccaucaacgauuuuuaaggacggugacgaggcggaggacuuuguugagguucaccucccggacgugcacaagcaggucucgggggucgaucucggucucccaaacugggggaaguaugugcuaaugagcgcaggugcucugauugcauugauguugaugauuuucuuaaugacguguugcaggaagacugauagaacaggaucaacacaccacaguccuggagagacggggaggaaagugucuguaacuucccaaaacggaagggucauagcuucaugggagucauacaagagcggaggugaaaccaggcuguga

SEQ ID NO: 62974 - RNA, 1575 nt, Artificial Sequence
  derived and/or modified CDS sequence (wt) from glycoprotein__RABV__FJ418877.1
augguuccucaagcccuucuguuuguaccccuucuggccauuccauuguguuuugggaaauuccccauuuacacgauaccagacaaacucggucccuggagucccauugauauacaucaccucagcuguccaaauaauuugguuguggaggaugaaggauguaccaaucugucaggauucucauacauggaacuuaaaguaggauacauuucagccauaaaggugaacggguucacuuguacggguguggugacggaagcagaaaccuacacuaacuuuguuggcuaugucaccaccacguuuaagagaaagcacuuucgaccaacaccggaugcaugcagauccgcauacaauuggaagauggcuggugaccccagauacgaagagucucugcacaaucccuauccugauuaucauuggcuccggacuguaaaaaccaccaaagaguccuuuguuaucauaucuccaaguguggcagaucuagauccguacgauaaaucccuucauucgagaguuuuuccuagaggaaagugcucaggaauaacggugucuucuaccuacugcucuaccaaccaugacuacaccauuuggaugccugaaaaucccagacuggggaccucuugugauauuuucaccaauagcagagggaagagagcauccaaagggagcaagaccuguggauuuguagaugagagaggcuuguacaaaucucuaaaaggagcaugcaaaaugaagcugugugggguucuuggacuuagacuuauggauggaacaugggucgcgauucagacaucagacgagaccaaguggugcccuccugaccagcuagugaaucuacaugacuuucauucggaugagauugaacaucuuguuguggaggaguuggucaagaaaagggaagagugccuagaugcacuggaguccaucaugaccaccaaguccgugagcuuccgacgucucagucacuugaggaaacuugugccuggguucggaaaagcauacaccauauucaauaagaccuugauggaggcugaugcucacuacaaaucgguccggacuuggaacgagaucauccccucuaaaggguguuugagaguuggaggcagaugucauccccaugugaacgggguguuuuuuaaugguauuauccuaggcccugacggccaugucuuaaucccggaaaugcagucaucucuccuucagcagcauauggaguuguuggaauccucggucauccccuuaaugcauccuuuggcagauccaucaacgguuuuuaaagauggugacgaggcggaggauuuuguugagguucaccuuccagaugugcauaagcaggucucaggggucgaucucggucucccaagcugggggaaguauguguugaugagcgcaggcauuuugacugcacugauguugaugaucuucuuaaugacguguugccgaaggacuaauagagcagagucaauacaacacagucuuggagagacagggaggaaagugucgguaaccucccaaagcgggagggucauaucuucaugggagucauacaaaagcggaggugagaccaagcuguaa

SEQ ID NO: 62975 - RNA, 1575 nt, Artificial Sequence
  derived and/or modified CDS sequence (wt) from glycoprotein__RABV__FJ418878.1
augauuccucaaguucuuuuguuuguuccccuucuaguuuucucgucauguuucgggaaauuccccauuuacacgauaccagacaaacuugguccauggagucccaucgauauacaucaucucagcuguccgaacaaucuuguuguggaagaugaagggugcaccaaucugucuggauuuuccuacauggaacucaaagugggauauauuucagccauaaaagugaacggauucaccuguacagguguggugacagaagcagaaaccuacacgaacuuuguugguuaugucaccaccacguuuaagagaaagcacuuucgcccuaugccggaugcgugcagagccgcauacaacuggaagauggcuggugaccccagguaugaagagucucugcacaauccguacccugacuaccacuggcuccgaacugucaagaccaccaaggagucccuugucaucauaucuccgagcguugcagauuuggacccguacgauaaaucccuucacucgagaguuuuuccuggcggaaaaugcucaggaauaaccguguccuccacuugcugcucuacuaaccacgacuacaccaucuggaugccugaaaauccuagacugggaacuucgugugacauuuucaccaauaguagagggaagagggcaucaaaagggggcaagacuuguggauuuguggaugaaagaggcuuguacaagucucuaaagggagcaugcaaaaugaagcuaugugggguucuaggacuuagacuuauggacggaacauggguugcaauucagacaucugaugagaucaaauggugcucuccugaucagcuaguaaaucuacacgacuuucacucggaugagauugaacaucuuguuguggaggaguuggucaaaaagagggaagagugucuggacgcacuggagacuauuaugaccacaaaguccgugaguuucagacgucuuagucauuugaggaagcuagucccuggguuuggaaaggcguauaccauauucaacaaaaccuugauggaggcugaugcucacuauaaaucaauccggacuuggaaugaaaucauccccucuaaaggguguuuaagaguuggggggagaugucauccucaugugaacgggguguucuucaacggcauuauacuggguccugacggacauguucuaaucccagagaugcaaucgucccuccuccaccagcauauggaauuguuggaguccucagucaucccguugaugcaucccuuagcagacccgucaacagucuuuaaagacggcgacgaggcagaggacuuuguugauguucaccuuccggaugugcacaagcagaucucggggguugaucuuggucucccaaacugggggaaguaugugcugauaagugcaggugcucugacugcauuaauguugaugauuuucuuaaugacguguugcagaaaggcuaauagagcagagucaauacaacacaauccuggagagacagggaggaaagugucgguaacuucucacaacggaagggucauaucuucaugggaaucauauaaaagcggaggugagaccaagcuguga

SEQ ID NO: 62976 - RNA, 1575 nt, Artificial Sequence
  derived and/or modified CDS sequence (wt) from glycoprotein__RABV__FJ418879.1
augauuccucaaguucuuuuguuuguuccccuucuaguuuucucgucgugucuugggaaauuccccauuuacacgauaccagacaaacuugguccauggagucccaucgauauacaucaucucagcuguccgaacaaucugguuguggaagaugaaggaugcaccaaucugucuggauuuuccuacauggaacucaaagugggauauauuucagccauaaaagugaacggauucaccuguacagguguggugacagaagcagaaaccuacacuaacuuuguugguuaugucaccaccacguuuaagagaaagcacuuucgcccuaugcuggaugcgugcagagccgcauacaacuggaagauggcuggugaccccagguaugaagagucucugcacaauccguacccugacuaccacuggcuccggacugucaagaccuccaaggagucccuugucaucauaucuccgagcguugcagauuuggacccguacgauaaaucccuucacucgagaguuuuuccuggcggaaaaugcucaggaauaaccguguccuccacuugcugcucuacuaaccacgacuacaccaucuggaugccugaaaauccuagacugggaacuucgugugacauuuucaccaauaguagagggaagagggcaucaaaagggggcaagacuuguggauuuguggaugaaagaggcuuguacaagucucuaaagggagcaugcaaagugaagcuaugugggguucuaggacuuagacuuauggacggaacaugggucgcaauucagacaucagaugagaucaaauggugcucuccugaucagcuaguaaaucuacacgacuuucacucggaugagauugaacaucucguuguggaggaguuggucaaaaagagggaagagugucuggacgcacuggagacuauuaugaccacaaaguccgugaguuucaggcgucuuagucauuugaggaagcuagucccuggguuuggaaaggcguauaccauauucaacaaaaccuugauggaggcugaugcucacuauaaaucaauccggacuuggaaugaaaucauccccucuaaaggguguuuaagaguuggggggagaugucauccucaugugaacgggguguucuucaacggcauuauacuggguccugacggacauguucuaaucccagagaugcaaucgucccuccuccaccagcauauggaauuguuggaguccucagucaucccuuugaugcaucccuuagcagacccgucaacagucuuuaaagacggcgacgaggcagaggacuuuguugagguucaccuuccggaugugcacaagcagaucucggggguugaucuuggucucccaaacugggggaaguaugugcugauaagugcaggugcucugacugcauccauguugaugauuuucuuaaugacguguugcagaaagacuaauagagcagagucaauacaacacaguccuggagagacggggagaaaagugucgguaacuucucacaacggaagggucauaucuucaugggaaucauauaaaagcggaggugagaccaagcuguga

SEQ ID NO: 62977 - RNA, 1575 nt, Artificial Sequence
  derived and/or modified CDS sequence (wt) from glycoprotein__RABV__FJ418880.1
augguuccucaagcccuucuguuuguaccccuucuggccauuccauuguguuuugggaaauuccccauuuacacgauaccagacaaacucggucccuggagucccauugauauacaucaccucagcuguccgaauaauuugguuguggaggaugaaggauguaccaaucugucaggauucucauacauggaacuuaaaguaggauacauuucagccauaaaggugaacggguucacuuguacggguguggugacggaagcagaaaccuacacuaacuuuguuggcuaugucaccaccacguuuaagagaaagcacuuucgaccaacaccggaugcaugcagauccgcauacaauuggaagauggcuggugaccccagauacgaagagucucugcacaaucccuauccugauuaucauuggcuccggacuguaaaaaccaccaaagaguccuuuguuaucauaucuccaaguguggcagaucuagauccguacgauaaaucccuucauucgagaguuuuuccuagaggaaaaugcucaggaauaacggugucuucuaccuacugcuccacuaaccaugacuacaccaucuggaugccugaaaaucccagacuggggaccucuugugauauuuucaccaauagcagagggaagagagcauccaaagggagcaagaccuguggauuuguagaugagagaggcuuguacaaaucucuaaaaggagcaugcaaaaugaagcugugugggguucuuggacuuagacuuauggauggaacaugggucgcgauucagacaucagacgagaccaaguggugcccuccugaccagcuagugaaucuacaugacuuucauucggaugagauugaacaucuuguuguggaggaguuggucaagaaaagggaagagugccuagaugcacuggaguccaucaugaccaccaaguccgugaguuuccgacgucucagucacuugaggaaacuugugccuggguucggaaaagcauacaccauauucaauaaaaccuugauggaggcugaugcucacuacaaaucgguccggacuuggaacgagaucauccccucuaaaggguguuugagaguugggggcagaugucauccccaugugaacgggguguuuuuuaaugguauuauccuaggcccugacggccaugucuuaaucccggaaaugcagucaucucuccuucagcagcauauggaguuguuggaauccucggucauccccuuaaugcauccuuuggcagauccaucaacgguuuuuaaagauggugacgaggcggaggauuuuguugagguucaccuuccggaugugcauaagcaggucucaggggucgaucucggucucccaagcugggggaaguauguguugaugagcgcaggcauuuugacugcacugauguugaugauuuucuuaaugacguguugccgaaggacuaauagagcagagucaauacaacacagucuuggagagacaggaaggaaagugucgguaaccucccaaagcgggagggucauaucuucaugggagucauacaaaagcggaggugagaccaagcuguaa

SEQ ID NO: 62978 - RNA, 1575 nt, Artificial Sequence
  derived and/or modified CDS sequence (wt) from glycoprotein__RABV__FJ418881.1
augauuccucaaguucuuuuguuugucccccuucuaguuuucucgucguguuuugggaaauuccccauuuacacgauaccagacaaacuugguccauggagucccaucgauauacaucaucucagcuguccgaacaaucugguuguggaagaugaaggaugcaccaaucugucuggauuuuccuacauggaacucaaagugggauauauuucagccauaaaaguaaacggauucaccuguacagguguggugacagaagcagaaaccuacacuaacuuuguugguuaugucaccaccacguuuaagagaaagcacuuucgcccuaugccggaugcgugcagagccgcauacaacuggaagauggcuggugaccccagguaugaagagucucugcacaauccguacccugacuaccacuggcuccggacugucaagaccuccaaggagucccuugucaucauaucuccgagcguugcagauuuggacccguacgauaaaucccuucacucgagaguuuuuccuggcggaaaaugcucaggaauaaccguguccuccacuugcugcucuacuaaccacgacuacaccaucuggaugccugaaaauccuagaccgggaacuucgugugacauuuucaccaauaguagagggaagagggcaucaaaagggggcaagacuuguggauuuguggaugaaagaggcuuguacaagucucuaaagggagcaugcaaagugaugcuaugugggguucuaggacuuagacuuauggacggaacaugggucgcaauucagacaucagaugagaucaaauggugcucuccugaucagcuaguaaaucuacacgacuuucacucggaugagauugaacaucucguuguggaggaguuggucaaaaagagggaagagugucuggacgcacuggagacuauuaugaccacaaaguccgugaguuucaggcgucuuagucauuugaggaagcuagucccuggguuuggaaaggcguauaccaucuucaacaaaaccuugauggaggcugaugcucacuauaaaucaauccggacuuggaaugaaaucauccccucuaaaggguguuuaagaguuggggggagaugucauccucaugugaacgggguguucuucaacggcauuauacuggguccugacggacauguucuaaucccagagaugcaaucgucccuccuccaccagcauauggaauuguuggaguccucagucaucccuuugaugcaucccuuagcagacccgucaacagucuuuaaagacggcgacgaggcagaggacuuuguugagguucaccuuccggacgugcacaagcagaucucggggguugaucuuggucucccaaacugggggaaguaugugcugauaagugcaggugcucugacugcauuaauguugaugauuuucuuaaugacguguugcagaaagacuaauagagcagagucaauacaacacaguccuggagagacagggaggaaagugucgguaacuucucacaacggaagggucauaucuucaugggaaucauauaaaagcggaggugagaccaagcuguga

SEQ ID NO: 62979 - RNA, 1575 nt, Artificial Sequence
  derived and/or modified CDS sequence (wt) from glycoprotein__RABV__FJ418883.1
augauuccucaaguucuuuuguuuguuccccuucuaguuuucucgucguguuuugggaaauuccccauuuacacgauaccagacaaacuugguccauggagucccaucgauauacaucaucucagcuguccgaacaaucugguuguggaagaugaaggaugcaccaaucugucuggauuuuccuacauggaacucaaagugggauauauuucagccauaaaagugaacggauucaccuguacagguguggugaccgaagcagaaaccuacacuaacuuuguugguuaugucaccaccacguuuaagagaaagcacuuucgcccuaugccggaugcgugcagagccgcauacaacuggaagauggcuggugaccccagguaugaagagucucugcacaauccguaccccgacuaccacuggcuccgaacugucaagaccaccaaggagucccuugucaucauaucuccgagcguugcagauuuggacccguacgauaaaucccuucacucgagaguuuuuccuggcggaaaaugcucaggaauaaccguguccuccacuugcugcucuacuaaccacgacuacaccaucuggaugccugaaaauccuagacugggaacuucgugugacauuuucaccaauaguagagggaagagggcaucaaaagggggcaagacuuguggauuuguggaugaaagaggcuuguacaagucucuaaagggagcaugcaaaaugaagcuaugugggguucuaggacuuagacuuauggacggaacaugggucgcaauucagacaucagaugagaucaaauggugcucuccugaucagcuaguaaaucuacacgacuuucacucggaugagauugaacaucuuguuguggaggaguuggucaaaaagagggaagagugucuggacgcacuggagacuauuaugaccacaaaguccgugaguuucagacgucuuagucauuugaggaagcuagucccuggguuuggaaaggcguauaccauauucaacaaaaccuugauggaggcugaugcucacuacaaaucaauccggacuuggaaugaaaucauccccuccaaaggguguuuaagaguuggggggagaugucauccucaugugaacgggguguucuucaacggcauuauacuggguccugacggacauguucuaaucccagagaugcagucgucccuccuccaccagcauauggaauuguuggaguccucagucaucccuuugaugcaucccuuagcagacccgucaacagucuuuaaagacggcgacgaggcagaggacuuuguugagguucaccuuccggaugugcacaagcagaucucggggguugaucuuggucucccaaacugggggaaguaugugcugauaagugcaggugcucugacugcauuaauguugaagauuuucuuaaugacguguugcagaaagacuaauagagcagagucaauacaacacaguccuggagagauagggaggaaagugucggugacuucucacaacggaagggucauaucuucaugggaaucauauaaaagcggaagugagaccaagcuguga

SEQ ID NO: 62980 - RNA, 1575 nt, Artificial Sequence
  derived and/or modified CDS sequence (wt) from glycoprotein__RABV__FJ418884.1
augauuccucaaguucuuuuguuuguuccccuucuaguuuucucgucguguuuugggaaauuccccauuuacacgauaccagacaaacuugguccauggagucccaucgauauacaucaucucagcuguccgaacaaucugguuguggaagaugaaggaugcaccaaucugucuggauuuuccuacauggaacucaaagugggauauauuucagccauaaaagugaacggauucaccuguacagguguggugaccgaagcagaaaccuacacuaacuuuguugguuaugucaccaccacguuuaagagaaagcacuuucgcccuaugccggaugcgugcagagccgcauacaacuggaagauggcuggugaccccagguaugaagagucucugcacaauccguaccccgacuaccacuggcuccgaacugucaagaccaccaaggagucccuugucaucauaucuccgagcguugcagauuuggacccguacgauaaaucccuucacucgagaguuuuuccuggcggaaaaugcucaggaauaaccguguccuccacuugcugcucuacuaaccacgacuacaccaucuggaugccugaaaauccuagacugggaacuucgugugacauuuucaccaauaguagagggaagagggcaucaaaagggggcaagacuuguggauuuguggaugaaagaggcuuguacaagucucuaaagggagcaugcaaaaugaagcuaugugggguucuaggacuuagacuuauggacggaacaugggucgcaauucagacaucagaugagaucaaauggugcucuccugaucagcuaguaaaucuacacgacuuucacucggaugagauugaacaucuuguuguggaggaguuggucaaaaagagggaagagugucuggacgcacuggagacuauuaugaccacaaaguccgugaguuucagacgucuuagucauuugaggaagcuagucccuggguuuggaaaggcguauaccauauucaacaaaaccuugauggaggcugaugcucacuacaaaucaauccggacuuggaaugaaaucauccccuccaaaggguguuuaagaguuggggggagaugucauccucaugugaacgggguguucuucaacggcauuauacuggguccugacggacauguucuaaucccagagaugcagucgucccuccuccaccagcauauggaauuguuggaguccucagucaucccuuugaugcaucccuuagcagacccgucaacagucuuuaaagacggcgacgaggcagaggacuuuguugagguucaccuuccggaugugcacaagcagaucucggggguugaucuuggucucccaaacugggggaaguaugugcugauaagugcaggugcucugacugcauuaauguugacgauuuucuuaaugauguguugcagaaagacuaauagagcagagucaauacaacacaguccuggagagauagggaggaaagugucggugacuucucacaacggaagggucauaucuucaugggaaucauauaaaagcggaagugagaccaagcuguga

SEQ ID NO: 62981 - RNA, 1575 nt, Artificial Sequence
  derived and/or modified CDS sequence (wt) from glycoprotein__RABV__FJ418885.1
augguuccucaaguucuuuuguuuguuccccuucuaguuuucucgucauguuucgggaaauuccccauuuacacgauaccagacaaacuugguccauggagucccaucgauauacaucaucucagcuguccgaacaaucuuguuguggaagaugaagggugcaccaaucugucuggauuuuccuacauggaacucaaagugggauauauuucagccauaaaagugaacggauucaccuguacagguguggugacagaagcagaaaccuacacaaacuuuguugguuaugucaccaccacguuuaagagaaagcacuuucgcccuaugccggaugcgugcagagccgcauacaacuggaagauggcuggugaccccagguaugaagagucucugcacaauccguacccugacuaccacuggcuccgaacugucaagaccaccaaggagucccuugucaucauaucuccgagcguugcagacuuggacccguacgauaaaucccuucacucgagaguuuuuccuggcggaaaaugcucaggaauaaccguguccuccacuugcugcucuacuaaccacgacuacaccaucuggaugccugaaaauccuagacugggaacuucgugugacauuuucaccaauaguagagggaagagggcaucaaaagggggcaagacuuguggauuuguggaugaaagaggcuuguacaagucucuaaagggagcaugcaaaaugaagcuaugugggguucuaggacuuagacuuauggacggaacauggguugcaauucagacaucagaugagaucaaauggugcucuccugaucagcuaguaaaucuacacgacuuucacucggaugagauugaacaucuuguuguggaggaguuggucaaaaagagggaagagugucuggacgcacuggagacuauuaugaccacaaaguccgugaguuucagacgucuuagucauuugaggaagcuagucccuggguuuggaaaggcguauaccauauucaacaaaaccuugauggaggcugaugcucacuauaaaucaauccggacuuggaaugaaaucauccccucuaaaggguguuuaagaguuggggggagaugucauccucaugugaacgggguguucuucaacggcauuauacuggguccugacggacauguucuaaucccagagaugcaaucgucccuccuccaccagcauauggaauuguuggaguccucagucaucccguugaugcaucccuuagcagacccgucaacagucuuuaaagacggcgacgaggcagaggacuuuguugagguucaccuuccggaugugcacaagcagaucucggggguugaucuuggucucccaaacugggggaaguaugugcugauaagugcaggugcucugacugcauuaauguugaugauuuucuuaaugacguguugcagaaaggcuaauagagcagagucaauacaacacaauccuggagagacagggaggaaagugucgguaacuucucacaacggaagggucauaucuucaugggaaucauauaaaagcggaggugagaccaaacuguga

SEQ ID NO: 62982 - RNA, 1575 nt, Artificial Sequence
  derived and/or modified CDS sequence (wt) from glycoprotein__RABV__FJ418886.1
augauuccucaaguucuuuuguuuguuccccuucuaguuuucucgucguguuuugggaaauuccccauuuacacgauaccagacaaacuugguccauggagucccaucgauauacaucaucucagcuguccgaacaaucugguuguggaagaugaaggaugcaccaaucugucuggauuuuccuacauggaacucaaagugggauauauuucagccauaaaagugaacggauucaccuguacagguguggugaccgaagcagaaaccuacacuaacuuuguugguuaugucaccaccacguuuaagagaaagcacuuucgcccuaugccggaugcgugcagagccgcauacaacuggaagauggcuggugaccccagguaugaagagucucugcacaauccguaccccgacuaccacuggcuccgaacugucaagaccaccaaggagucccuugucaucauaucuccgagcguugcagauuuggacccguacgauaaaucccuucacucgagaguuuuuccuggcggaaaaugcucaggaauaaccguguccuccacuugcugcucuacuaaccacgacuacaccaucuggaugccugaaaauccuagacugggaacuucaugugacauuuucaccaauaguagagggaagagggcaucaaaagggggcaagacuuguggauuuguggaugaaagaggcuuguacaagucucuaaagggagcaugcaaaaugaagcuaugugggguucuaggacuuagacuuauggacggaacaugggucgcgauucagacaucagaugagaucaaauggugcucuccugaucagcuaguaaaucuacacgacuuucacucggaugagauugaacaucuuguuguggaggaguuggucaaaaagagggaagagugucuggacgcacuggagacuauuaugaccacaaaguccgugaguuucagacgucuuagucauuugaggaagcuagucccuggguuuggaaaggcguauacuauauucaacaaaaccuugauggaggcugaugcucacuacaaaucaauccggacuuggaaugaaaucauccccuccaaaggguguuuaagaguuggggggagaugucauccucaugugaacgggguguucuucaacggcauuauacuggguccugacggacauguucuaaucccagagaugcagucgucccuccuccaccagcauauggaauuguuggaguccucagucaucccuuugaugcaucccuuagcagacccgucaacagucuuuaaagacggcgacgaggcagaggacuuuguugagguucaccuuccggaugugcacaagcagaucucggggguugaucuuggucucccaaacugggggaaguaugugcugauaagugcaggugcucugacugcauuaauguugcagauuuucuuaaugacguguugcagaaagacuauuagagcagagucaauacaacacaguccuggagagacagggaggaaagugucggugacuuuucacaacggaagggucauaucuucaugggaaucauauaaaagcggaagugagaccaagcuguga

SEQ ID NO: 62983 - RNA, 1575 nt, Artificial Sequence
  derived and/or modified CDS sequence (wt) from glycoprotein__RABV__FJ418887.1
augguuccucaaguucuuuuguuuguuccccuucuaguuuucucgucauguuucgggaaauuccccauuuacacgauaccagacaaacuugguccauggagucccaucgauauacaucaucucagcuguccgaacaaucuuguuguggaagaugaagggugcaccaaucugucuggauuuuccuacauggaacucaaagugggauauauuucagccauaaaagugaacggauucaccuguacagguguggugacagaagcagaaaccuacacgaacuuuguugguuaugucaccaccacguuuaagagaaagcacuuucgcccuaugccggaugcgugcagagccgcauacaacuggaagauggcuggugaccccagguaugaagagucucugcacaauccguacccugacuaccacuggcuccgaacugucaagaccaccaaggagucccuugucaucauaucuccgagcguugcagauuuggacccguacgauaaaucccuucacucgagaguuuuuccuggcggaaaaugcucaggaauaaccguguccuccacuugcugcucuacuaaccacgacuacaccaucuggaugccugaaaauccuagacugggaacuucgugugacauuuucaccaauaguagagggaagagggcaucaaaagggggcaagacuuguggauuuguggaugaaagaggcuuguacaagucucuaaagggagcaugcaaaaugaagcuaugugggguucuaggacuuagacuuauggacggaacauggguugcaauucagacaucagaugagaucaaauggugcucuccugaucagcuaguaaaucuacacgacuuucacucggaugagauugaacaucuuguuguggaggaguuggucaaaaagagggaagagugucuggacgcacuggagacuauuaugaccacaaaguccgugaguuucagacgucuuagucauuugaggaagcuagucccuggguuuggaaaggcguauaccauauucaacaaaaccuugauggaggcugaugcucacuauaaaucaauccggacuuggaaugaaaucauccccucuaaaggguguuuaagaguuggggggagaugucauccucaugugaacgggguguucuucaacggcauuauacuggguccugacggacauguucuaaucccagagaugcaaucgucccuccuccaccagcauauggaauuguuggaguccucagucaucccguugaugcaucccuuagcagacccgucaacagucuuuaaagacggcgacgaggcagaggacuuuguugagguucaccuuccggaugugcacaagcagaucucggggguugaucuuggucucccaaacugggggaaguaugugcugauaagugcaggggcucugacugcauuaauguugaugauuuucuuaaugacguguugcagaagggcuaauagagcagagucaauacaacacaauccuggagagacagggaggaaagugucgguaacuucucacaacggaagggucauaucuucaugggaaucauauaaaagcggaggugagaccaaacuguga

SEQ ID NO: 62984 - RNA, 1575 nt, Artificial Sequence
  derived and/or modified CDS sequence (wt) from glycoprotein__RABV__FJ465384.1
augguuucucagucucuucuguuuguaccccuucugggcuuuucauugugcuucgggaaguuccccauuuacacgauaccagauaaacuuggucccuggagcccgauugauauacaucaucucaguuguccaaacaauuuagucguggaggaugaaggaugcaccaaccuaucaggguucuccuacauggaacuuaaagugggauacaucucagccauaaaaguaaauggguuuacguguacagguguggugacagaggcagaaacuuacacuaacuuugucggcuaugucaccaccacauucaggagaaagcauuuucgcccgacaccggaugcuuguagagcugcguaccacuggaagauggcuggugaccccagauaugaagaaucucugcacaauccguacccugacuaccacuggcuucgaaccguaaagaccaccaaggaaucccucgucaucauauccccuaguguggcagauuuggacccauaugacaaaucccuucacucgagggucuucccuaacgggaagugcucagggcuaacuguauccuccaccuacugcucgacuaaccaugauuacaccauguggaugccugagaauccgagacuggggacaucuugugacaucuuuaccaauagcagagggaagagagcauccagaggaaauaaaacuugcggauucguggaugaaagaggcuuguauaagucucuaaaaggagcauguaaacucaaauuaugugggguucuuggacuuagacuuauugacggaacaugggucgcaaugcaaacgucggacgagaccaaauggugccccccugaucagcugguaaaucuacaugacuuccgcucagacgagaucgaacaucucguuguggaggaguuggucaagaaaagagaggagugucuggaugcauuagaguccaucaugaccaccaagucagugaguuucagacgucucagucacuugagaaaacuugucccuggguucggaaaagcauauaccaucuucaacaaaaccuugauggaagccgaugcucacuacaagucgauccggaccugggaugaaaucguccccucaaaaggguguuugaggguuggagggaagugucauccgcauauaaaugggguguuuuucaauggcauaauacuagggucugauggccauguuuuaaucccagagaugcaaucaucccuccuccagcaacauauagaguugcuggaauccucaguuguucccuugaugcauccuuuagcagacccgucuacagucuucaaggacggaaaugaagcugaagauuuuguugagguucaccuccccgauguacacaagcaggugucagagauugaccugggucuuccaaacuggggaaaguauauucuagugagugcaggagccuugauugcuuugauguugacaauucuccuaauaaccugcugcagaagaguccaucgaccagaacccaagcaacaccgccucagagggacagagaggaagguggcggucaccucccaaagcggaaaagccauaucuucaugggagucauacaagaacgggggugagaccagaauguga

SEQ ID NO: 62985 - RNA, 1575 nt, Artificial Sequence
  derived and/or modified CDS sequence (wt) from glycoprotein__RABV__FJ465385.1
auguuuccucaggcucucuuguuuguaccccuucuggguuugucauuguguuccgggagauucccuauuuacacgauaccagauaaacuuggcccuuggaguccgauugacauacaucaucuuaguuguccaaauaauuuggucguagaagaugagggaugcaccaaccuaucaggauucuccuacauggaacuuaaagugggauacaucucaucuauaaaaguaaguggguucacguguacagguguggugacagaggcagaaaccuacacuaacuuugucgguuaugucacuaccacguucagaagaaagcauuuucgcccgacaccggaugcauguagagccgcacacaacuggaaaauggccggugaucccagauaugaggaaucucugcacaauccauacccugacuaucacuggcuucggaccguaaaaaccaccaaagaaucccuuguuaucauaucccccaguguggcagauuuggacccauaugacaaaucccuucauucgaggguuuuccccaacgggaagugcuccggacuaacaguauucucuaccuacugcucgacuaaccaugaguacacugucuggaugccugagaauccgagacugggaacaucuugugauauuuucaccaauaguagagggaagagagcauccaaaggaaacaagacuugcggguucguggacgaaagaggcuuguacaaaucucuaaaaggagcaugcaagcucaaauuaugugggguucucggacuuagacuuauggauggaacauggguagcgaugcaaacgucagacgagaccaaguggugucccccugaucaauuggugaaucuacacgacuuucgcucagaugagaucgaacaucucguuguggaggaguuggucaagaaaagagaggaguguuuagaugcauuagaguccaucaugaccaccaagucagugaguuucagacgucucagucaccugagaaaacucgucccaggguucggaaaagcauauacuaucuucaacaaaaccuugauggaagccgaugcccacuacaagucaguccggaccuggaaugaaaucauccccucaaaaggguguuuaaggguuggagggaggugucauccucaugugaacgggguguuuuucaauggcauaauacuagggucugacggccacguucuaaucccagagaugcaaucaucccuccuucagcaacauguagaguuguuggaguccucaguuauacccuugaugcacccuuuagcagacccgucuacaguuuucaagggcggugaugaagcggaagauuuuguugagguucaccuucccgauguacauaagcaggucucagggguugaccugggucucccaaacuggggaaaguauauucuggugagugcaggagcucugaucgcccugauacugauaauuuuucuaaugacauguugcagaagauuccgucgaccaaaacccgcacaacacaaucucggaggaacagguaggaaggugucggucacuucccaaagcggaaaggucguaucuucaugggagucauauaagaacggaggugagaccagacuguga

SEQ ID NO: 62986 - RNA, 1575 nt, Artificial Sequence
  derived and/or modified CDS sequence (wt) from glycoprotein__RABV__FJ465386.1
auguuuucucggucucuuuuauuuguaucccuucuggguuuuccauuguguuucgggaaguuccccauuuacacgauaccagauaaacuuggucccuggagcccgauugauauacaucaucucaguuguccaaauaauuuggucguggaggaugaaggaugcaccaaccuaucaggauucuccuacauggagcuuaaagugggauacaucucagcuauaaagguaaauggguuuacguguacagguguggugacagaggcggaaacuuauaccaacuuugucgguuaugucaccaccacguuuagaaggaaacaucuucgcccgacaccggaugccuguagauccgcguacaacuggaagauggccggugaccccagauaugaagaaucucugcauaauccguacccugauuaccauuggcuucgcaccguaaaaaccaccaaggaaucucucgucaucauauccccuaguguggcagauuuggacccauaugacaaaucccuucauucaagggucuuccccaacgggaagugcucagggcugacuguguccucuaccuauugcucgaccaaccaugacuacacuaucuggaugccugagaauccaagacuggggacaucuugugacaucuuuacuaauaguaaaggaaagagagcaucuagaggaaauaagacuugcggauucguggaugaaagaggcuuguauaagucucuaaaaggagcauguaaacucaaauugugugggguucuuggacugagacuuauugauggaacaugggucgcgaugcacacaucggacgagaccaaauggugcccccccgaucaguugguaaaucuacaugacuuccgcucagacgagauugaacaucucguuguggaagaguuggucaagaaaagggaggaguguuuggaugcauuagaguccaucaugaccaccaagucagugaguuucagacgucucagucacuugagaaaacuugucccuggguucggaaaagcauauaccaucuucaacaaaaccuugauggaagccgaugcucacuacaagucaauccggaccugggaugaaaucguccccucgaaaggguguuugaggguuggagggaggugucauccccauguaaaugggguguuuuucaacggcauaauacuagggucugacggccauguucuaaucccggagaugcaaucaucccuccuccagcaacauguagaguuguuggaauccucaguuguucccuuaaugcacccuuuagcagacccgucuacagucuuuaaggacggaaaugaagcugaagauuuuguugagguucaccuccccgauguacacaagcaggucucagggguugaccugggucuccccgacuggggaaaguauauucuggugagugcaggagcucugaucgccuugauguugauaauuuuccuaaugacauguugcagaagagucuaucgacgagaauccaaacaacacagucuuagagggacagagaggaaggugucggucaccucccaaaacggaaaagccauauccucaugggagucauauaagaacgggagugaaaccagaauguga

SEQ ID NO: 62987 - RNA, 1575 nt, Artificial Sequence
  derived and/or modified CDS sequence (wt) from glycoprotein__RABV__FJ465387.1
auguuuucucggucucuuuuauuuguaucccuucuggguuuuccauuguguuucgggaaguuccccauuuacacgauaccagauaaacuuggucccuggagcccgauugauauacaucaucucaguuguccaaauaauuuggucguggaggaugaaggaugcaccaaccuaucaggauucuccuacauggagcuuaaagugggauacaucucagcuauaaagguaaauggguuuacguguacagguguggugacagaggcggaaacuuauaccaacuuugucgguuaugucaccaccacguuuagaaggaaacaucuucgcccgacaccggaugccuguagauccgcguacaacuggaagauggccggugaccccagauaugaagaaucucugcauaauccguacccugacuaccacuggcuucgcaccguaaaaaccaccaaggaaucucucgucaucauauccccuaguguggcagauuuggacccauaugacaaaucccuucauucaagggucuuccccaacgggaagugcucaggguugacuguguccucuacuuauugcucgaccaaccaugacuacacuaucuggaugccugagaauccaagacuggggacaucuugugacaucuuuacuaauaguaaaggaaagagagcaucuagaggaaauaagacuugcggauucguggaugaaagaggcuuguauaagucucuaaaaggagcauguaaacucaaauugugugggguucuuggacugagacuuauugauggaacaugggucgcgaugcacacaucggacgagaccaaauggugcccccccgaucaguugguaaaucuacaugacuuccgcucagacgagauugaacaucucguuguggaagaguuggucaagaaaagggaggaguguuuggaugcauuagaguccaucaugaccacuaagucagugaguuucagacgucucagucacuugagaaaacuugucccuggguucggaaaagcauauaccaucuucaacaaaaccuugauggaagccgaugcucacuacaagucaauccggaccugggaugaaaucauccccucgaaaggguguuugaggguuggagggaggugucauccucauguaaaugggguguuuuucaacggcauaauacuagggucugacggccauguucuaaucccggagaugcaaucaucccuccuccagcaacauguagaguuguuggaauccucaguuguucccuuaaugcacccuuuagcagacccgucuacagucuuuaaggacggaaaugaagcugaagauuuuguugagguucaccuccccgauguacacaagcaggucucagggguugaccugggucucccagacuggggaaaguauauucuggugagugcaggagcccugaucgccuugauguugauaauuuuccuaaugacauguugcagaagaguccaucgacgagaauccaaacaacacagucuuagagggacagagaggaaggugucggucaccucccaaaacggaaaagccauauccucaugggagucauauaagaacgggagugaaaccagaauguga

SEQ ID NO: 62988 - RNA, 1575 nt, Artificial Sequence
  derived and/or modified CDS sequence (wt) from glycoprotein__RABV__FJ465388.1
auguuuucucagucucuuuuauuuguaccccuucuggguuuuucguugugcuucgggaaguuccccauuuacacgauaccagauaaacuuggucccuggagcccgauugauauacaucaucucaguuguccaaacaauuuagucguggaggaugaaggaugcaccaacuuaucaggauucucuuacauggaacuuaaaguaggauacaucucagccauaagaguaaguggguuuacguguacagguguggugacagaggcggaaacuuacacuaacuuugucgguuaugucaccaccaccuucaagagaaagcauuuucgcccgacaccggaugccuguagagcugcguaccacuggaagauggcuggugaccccagauaugaagaaucucuacacaauccguacccugacuaccacuggcuucgaaccguaaaaaccaccaaggagucccucgucaucauauccccuaguguggcagauuuggacccauaugacaaaucccuucacucgagggucuucccuaacgggaagugcucagggcuaacuguauccucuacuuacugcuugacuaaccaugauuacaccaucuggaugccugagaauccgagacuggggacaucgugugacaucuuuaccaauagcagagggaagagagcauccagaggaaauaaaacuugcggauucguggaugaaagaggcuuguauaagucucuaaaaggagcauguaaacucaaauuaugugggguucuuggacuuaggcuuauugauggaacaugggucgcgaugcaaacaucggacgaaacuaaauggugccccccugaucaguugguaaaucuacaugacuuccgcucggaugagaucgagcaucucguuguggaggagcuggucaagaaaagagaggagugucuggaugcauuagaguccaucaugaccaccaagucagugaguuucagacgucucagucacuugagaaaacuuguccccggguucggaaaagcauauaccaucuuuaacaaaaccuuaauggaagccgaugcucacuacaagucaauccggaccugggaugagauuguccccucaaaaggguguuugaggguuggagggaggugucauccgcauguaaauggaguauuuuucaauggcauaauacuagggucugauggccauguuuuaaucccagagaugcaaucaucccuccuccagcaacauguggaacugcuggaauccucaguuguuccccugaugcacccuuuagcagacccguccacagucuuuaaggacggaaaugaagcugaagacuuuguugagguucaccuccccgauguacacaagcaggucucagggguugaccugggucucccaaacuggggaaaguauauucuagugagugcaggagcccugauugccuugauguugacaauuuuccuaaugaccuguugcagaagaguccgucgaccagaacccaaacaacaccgccucagagggacagagaagaagguggcggucaccccccaaagcggaaaagccauauccuccugggagucauacaagaacggggaugagaccagaauguga

SEQ ID NO: 62989 - RNA, 1575 nt, Artificial Sequence
  derived and/or modified CDS sequence (wt) from glycoprotein__RABV__FJ465389.1
augcuuucucagucucuuuuguugguaucccuucuggguuuuccauuauguuucgggaaguuccccauuuacacgauaccagauaaacuuggucccuggagcccgauugauauacaucaucucagcuguccaaacaauuuggucguggaggaugaaggaugcaccagccuaucgggauucuccuauauggagcuuaaagugggauacaucucagccauaaaggugaauggguuuacguguacaggcguggugacagaggcggaaaccuauacaaacuuugucggcuaugucaccacuacguucagaagaaagcaucuucgcccgacaccggaugccuguagauccgcguacaacuggaagauggccggugaccccagauaugaagaaucucugcacaauccuuacccugacuaccacuggcuucgcaccguaaaaaccaccaaggaaucucucgucaucauauccccuaguguagcagauuuggacccauaugacaaaucccuucauucaagggucuuccccaacgggaagugcucagggcuaacuguguccucuaccuauugcucgacuaaccaugacuacaccaucuggaugccugagaauccgagacuggggacaucuugugacaucuuuaccaauagucgaggaaagagagcauccagaggaaauaagacuugcggauuuguggaugaaagaggcuuguauaagucucuaaaaggagcauguaaacucaaauugugugggguucuuggacugagacuuauugauggaacaugggucgcgaugcacacaucggacgagaccaaauggugcccccccgaucaguugguaaaucuacaugacuuccgcucagacgagauugaacaucucguuguggaagaguuggucaagaaaagagaggaguguuuggacgcauuagagucuaucaugacuaccaaaucagugaguuucagacgucucagucacuugagaaaacuuguuccuggguucgggaaagcauauaccaucuuuaacaaaaccuugauggaagccgaugcucacuacaagucaauccggaccugggaugaaaucguccccucgaaaggguguuugaggguuggaggaaggugucauccucauguaaauggcguguuuuucaauggcauaauacuagggucugacggccauguucuaaucccagagaugcaaucaucccuccuccagcaacauguagaguugcuggaauccucaguuguuccuuugaugcacccuuuagcagacccgucuacagucuuuaaggacggaaaugaagcugaagauuuuguugagguucaccuccccgaugugcacaagcaggucucggggguugaccugggucucccagacuggggaaaauauauucuggugagugcaggagcccugaucgccuugauguugauaauuuuccuaaugacauguugcagaagaguccaucgacgagaguccaaacaacacagucucagagggacagagaggaaggugucggucaucucccaaaacggaaaaaccauauccucaugggagucauauaagaacgggagugacaccagaauguga

SEQ ID NO: 62990 - RNA, 1575 nt, Artificial Sequence
  derived and/or modified CDS sequence (wt) from glycoprotein__RABV__FJ465390.1
auguuuucucagacucuauuguuuguaccccuucuaggucuuucauuguguuucgggaaauucccuauuuacacgauaccagacaaacuuggccccuggaguccgauugacauacaucaucucagcuguccgaacaacuuggucguggaggaugaaggaugcaccaaccuaucaggauucuccuacauggaacuuaaagugggauauaucucagcaauaaaaguaaauggguuuacauguacggguguggugacagaggcagaaacuuacacuaacuuugucgguuaugucaccaccacguucagaagaaagcauuuucgcccaacaccggaugcauguagagccgcauacaacuggaaaauggccggugauccuagguaugaagaaucuuugcacaauccauacccagacuaccauuggcuucgaacuguaaagaccaccaaggaaucccucguuaucaucuccccuaguguggcggauuuggacccauaugacaaaucucuucacucaagggucuuccuuaacgggaagugcuccggacuaacaguguccuccaccuacugcucgacuaaccaugauuacacuaucuggaugccugaggauccgagacuggggacaucuugugacauuuuuaucaauaguagagggaagagagcauccaaaggaagcaagacuugcggauucguggaugaaagaggccuguauaagucucuaaaaggagcauguaaacuuaaauuaugugggguucucggacuuagacuuauagauggaacaugggucgcaaugcagacaucagaagagcccaaguggugcccuccugaucaguuggugaaucuacacaacuuucgcucagaugagaucgaacaucucguuguggaggaauuggucaagaaaagagaggagugucuggaugcauuggaguccaucauuaccaccaagucagugaguuucagacgucucagucacuugagaaaacuuguucccggauucggaaaagcauauaccaucuucaacaagaccuugauggaagcugaugcucacuacaagucaauccggaccugggaugaaaucauccccucaaaagggugucuuagaguugggggaaggugucauccucaugugaacgggguguuuuucaauggcauaauacuagggucugauggccacguucuaaucccagagaugcaaucaucacuccuccagcaacauguagaguuguuagaauccucagucauucccuugaugcacccuuuagcagacccgucuacaguuuucaagggcggugaugaagcggaagauuuuguugagauucaccucccugauguacacaagcagaucucagggguugaccugggucucccaaauuggggaaaauauauuuuggugggggcaggagcccuaaucgccuugaugcugauaauuuuccuaauaacauguugcagaggauuccaucgaccaaaauccacacaacacagucucggagggacaggaaggaaggugucagucacuccccaaagcggaaaggucauaucuucaugggagucauauaagaaaggaagugagacccgacuguga

SEQ ID NO: 62991 - RNA, 1575 nt, Artificial Sequence
  derived and/or modified CDS sequence (wt) from glycoprotein__RABV__FJ465391.1
augccuucucagucucuuuuguuuguaucccuucuggguuuuucacuguguuucgggaaguuccccauuuacacgauaccagauaaacuuggucccuggagcccgauugauauacaucaucucaguuguccaaacaauuugguaguggaggaugaaggaugcacuaaccuaucgggauucuccuacauggaacuuaaagugggauacaucucagccauaaaaguaaauggguuuacguguacagguguggugacggaggcagaaaccuauacaaacuuugucgguuaugucaccaccacguucagaagaaagcauuuccgcccuacaccggaugccuguagauccgcguacaacuggaagauggccggugaccccagauaugaagaaucucugcacaauccguacccugacuaccacuggcuucgcaccguuaaaaccaccaaggaaucucucgucaucauauccccuaguguggcagauuuggacccauaugacaaaucccuucauucgagggucuuccccaacggaaaaugcucagggcuaacuguauccucuaccuauugcucgaccaaccaugacuacacuaucuggaugccugagaauccaagacuggggacaucuugugacaucuuuaccaauaguagaggaaagagagcauccagaggaaauaagaccugcggauucguggaugaaagaggcuuguauaagucucuaaaaggagcauguaaacucaaauugugugguguucuuggacugaggcuuauugauggaacaugggucgcaaugcacacaucggacgagaccaaauggugccccccugaucaguugguaaaucuacaugacuuccgcucagacgagauugaacaucucguuguggaggaguuggucaagaaaagagaggaguguuuggaugcauuagaguccaucaugaccaccaagucagugaguuucagacgucucagucacuugagaaaacuuguccccggguucggaaaagcauauaccaucuucaacaaaaccuugauggaggccgaugcucacuacaagucaauccggaccugggaugaaaucguccccucgaaaggaugucuaagggugggggggagaugucauccucauguaaaugggguguuuuucaauggcauaauacuagggucugacggccauguucuaauccccgagaugcaaucaucucuccuucagcaacauguagaguugcuggaauccucaguuguucccuuaaugcacccuuuagcagacccgucuacagucuuuaaggacggaaaugaagcugaagauuuuguugagguucaccuccccgauguacacaagcaggucucaggaguugaccugggucucccagacuggggaagguauauucuggugagugcaggagcccugauuaccuugauguugauaauuuuccuaaugacauguugcagaagaguccaucgacgagaauccaaacaacacagucucagagggacagagaggaaggugucggucacaucccaaagcggaaaagccauauccucaugggagucauauaagaacgggagugaaaccagaauguga

SEQ ID NO: 62992 - RNA, 1575 nt, Artificial Sequence
  derived and/or modified CDS sequence (wt) from glycoprotein__RABV__FJ465392.1
auguuuccucagacucuuuuguuuguaccucuucuaggucuuucauuguguuucgggaaauucccuauuuacacgauaccagacaaacuuggucccuggaguccgauugacauacaucaucucagcuguccgaacaacuuggucguggaggaugaaggaugcacuaaccuaucaggguucuccuacauggaacuuaaagugggauauaucucagccauaaaaguaaauggguuuacauguacggguguggugacggaggcagaaacuuacacuaacuuugucgguuaugucaccaccacuuucagaagaaagcauuuucgcccaacaccggaugcauguagagcagcauacaacuggaaaauggccggugauccuagguaugaagaaucucugcacaauccguacccagacuaccauuggcuucgaacuguaaagaccaccaaggaaucccucguuaucauauccccuaguguggcggauuuggacccauaugacaaaucucuucacucaagggucuuccuuaacgggaagugcuccggacuaacgguguccuccaccuacugcucgacuaaccaugauuacacuaucuggaugccugagaauccgagacugggaacaucuugugacauuuuuaucaauaguagagggaagagagcauccaaaggaaauaagacuugcggauucguggaugaaagaggccuguauaagucucuaaaaggagcauguaaacucaaauuaugugggguucucggacucagacuuauagauggaacauggguugcaaugcagacaucagaggagcccaaguggugccccccugaucaguuggugaaucuacacaacuuucgcucagaugagaucgaacaucucguuguggaggaauuggucaagaaaagagaggagugucuggaugcauuagaguccaucaugaccaccaagucagugaguuucagacgucucagucauuugagaaaacuugucccuggguucggaaaggcauauaccaucuucaacaaaaccuugauggaagcugaugcucacuacaagucaauccggaccugggaugaaaucauccccucaaaagggugucuuaggguuggaggaaggugucauccucaugugaacgggguguuuuucaauggcauaauacuagggucugauggccacguucuaauuccagagaugcaaucaucacuccuccagcaacauguagaguuguuagaauccucagucauucccuugaugcacccuuuagcagacccgucuacaguuuucaaggacggugaugaagcggaagauuuuguugagauucaccuccccgauguacacaaacaaaucucagggguugaccugggucucccaaauuggggaaaguauaucuuggugagugcaggagcccugaucaccuugaugcugacaauuuuccuaauaacauguugcagaggauuccgucgaccaaaguccacgcaacacagucucggagggacaggaaugaaggugucagucacuccccaaagcggaaaagucauaucuuccugggagucauauaagaaaggaggugagacccgacuguga

SEQ ID NO: 62993 - RNA, 1575 nt, Artificial Sequence
  derived and/or modified CDS sequence (wt) from glycoprotein__RABV__FJ465393.1
auguuuucccagucucuuuuguuuguaccccuucuggguuuuucguugugcuccgggaaguuccccauuuacacgauaccagauaaacuuggucccuggagcccgauugauauacaucaucucaguuguccaaacaauuuagucguggaggacgagggaugcaccaaccuaucaggauucucuuacauggaacuuaaagugggauacaucucagccauaagagugaguggguuuacguguacagguguggugacagaggcagaaacuuacacuaacuuugucgguuaugucaccaccacauucaagagaaagcauuuucgcccgacaccugaugccuguagagcugcguaccacuggaagauggcuggugaccccagauaugaagaaucucugcacaauccguacccugacuaccacuggcuucgaaccguaaaaaccaccaaggaaucccucaucaucauauccccuaguguggcagauuuggacccauaugacaaaucccuucacucaaggguuuucccuaacgggaagugcucaggguuaacuguauccucuacuuacugcucgacuaaccacgauuacaccaucuggaugccugagaauccgagacuagggacaucuugugacaucuuuaccaauagcagagggaagagagcauccagaggaaauaaaacuugcggauucguggaugaaagaggcuuguauaagucucuaaaaggagcauguaaacucaaauuaugugggguucuuggacuuaggcuuaucgauggaacguggguugcaaugcaaacaucggacgaaaccaaauggugcccuccugaucaguugguaaaucuacaugacuuccgcucagacgagauugagcaucucguuguggaggaguuggucaagaaaagagaggagugucuggaugcauuagaguccaucaugaccaccaagucagugaguuucagacgucucagucacuugagaaaacuuguccccggauucggaaaagcauauaccaucuucaacaaaaccuugauggaagccgaugcucacuacaagucaauucggaccugggaugagauuguccccucaaaaggguguuugaggguuggagggaggugucacccgcauguaaaugggguauucuucaauggcauaauacuagggucugauggccauguuuuaaucccagagaugcaaucaucccuccuccagcaacauguggaacugcuggaauccucaguaguucccuugaugcacccuuuagcagacccgucuacagucuuuaaggacggaaaugaagcugaagauuuuguugagguucaccuccccgauguacacaagcaggucucagggguugaccugggucucccaaacuggggaagguauauucuagugggugcaggagcccugauugccuugauguugacaauuuuccuauugaccuguugcagaagaguccaucaaccagaacccaaacaacaccgccucagagaggcagagaggaagguggcggucaccucccagagcggaaaagccauauccucaugggagucauacaagaacgggggugaaaccagaauguga

SEQ ID NO: 62994 - RNA, 1575 nt, Artificial Sequence
  derived and/or modified CDS sequence (wt) from glycoprotein__RABV__FJ465394.1
auguuuucucggucucuuuuauuuguaucccuucuggguuuuccauuguguuucgggaaguuccccauuuacacgauaccagauaaacuuggucccuggagcccgauugauauacaucaucucaguuguccaaauaauuuggucguggaggaugaaggaugcaccaaccuaucaggauucuccuacauggagcuuaaagugggauacaucucagcuauaaagguaaauggguuuacguguacagguguggugacagaggcggaaacuuauaccaacuuugucgguuaugucaccaccacguuuagaaggaaacaucuucgcccgacaccggaugccuguagauccgcguacaacuggaagauggccggugaccccagauaugaagaaucucugcauaauccguacccugacuaccacuggcuucgcaccguaaaaaccaccaaggaaucucucgucaucauauccccuaguguggcagauuuggacccauaugacaaaucccuucauucaagggucuuccccaacgggaagugcucagggcugacuguguccucuaccuauugcucgaccaaccaugacuacacuaucuggaugccugagaauccaagacuggggacaucuugugacaucuuuacuaauaguaaaggaaagagagcaucuagaggaaauaagacuugcggauucguggaugaaagaggcuuguauaagucucuaaaaggagcauguaaacucaaauugugugggguucuuggacugagacuuauugauggaacaugggucgcgaugcacacaucggacgagaccaaauggugcccccccgaucaguugguaaaucuacaugacuuccgcucagacgagauugaacaucucguuguggaagaguuggucaagaaaagggaggaguguuuggaugcauuagaguccaucaugaccacuaagucagugaguuucagacgucucagucacuugagaaaacuugucccuggguucggaaaagcauauaccaucuucaacaaaaccuugauggaagccgaugcucacuacaagucaauccggaccugggaugaaaucguccccucgaaaggguguuugaggguuggagggaggugucauccucauguaaaugggguguuuuucaacggcauaauacuagggucugacggccauguucuaaucccggagaugcaaucaucccuccuccagcaacauguagaguuguuggaauccucaguuguucccuuaaugcacccuuuggcagacccgucuacagucuuuaaggacggaaaugaagcugaagauuuuguugagguucaccuccccgauguacacaagcaggucucagggguugaccugggucucccagacuggggaaaguauauucuggugagugcaggagcccugaucgccuugauguugauaauuuuccuaaugacauguugcagaagaguccaucgacgagaauccaaacaacacagucuuagagggacagagaggaaggugucggucaccucccaaaacggaaaagccauauccucaugggagucauauaagaacgggagugaaaccagaauguga

SEQ ID NO: 62995 - RNA, 1575 nt, Artificial Sequence
  derived and/or modified CDS sequence (wt) from glycoprotein__RABV__FJ465395.1
augucuucucagucucuuuuguuuguaucccuuuuggguuuuucacuguguuucgggaaguuccccauuuacacgauaccagauaaacuuggucccuggagcccgauugauauacaucaucucaguuguccaaacaauuugguaguggaggaugaaggaugcacuaaccuaucgggauucuccuacauggaacuuaaagugggauacaucucagccauaaaaguaaacggguuuacguguacagguguggugacggaggcagaaaccuauacaaacuuugucgguuaugucaccaccacguuuagaagaaagcauuuccgcccuacaccggaugccuguagauccgcguacaacuggaagauggccggugaucccagauaugaagaaucucugcacaauccguacccugacuaucacuggcuucgcaccgugaaaaccaccaaggaaucucucgucaucauauccccuaguguggcagauuuggacccauaugacaaaucccuucauucgagggucuuccccaacgggaagugcucagggcuaacuguguucucuaccuauugcucgaccaaccaugacuacacuaucuggaugccugagaauccaagacuggggacaucuugugacaucuuuaccaauaguagaggaaagagagcauccagaggaaauaagaccugcggauucguggaugaaagaggcuuguauaagucucuaaaaggagcauguaaacucaaauugugugggguucuuggacugaggcuuauugauggaacaugggucucgaugcacacaucggacgagaccaaauggugccccccugaucaguugguaaaucuacaugacuuccgcucagacgaaauugaacaucucguuguggaggaguuggucaagaaaagagaggaguguuuggaugcauuagaguccaucaugaccaccaagucagugaguuuuagacgucucagucacuugagaaaacuugucccuggguucggaaaagcauauaccauuuucaacaaaaccuugauggaagccgaugcucacuacaagucaauccggaccugggaugaaaucguccccucgaaaggaugucuaagggugggggggaggugucauccucauguaaaugggguguuuuucaauggcauaauacuagggucugacggccauguucuaaucccagagaugcaaucaucccuucuucagcaacauguagaguugcuggaauccucaguuguucccuuaaugcacccuuuagcagacccgucuacagucuuuaaggacggaaaugaagcugaagauuuuguugagguucaccuucccgauguacacaagcaggucucagggguugaccugggucucccagacuggggaagguaucuucuggugagugcaggagcccugauuaccuugauguugauaauuuuccuaaugacauguugcagaagaguccaucgacgagaauccaaacaacacagucucagagggacagagaggaaggugucggucacaucccaaagcggaaaagccauauccucaugggagucauauaagaacgggagugaaaccagaauguga

SEQ ID NO: 62996 - RNA, 1575 nt, Artificial Sequence
  derived and/or modified CDS sequence (wt) from glycoprotein__RABV__FJ465396.1
augcuuucucagucucuuuuguugguaucccuucuggguuuuccauuguguuucgggaaguuccccauuuacacgauaccagauaaacuuggucccuggagcccgauugauauacaucaucucagcuguccaaacaauuuggucguggaggaugaaggaugcaccaaccucucaggauucuccuacauggagcuuaaagugggauacaucucagccauaaaggugaauggguuuacguguacaggcguggugacagaggcggaaaccuauacaaacuuugucggcuaugucaccacuacguucagaagaaagcaucuucgcccgacaccggaugccuguagauccgcguacaacuggaagauggccggugaccccagauaugaagaaucucugcacaauccuuacccugacuaccacuggcuucgcaccguaaaaaccaccaaggaaucucucgucaucauauccccuaguguggcagauuuggacccauaugacaaaucccuucauucgagggucuuccccaacgggaagugcucagggcuaacuguguccucuaccuauugcucgacuaaccaugacuacacuaucuggaugccugagaauccaagacuggggacaucuugugacaucuuuaccaauagucgaggaaagagagcauccagaggaaauaagacuugcggauuuguggaugaaagaggcuuguauaagucucuaaaaggagcauguaaacucaaacugugugggguucuuggacugagacuuauugauggaacaugggucgcgaugcacacaucggacgagaccaaauggugcccccccgaucagcugguaaaucuacaugacuuccgcucagacgagauugaacaucucguuguggaagaguuggucaagaaaagagaggaguguuuggacgcauuagagucuaucaugacuaccaagucagugaguuucagacgucucagucacuugagaaaacuugucccuggguucgggaaagcauauaccaucuuuaacaaaaccuugauggaagcugaugcucacuacaagucaauccggaccugggaugaaaucguccccucgaaaggguguuugagggugggaggaaggugucauccucauguaaauggcguguuuuucaauggcauaauacuagggucugacggccauguucuaaucccagagaugcaaucaucucuccuccagcagcauguagaguugcuggaauccucaguuguuccuuugaugcacccuuuagcagacccgucuacagucuuuaaggacggaaaugaagcugaagauuuuguugagguucaccuccccgaugugcacaagcaggucucggggguugaccugggucuuccagacuggggaaaauauauucuggugagugcaggagcccugaucgccuugauguugauaauuuuccuaaugacauguugcagaagaguccaucgacgggaguccaaacaacacagucucagagggacagagaggaaggugucggucaucucccaaaacggaaaagccauauccucaugggagucauauaagaacgggagugacaccagaauguga

SEQ ID NO: 62997 - RNA, 1575 nt, Artificial Sequence
  derived and/or modified CDS sequence (wt) from glycoprotein__RABV__FJ465397.1
augguuucucagucucuucuguuuguaccccuucuggguuuuucauugugcuucgggaaguuccccauuuacacgauaccagauaaacuuggucccuggagcccgauugauauacaucaucucaguuguccaaacaauuuagucguggaggaugaaggaugcaccaaccuaucaggauucuccuacauggaacuuaaagugggauacaucucagccauaaaaguaaauggguuuacguguacagguguggugacagaggcagaaacuuacacuaacuuugucggcuaugucaccaccacauucaggagaaagcauuuucgcccgauaccggaugcuuguagagcugcauaccacuggaagauggcuggugaccccagauaugaagaaucucugcacaauccguacccugacuaccacuggcuucggaccguaaaaaccaccaaggaaucccucgucaucauaucccccaguguggcagauuuggacccauaugacaaaucccuucauucgagggucuucccuaacgggaagugcucagggcuaacuguauccuccaccuacugcucgacuaaccaugauuacaccauauggaugccugagaauccgagacuggggacaucuugugacauauuuaccaauagcagagggaagagagcauccagaggaaauaaaacuugcggauucguggaugaaagaggcuuguacaagucucuaaaaggagcauguaaacuuaaauuaugugggguucuuggacuuagacuuauugacggaacaugggucgcaaugcaaacgucggaugaaaccaaauggugccccccugaucaguuggucaaucuacaugacuuccgcucagacgagaucgaacaucucguuguggaggaguugguuaagaaaagagaggagugucuggaugcauuagaguccaucaugaccaccaagucagugaguuucagacgucucagucacuugagaaaacuugucccuggguucggaaaagcauauaccaucuucaacaaaaccuugauggaagccgaugcucacuacaagucgauccggaccugggaugaaaucguccccucaaaaggguguuugaggguuggagggaggugucauccgcauauaaaugggguguuuuucaauggcauaauacuagggucugauggccauguuuuaaucccagagaugcaaucaucccuccuccagcaacauauggaguugcuggaauccucaguuguucccuugaugcacccuuuagcagacccgucuacagucuucaaggacggaaaugaagcugaagauuuuguugagguucaccuccccgauguacacaagcagguaucagagauugaccugggucuuccaaacuggggaaaguauauucuaguuagugcaggagcccugauugcuuugauguugacaauucuccuaauaaccugcugcagaaaaguccauagaccgaaacccaagcaacaccgccucagagggacagagaggaagguggcggucaccucccaaagcggaaaagccauauccucaugggagucauacaagaacgggggugagaccagaauguga

SEQ ID NO: 62998 - RNA, 1575 nt, Artificial Sequence
  derived and/or modified CDS sequence (wt) from glycoprotein__RABV__FJ465398.1
augucuucucagucucuuuuguuuguaucccuucuggguuuuucacuguguuucgggaaguuccccauuuacacgauaccagauaaacuuggucccuggagcccgauugauauacaucaucucaguuguccaaacaauuugguaguggaggaugaaggaugcacuaacuuaucgggauucuccuacauggaacuuaaagugggauauaucucagccauaaaaguaaauggguuuacguguacagguguggugacggaggcagaaaccuauacaaacuuugucgguuaugucaccaccacguucagaagaaagcauuuccgcccuacaccggaugcuuguagguccgcguacaacuggaagauggccggugaccccagauaugaagaaucucugcacaauccguacccugacuaccacuggcuucgcaccguuaaaaccaccaaggaaucucucgucaucauauccccuaguguggcagauuuggauccauaugacaaaucccuucauucgagggucuuccccaacggaaagugcucagggcuaacuguguccucuaccuauugcucgaccaaccaugacuacacuaucuggaugccugagaauccaagacuggggacaucuugugacaucuuuaccaauaguagaggaaagagagcauccagaggaaauaagaccugcggauucguggaugaaagaggcuuguauaagucucuaaaaggagcauguaaacucaaauugugugguguucuuggacugaggcuuauugauggaacaugggucgcgaugcacacaucagacgagaccaaauggugccccccugaucaguugguaaaucuacaugacuuccgcucagacgagauugaacaucucguuguggaggaguuggucaagaaaagagaggaguguuuggaugcauuagaguccaucaugaccaccaagucagugaguuucagacgucucagucacuugagaaaacuuguccccggguucggaaaagcauauaccaucuucaacaaaaccuugauggaggcugaugcucacuacaagucaauccggaccugggaugaaaucguccccucgaaaggaugucuaagggugggggggagaugucauccucauguaaaugggguguuuuucaauggcauaauacuagggucugacggccauguucuaauccccgagaugcaaucaucccuccuucagcaacauguagaguugcuggaauccucaguuguucccuuaaugcacccuuuagcagacccgucuacagucuuuaaggacggaaaugaagcugaagauuuuguugagguucaccuccccgauguacacaagcaggucucagggguugaccugggucucccagacuggggaagguauauucuggugagugcaggagcccugauuaccuugauguugauaauuuuccuaaugacauguugcagaagaguccaucuacgagaauccaaacgacacagucucagagggacagagaggaaggugucggucacaucccaaagcggaaaagccauauccucaugggagucauauaagaacgggagugaaaccagaauguga

SEQ ID NO: 62999 - RNA, 1575 nt, Artificial Sequence
  derived and/or modified CDS sequence (wt) from glycoprotein__RABV__FJ465399.1
augucuucucagucucuuuuguuuguaucccuucuggguuuuucacugugcuucgggaaguuccccauuuacacgauaccagauaaacuuggucccuggagcccgauugauauacaucaucucaguuguccaaacaauuuggugguggaggaugaaggaugcacuaaccuaucgggauucuccuacauggaacuuaaagugggauacaucucagccauaaaaguaaauggguucacguguacagguguggugacggaggcagaaaccuauacaaacuuugucgguuaugucaccaccacguucagaagaaagcauuuccgcccuacaccggaugccuguagauccgcguacaacuggaagauggccggugaccccagauaugaagaaucucugcacaauccguacccugacuaucacuggcuucgcaccguuaaaaccaccaaggaaucucucgucaucauauccccuaguguggcagauuuggacccauaugacaaaucccuucauucgagggucuuccccaacggaaagugcucagggcuaacuguauucucuaccuauugcucgaccaaccaugacuacacuaucuggaugccugagaauccaagacuggggacaucuugugacaucuuuaccaauaguagagggaagagagcauccagaggaaauaagaccugcggauucguggaugagagaggcugguauaagucucuaaaaggagcauguaaacucaaauugugugguguucuuggacugaggcuuauugauggaacaugggucgcgaugcacacaucggacgagaccaaauggugccccccugaucaguugguaaaucuacaugacuuccgcucagacgagauugaacaucucguuguggaggaguuggucaagaaaagagaggaguguuuggaugcauuagaguccaucaugaccaccaagucagugaguuucagacgucucagucacuugagaaaacuuguccccggguucggaaaagcauauaccaucuucaacaaaaccuugauggaggccgaugcucacuacaagucaauccggaccugggaugaaauuguccccucuaaaggaugucuaagggugggggggagaugucauccucauguaaaugggguguuuuucaauggcauaauacuagggucugacggccauguucuaauccccgagaugcaaucaucccuccuucagcaacauguagaguugcuggaauccucaguuguucccuuaaugcacccuuuagcagacccgucugcagucuuuaaggauggaaaugaagcugaagauuuuguugagguucaccuccccgauguacacaagcaggucucagggguugaccugggucucccagacuggggaagguauauucuggugagugcaggagcccugauuaccuugauguugauaauuuuccugaugacauguugcagaagaguccaucgacgagaauccaagcaacacagucucagagggacggagaggaaggugucggucacaucccaaagcggaaaagccauauccucaugggagucauauaagaacgggagugaaaccagaauguga

SEQ ID NO: 63000 - RNA, 1575 nt, Artificial Sequence
  derived and/or modified CDS sequence (wt) from glycoprotein__RABV__FJ465400.1
auguuuccucagacucuuuuguuuguaccccuucuaggucuuucuuuguguuucgggaaauucccuauuuacacgauaccagacaaacuuggccccuggaguccgauugacauacaucaucucagcuguccgaacaacuuggucguggaggaugaaggaugcaccaaccuaucaggguucuccuacauggaacucaaagugggauauaucucagccauaaaaguaaauggguuuacauguacggguguggugacagaggcagaaacuuacacuaacuuugucgguuaugucaccaccacguucagaagaaagcauuuucguccaacaccggaugcauguagagccgcauacaacuggaaaauggccggugauccuagauaugaagaaucucugcacaauccauacccagacuaccauuggcuucgaacuguaaagaccaccaaggaaucccucguuaucauauccccuaguguggcggauuuggacccauaugacaagucucuucacucaagggucuuccuuaacgggaagugcuccggacuaacgguguccuccacuuacugcucgacuaaccaugauuacucuaucuggaugccugagaauccgagacugggaacaucuugugacauuuuugucaauagcagagggaagagagccuccaaaggaaacaagacuugcggauucguggaugaaagaggcuuguauaagucucuaaaaggagcauguaaacucaaauuaugugggguucucggacucagacuuauagauggaacaugggucgcaaugcagacaucagaagagcccaaguggugccccccugaucaguugguaaaucuacacaacuuucgaucagaugagaucgaacaucucguuguggaggaauuggucaagaagagagaggagugucuggaugcauuagaguccaucaugaccaccaagucagugaguuucagacgucucagucacuugagaaagcuugucccuggguucggaaaagcauauaccaucuucaacaaaaccuugauggaagccgaugcucacuauaagucaauccggaccugggaugaaaucauccccucaaaagggugucuuaggguuggaggaaggugucauccucaugugaacgggguguuuuucaacggcauaauacuagggucugauggccauguucuaaucccagagaugcaaucaucacuccuccagcaacauguagaguuguuagaauccucagucauucccuugaugcacccuuuagcagacccgucuacagcuuucaaagacggugaugaagcggaagauuuuguugagauucaccuccccgauguacacaagcagaucucugggguugaccugggucucccgaacuggggaaaguauauuuuggugagugcaggagcccugauugcuuugaugcugacaauuuuccuaauaacauguugcagaggauuccaucaaccaaaauccacacaacacagucucggagggacagaaaggaaggugucagucacuccccuaagcggaaagguuauaucuucaugggagucauauaagaagggaggugagacccgacuguga

SEQ ID NO: 63001 - RNA, 1575 nt, Artificial Sequence
  derived and/or modified CDS sequence (wt) from glycoprotein__RABV__FJ465401.1
augucuucucagucucuuuuguuugcaucccuucuggguuuuucacuguguuucgggaaguuccccauuuacacgauaccagauaaacuuggucccuggagcccgauugauauacaucaucucaguuguccaaacaauuugguaguggaggaugaaggaugcacuaaccuaucgggauucuccuacauggaacuuaaagugggauacaucucagccauaaaaguaaauggguuuacguguacagguguggugacggaggcagaaaccuauacaaacuuugucgguuaugucaccaccacguucagaagaaagcauuuccgcccuacaccggaugccuguagauccgcguacaacuggaagauggccggugaccccagauaugaagaaucucugcacaauccguacccugacuaucacuggcuucgcaccguaaaaaccaccaaggaaucucucgucaucauauccccuaguguggcagauuuggacccauaugacaaaucccuucauucgagggucuuccccaacggaaagugcucagggcuaacuguguccucuaccuauugcucgaccaaccacgacuacacuaucuggaugccugagaauccaagacuggggacaucuugugacaucuuuaccaauaguagaggaaagagagcauccagaggaaauaagaccugcggauucguggaugaaagaggcuuguauaagucucuaaaaggagcauguaaacucaaauugugugggguucuuggacugaggcuuauugauggaacaugggucgcgaugcacacaucggacgagaccaaauggugccccccugaucaguugguaaaucuacaugacuuccgcucagacgaaauugaacaucucguuguggaggaguuggucaagaaaagagaggaguguuuggaugcauuagaguccaucaugaccaccaagucagugaguuuuagacgucucagucacuugagaaaacuugucccuggguucggaaaagcauauaccaucuucaacaaaaccuugauggaagccgaugcucacuacaagucaauccggaccugggaugaaaucguccccucgaaaggaugucuaagggugggggggaggugucauccucauguaaaugggguguuuuucaauggcauaauacuagggucugacggccauguucuaaucccagagaugcaaucaucccuccuucagcaacauguagaguugcuggaauccucaguuguucccuuaaugcacccuuuagcagacccgucuacagucuuuaaggacggaaaugaagcugaagauuuuguugagguucaccuccccgacguacacaagcaggucucagggguugaccugggucucccagauuggggaagguaucuucuggugagugcaggagcccugauuaccuugauguugauaauuuuccuaaugacauguugcagaagaguccaucgacgagaauccaaacaacacagucucagagggacagagaggaaggugucggucacaucccaaagcggaaaagccauaucuucaugggagucauauaagaacgggagugaaaccagaauguga

SEQ ID NO: 63002 - RNA, 1575 nt, Artificial Sequence
  derived and/or modified CDS sequence (wt) from glycoprotein__RABV__FJ465402.1
auguucccucaagcucucuuguuuguaccccuucuggguuuuucguugugcuuugggaaauuccccauuuacacgauaccagauaaacuuggucccuggaguccgauugacauacaucaucucaguugcccaaacaauuugguuguagaggaugaaggaugcaccaaccuaucaggguucuccuacauggaacuuaaagugggauacaucucagccauaaagguaaacggguuuacauguacagguguggugacagaggcagaaaccuacacuaacuuugucgguuaugucaccaccacguucagaagaaagcauuuucgcccgacaucggaugccuguagagccgcguacaacuggaagauggccggugaccccagauaugaggaaucucugcacaauccguacccugauuaccacuggcuucgaacuguaaaaaccaccaaggaaucccuugucauaauaucuccuaguguggcagauuuagauccuuaugacaaaucccuucacucgagggucuucccuaacggaaggugcucagggcuuacgguguccucuaccuacugcucgaccaaccaugauuacaccaucuggaugccugagaauccgagacuggggacaucuugugacaucuuuacaaauaguagagggaagagagcaucuaaaggaaacagaaccuguggauucguggaugaaagaggcuuguauaagucucuaaaaggagcuuguaaacucaaauuaugugggguucuggggcuuagacuuauggauggaacaugggucgcgaugcaaacgucggaagagaccaaguggugcccuccugaucaguuaguaaaucuacacgacuuccgcucagacgaaauugaacaucucguuguggaggaguuggucaagaaaagagaggagugcuuggaugcauuagagucuaucaugaccaccaagucagugaguuucagacgucucagucacuugaggaaacuugucccuggguucggaaaagcauauacuaucuucaacaaaaccuugauggaagccgaugcucacuacaagucaaucaggaccuggaaugaaauuauccccucaaaaggguguuugagggucggagggagaugucauccucaugugaaugggguguuuuucaacggcauaauacuagggucugacggccacguucuaauuccagaaaugcaaucaucccuccuucagcaacauguagaguugcuggaauccucaguuguucccuuaaugcauccuuuagcagacccaucuacagucuucaaggacggaggugaagcggaagauuuuguugagguucaccuucccgauguacacaagcaggucucagggguggacuugggucucccaagcuggggaaaguauauucuuguggguucaggagcccucauugccuugguguugauaauuuuccuaaugacauguuguaggagagucagucgaccagaguccacacaacacagucucaggggaacagggaugaaggugucaaucaccucucaaaguggaaaggccauaccuucaugggagucauauaagagcaaaaaugagaccaaaauguga

SEQ ID NO: 63003 - RNA, 1575 nt, Artificial Sequence
  derived and/or modified CDS sequence (wt) from glycoprotein__RABV__FJ465403.1
auguuuccucagacucuuuuguuuguaccucuucuaggucuuucauuguguuucgggaaauucccuauuuacacgauaccagacaaacuuggucccuggaguccgauugacauacaucaucucagcuguccgaacaacuuggucguggaggaugaaggaugcacuaaccuaucaggguucuccuacauggaacuuaaagugggauauaucucagccauaaaaguaaauggguuuacauguacggguguggugacagaggcagagacuuacacuaacuuugucgguuaugucaccaccacuuucagaagaaagcauuuucgcccgacaccggaugcauguagagcagcauacaacuggaaaguggccggugauccuagguaugaagaaucucugcacaauccguacccagacuaccauuggcuucgaacuguaaagaccaccaaggaaucccucguuaucauauccccuaguguggcggauuuggacccauaugacaaaucucuucacucaagggucuuccuuaacgggaagugcuccggacugacggugucuuccaccuacuguucgacuaaccaugauuacacuaucuggaugccugagaauccgagacugggaacaucuugugacauuuuaucaaauaguagagggaagagagcauccaaaggaaauaagacuugcggauucguggaugaaagaggcuuguauaagucucuaaaaggagcauguaaacucaaauuaugugggguucucggacucagacuuauagauggaacauggguugcaaugcagacaucagaggagcccaaguggugccccccugaucaguuggugaaucuacacaacuuucgcucagaugagaucgaacaucucguuguggaggaauuggucaagaaaagagaggagugucuggaugcauuagaguccaucaugaccaccaagucagugaguuucagacgucucagucauuugagaaaacuugucccuggguucggaaaggcauauaccaucuucaacaaaaccuugauggaagccgaugcucacuacaagucaauccggaccugggaugaaaucauccccucaaaagggugucuuaggguuggaggaaggugucauccucaugugaacgggguguuuuucaauggcauaauacuagggucugauggccacguucuaauuccagagaugcaaucaucacuccuccagcaacauguagaguuguuagaauccucagucauucccuugaugcacccuuuagcagacccgucuacaguuuucaaggacggugaugaagcggaagauuuuguugagauucaccuccccgauguacacaaacaaaucucagggguugaccugggucucccaaauuggggaaaguauaucuugaugagugcaggagcccugaucaccuugaugcugacaauuuucuuaauaacauguugcagaggauuccgucgaccaaaguccacgcaacacagucucggagggacaggaaugaaggugucagucacuccccaaagcggaaaagucauaucuuccugggagucauauaagaaaggaggugagacccgacuguga

SEQ ID NO: 63004 - RNA, 1575 nt, Artificial Sequence
  derived and/or modified CDS sequence (wt) from glycoprotein__RABV__FJ465404.1
auguucccucaggcucucuuguuuguaccccuucuggguuuuucguugugcuuugggaaauuccccauuuacacgauaccagauaaacuuggucccuggaguccgauugacauacaucaucucaguugcccaaacaacuugguuguagaggaugaaggaugcaccaaccuaucaggguucuccuacauggaacuuaaagugggauacaucucagccauaaagguaaacggguuuacauguacaggcguggugacagaggcagaaaccuacacuaacuuugucgguuaugucaccaccacguucagaagaaagcauuuucgcccgacaucggaugccuguagagccgcguacaacuggaagauggccggugaccccagauaugaggaaucucuacacaauccguacccugauuaccacuggcuucgaacuguaaaaaccaccaaggaaucccuugucauaauauccccuaguguggcagauuuagauccuuaugacaaaucccuucacucgagggucuucccuaacggaaggugcucagggcuuacgguguccucuaccuucugcucgaccaaccaugauuacaccaucuggaugccugagaauccgagacuggggacaucuugugacaucuuuacaaauaguagagggaagagagcaucuaaaggaaacagaaccuguggauucguggaugaaagaggcuuguauaagucucuaaaaggagcuuguaaacucaaauuaugugggguucuggggcuuagacuuauggauggaacaugggucgcgaugcaaacgucggaagagaccaaguggugcccuccugaucaguuaguaaaucuacacgacuuucgcucagacgaaauugaacaucucguuguggaggaguuggucaagaaaagagaggagugcuuggaugcauuagagucuaucaugaccaccaagucagugaguuucagacgucucagucacuugaggaaacuugucccuggguucggaaaagcauauacuaucuucaacaaaaccuugauggaagccgaugcucacuacaagucaaucaggaccuggaaugaaauuauccccucaaaaggguguuugagggucggagggagaugucauccucaugugaaugggguguuuuucaacggcauaauacuagggucugacggccacguucuuauuccagaaaugcaaucaucccuccuucagcaacauguagaguugcuggaauccucaguuguucccuuaaugcauccuuuagcagacccgucuacagucuucaagaacggaggugaagcggaagauuuuguugaaguucaccuucccgauguacacaagcaggucucagggguugacuugggucucccaagcuggggaaaguauauucuugugaguucaggagcccucauugccuuaguguugguaauuuuccuaaugacauguuguaggaaagucaaucgaccagaauccacacaacacagucucaggggaacagggaugaaggugucaaucaccucucaaaguggaaaggccauaccuucaugggagucauauaagagcgaaaaugagaccaaaauguga

SEQ ID NO: 63005 - RNA, 1575 nt, Artificial Sequence
  derived and/or modified CDS sequence (wt) from glycoprotein__RABV__FJ465405.1
auguuuucucagucucuuuuguugguaucccuucuggguuuuccauugaguuucgggaaguuccccauuuacacgauaccagauaaacuuggucccuggagcccgauugauauacaucaucucaguuguccaaacaauuuggucguggaggaugaaggauguaccaaccuaucaggauucuccuacauggagcuuaaagugggauauaucucagccauaaagguaaauggguuuacguguacagguguggugacagaggcggaaaccuauacaaacuuugucggcuaugucaccaccacguucagaagaaagcaucuucgcccgacaccggaugccuguagauccgcguauaacuggaagguggccggugaccccagauaugaagagucucugcacaauccuuacccugacuaccacuggcuucgcaccguaaaaacaaccaaggaaucucuuguuaucauauccccuaguguggcagauuuggacccauaugacaaaucccuucauucaagggucuuccccaacgggaagugcucagggcugacuguguccucuaccuauugcucgacuaaccaugacuacacuaucuggaugccugagaauccaagacuggggacaucuugugacaucuuuaccaauaguagaggaaagagagcauccaaaggaaauaagacuugcggauuuguggaugaaagaggcuuguauaaaucucuaaaaggagcauguaaacucaaauugugugggguucuuggacugagacuuauugauggaacaugggucgcgaugcacacaucggacgagaccaaauggugcccccccgaucaguugguaaaucuacaugacuuccgcucagacgagauugaacaucucguuguggaagaguuggucaagaaaagagaggaguguuuggacgcauuagaguccaucaugacuaccaagucagugaguuucagacgucucagucacuugagaaaacuugucccuggguucggaaaagcauauaccaucuucaacaaaaccuugauggaggccgaugcucacuacaagucaauccggaccugggaugaaaucauccccucgaaaggguguuugaggguuggagggaggugucauccucauguaaaugggguguuuuucaauggcauaauacuaggguccgacggccauguucuaaucccagagaugcaaucaucccuccuccagcaacauauagaguugcuggaauccucaguuguuccuuugaugcacccuuuagcagacccgucuacagucuuuaaggacggagaugaagcugaagauuuuguugagguucaccuccccgaugugcacaagcaggucucggggguugaccugggucucccagacuggggaaaguauauucuggugagugcaggagcccugaucgccuugauguugauaauuuuucuaaugacauguugcagaagaguccaucgacgagaauccaaacaacacaguuuuagagggacagagaggaaggugucggucaccucccaaaacggaaaagccauauccucaugggagucauauaagaacgggagugacaccagaauguga

SEQ ID NO: 63006 - RNA, 1575 nt, Artificial Sequence
  derived and/or modified CDS sequence (wt) from glycoprotein__RABV__FJ465406.1
auguuuucucagucucuuuuguugguaucccuucuggguuuuccauuguguuucgggaaguuccccauuuacacgauaccagauaaacuuggucccuggagcccgauugauauacaucaucucaguuguccaaacaauuuggucguggaggaugaaggaugcaccaaccuaucaggauucuccuacauggagcuuaaagugggauacaucucagccauaaagguaaauggguuuacguguacagguguggugacagaggcggaaaccuauacaaacuuugucggcuaugucaccaccacguucagaagaaagcaucuucgcccgacaccggaugccuguagauccgcguacaacuggaagauggccggugaccccagauaugaagaaucucugcacaauccuuaccccgacuaccacuggcuucgcaccguaaaaaccaccaaggaaucucucgucaucauauccccgaguguggcagauuuggacccauaugacaaaucccuucauucaagggucuuccccaacgggaagugcucagggcuaacuguguccucuaccuauugcucgacuaaccaugacuacacuaucuggaugccugagaauccuagacuggggacaucuugugacaucuuuaccaauaguagaggaaagagagcauccagaggaaauaagacuugcggauuuguggaugaaagaggcuuguauaagucucuaaaaggagcauguaaacucaaauugugugggguucuuggacugagacuuauugauggaacaugggucgcgaugcacacaucggacgagaccaaauggugcccccccgaucaguugguaaaucuacacgacuuccgcucagacgaaauugaacaucucguuguggaagaguuggucaagaaaagagaggaguguuuggacgcauuagaguccaucaugacuaccaagucagugagcuucagacgucucagucacuugagaaaacuugucccuggguucggaaaagcauauaccauauucaacaaaaccuugauggaagccgaugcucacuacaagucaauccggaccugggaugaaaucguccccucgaaaggguguuugaggguuggagggaggugucauccucauguaaaugggguguuuuucaauggcauaauacuaggguccgacggccacguucuaaucccagagaugcaaucaucccuccuccagcaacauguagaguugcuggaauccucaguuguuccuuugaugcacccuuuagcagacccgucuacagucuuuaaggaaggaaaugaagcugaagauuuuguugagguucaccuccccgaugugcacaagcaggucucggggguugaccugggucucccagacuggggaaaguauauucuggugagugcaggagcccugaucgcccugauguugauaauucuccuaaugacauguugcagaagaguccaucgacgagaauccaaacaacacagucucagagggacagagaggaaggugucggucaccucccaaaacggaaaagccauauccucaugggagucauauaagaacaggagugacaccagaauguga

SEQ ID NO: 63007 - RNA, 1575 nt, Artificial Sequence
  derived and/or modified CDS sequence (wt) from glycoprotein__RABV__FJ465407.1
auguucccucaggcucucuuguuuguaccccuucuggguuuuucguugugcuuugggaaauuccccauuuacacgauaccagauaaacuuggucccuggaguccgauugacauacaucaucucaguugcccaaacaacuugguuguagaggaugaaggaugcaccaaccuaucaggguucuccuacauggaacuuaaagugggauacaucucagccauaaagguaaacggguuuacauguacaggcguggugacagaggcagaaaccuacacuaacuuugucgguuaugucaccaccacguucagaagaaagcauuuucgcccgacaucggaugccuguagagccgcguacaacuggaagauggccggugaccccagauaugaggaaucucuacacaauccguacccugauuaccacuggcuucgaacuguaaaaaccaccaaggaaucccuugucauaauauccccuaguguggcagauuuagauccuuaugacaaaucccuucacucgagggucuucccuaacggaaggugcucagggcuuacgguguccucuaccuucugcucgaccaaccaugauuacaccaucuggaugccugagaauccgagacuggggacaucuugugacaucuuuacaaauaguagagggaagagagcaucuaaaggaaacagaacuuguggauucguggaugaaagaggcuuguauaagucucuaaaaggagcuuguaaacucaaauuaugugggguucuggggcuucgacuuauggauggaacaugggucgcgaugcaaacgucggaagagaccaaguggugccccccugaucaguuaguaaaucuacacgacuuucgcucagacgaaauugaacaucucguuguggaggaguuggucaagaaaagagaggagugcuuggaugcauuagagucuaucaugaccaccaagucagugaguuucagacgucucagucacuugaggaaacuugucccuggguucggaaaagcauauacuaucuucaacaaaacccugauggaagccgaugcucacuacaagucaaucaggaccuggaaugaaauuauccccucaaaaggguguuugagggucggagggagaugucauccucaugugaaugggguguuuuucaacggcauaauacuagggucugacggccacguucuuauuccagaaaugcaaucaucccuccuucagcaacauguagaguugcuggaauccucaguuguucccuuaaugcauccuuuagcagacccgucuacagucuucaaggacggaggugaagcggaagauuuuguugagguucaccuucccgauguacacaagcaggucucagggguugacuugggucucccaagcugggggaaguauauucuuguggguucaggagcccucauugccuuaguguugguaauuuuccuaaugacauguuguaggaaagucaaucgaccagaauccacacaacacagucucaggggaacagggaugaaggugucaaucaccucucaaaguggaaaggccauaccuucaugggagucauauaagagcgaaaaugagaccaaaauguga

SEQ ID NO: 63008 - RNA, 1575 nt, Artificial Sequence
  derived and/or modified CDS sequence (wt) from glycoprotein__RABV__FJ465409.1
auguuuccucagacucuuuuguuuguaccucuucuaggucuuucuuuguguuucgggaaauucccuauuuacacgauaccagacaaacuuggccccuggaguccgauugacauacaucaucucagcuguccgaacaacuuggucguggaggaugaaggaugcaccaaucuaucaggguuuuccuacauggaacucaaagugggguauaucucagccauaaaaguaaauggguuuacauguacggguguggugacagaggcagaaacuuacacuaacuuugucgguuaugucaccaccacguucagaagaaagcauuuucguccaacaccggaugcguguagagccgcauacaacuggaaaauggccggugauccuagauaugaagaaucucugcacaauccauacccagacuaccauuggcuucgaacuguaaagaccaccaaggaaucccucguuaucauauccccuaguguggcggauuuggacccauaugacaagucucuucacucaagggucuuccuuaacgggaagugcuccggacuaacgguauccuccaccuacugcucgacuaaccaugauuacucuaucuggaugccugagaauccgagacugggaacaucuugugacauuuuugucacuagucgagggaagagagcguccaaaggaagcaagacuugcggauucguggaugaaagaggccuguauaagucucuaaaaggagcauguaaacucaaauuaugugggguucucggacucagacuuauagauggaacaugggucgcaaugcagacaucagaagagcccaaguggugccccccugaucaguugguaaaucuacacaacuuucggucagaugagaucgaacaucucguuguggaggaguuggucaagaagagagaggagugucuggaugcauuagaguccaucaugaccaccaagucagugaguuucagacgucucagucacuugagaaagcuugucccuggguucgggaaagcauauaccaucuucaacaaaaccuugauggaagccgaugcucacuauaagucaauccggaccugggaugaaaucauccccucaaaagggugucuuaggguuggaggaaggugucauccucaugugaacgggguguuuuucaacggcauaauacuagggucugauggccauguuuuaaucccagagaugcaaucaucacuccuccagcaacauguagaguuguuagaauccucagucauucccuugaugcacccuuuggcagacccgucuacagcuuucaaggacggugaugaagcggaagauuuuguugagauucaccucccugauguacacaagcagaucucugggguugaccugggucucccaaacuggggaaaguauauuuuggugagugcaggagcccugauugcuuugaugcugacgauuuuccuaauaacauguugcagaggauuccaucaaccaaaauccacacaacacagucucggagggacaggaaggaaggugucagucacuccccuaagcggaaagguuauaucuucaugggagucauauaagaagggaggugagacccgacuguga

SEQ ID NO: 63009 - RNA, 1575 nt, Artificial Sequence
  derived and/or modified CDS sequence (wt) from glycoprotein__RABV__FJ602447.1
augauuccucaaguuuuuuuguuuguuccccuucuaguuuucucgucguguuuugggaaauuccccauuuacacgauaccagacaaacuugguccauggagucccaucgauauacaucaccucagcuguccgaacaaucugguuguggaagaugaaggaugcaccaaucugucuggauuuuccuacauggaacucaaagugggauauauuucagccauaaaagugaacggauucaccuguacagguguggugaccgaagcagaaaccuacacuaacuuuguugguuaugucaccaccacauuuaagagaaagcacuuucgcccuaugccggaugcgugcagagccgcauacaacuggaagauggcuggugaccccagguaugaagagucucugcacaauccguaccccgacuaccacuggcuccgaacugucaagaccaccaaggagucccuugucaucauaucuccgagcguugcagauuuagacccguacgauaaaucccuucacucgagaguuuuuccuggcggaaaaugcucaggaauaaccguguccuccacuugcugcucuacuaaccacgacuacaccaucuggaugccugaaaauccuagacugggaacuucaugugacauuuucaccaauaguagagggaagagggcaucaaaagggggcaagaccuguggauuuguggaugaaagaggcuuguacaagucucuaaagggagcaugcaagcugaagcuaugugggguucuaggacuuagacuuauggacggaacaugggucgcaauucagacaucagaugagaucaaauggugcucuccugaucagcuaguaaaucuacacgacuuucacucggaugagauugaacaucuuguuguggaggaguuggucaaaaagagggaagagugucuggacgcacuggagacuauuaugaccacaaaguccgugaguuucagacgccuuagucauuugaggaagcuagucccuggguuuggaaaggcguauaccauauucaacaaaaccuugauggaggcugaugcucacuacaaaucaauccggacuuggaaugaaaucauccccuccaaaggguguuuaagaguuggggggagaugucauccucaugugaacgggguguucuucaacggcauuauacuggguccugacggacauguucuaaucccagagaugcagucgucccuccuccaccagcauauggaauuguuggaguccucagucaucccuuugaugcaucccuuagcagacccgucaacagucuuuaaagacggcgacgaggcagaggacuuuguugagguucaccuuccggaugugcacaagcagaucucggggguugaucuuggucucccaaacugggggaaguaugugcugauaagugcaggugcucugacugcauuaauguugacgauuuucuuaaugacguguugcagaaagacuaauagagcagagucaauacaacacaguccuggagagacagggaggaaagugucggugacuucucacaacggaagggucauaucuucaugggaaucauauaaaagcggaagugagaccaagcuguga

SEQ ID NO: 63010 - RNA, 1575 nt, Artificial Sequence
  derived and/or modified CDS sequence (wt) from glycoprotein__RABV__FJ602448.1
augauuccucaaguucuuuuguuuguuccccuucuaguuuucucgucguguuuugggaaauuccccauuuacacgauaccagacaaacuugguccauggagccccaucgauauacaucaucucagcuguccgaacaaucugguuguggaagaugaaggaugcaccaaucugucuggauuuuccuacauggaacucaaagugggauauauuucagccauaaaagugaacggauucaccuguacagguguggugaccgaagcagaaaccuacacuaacuuuguugguuaugucaccaccacguuuaagagaaagcacuuucgcccuaugccggaugcgugcagagccgcauacaacuggaagauggcuggugaccccagguaugaagagucucugcacaauccguaccccgacuaccacuggcuccgaacugucaagaccaccaaggagucccuugucaucauaucuccgagcguugcagauuuggacccguacgauaaaucccuucacucgagaguuuuuccuggcggaaaaugcucaggaauaaccguguccuccacuugcugcucuacuaaccacgacuacaccaucuggaugccugaaaauccuagacugggaacuucaugugacauuuucaccaauaguagagggaagagggcaucaaaagggggcaagacuuguggauuuguggaugaaagaggcuuguacaagucucuaaagggagcaugcaagcugaagcuaugugggguucuaggacuuagacuuauggacggaacaugggucgcgauucagacaucagaugagaucaaauggugcucuccugaucagcuaguaaaucuacacgacuuucacucggaugagauugaacaucuuguuguggaggaguuggucaaaaagagggaagagugucuggacgcacuggagacuauuaugaccacaaaguccgugaguuucagacgucuuagucauuugaggaagcuagucccuggguuuggaaaggcguauaccauauucaacaaaaccuugauggaggcugaugcucacuacaaaucaauccggacuuggaaugaaaucauccccuccaaaggguguuuaagaguuggggggagaugucauccucaugugaacgggguguucuucaacggcauuauacuggguccugacggacauguucuaaucccagagaugcagucgucccuccuccaccagcauauggaauuguuggaguccucagucaucccuuugaugcaucccuuagcagacccgucaacagucuuuaaagacggcgacgaggcagaggacuuuguugagguucaccuuccggaugugcacaagcagaucucggggguugaucuuggucucccaaacugggggaaguaugugcugauaagugcaggugcucugacugcauuaauguugacgaucuucuuaaugacguguugcagaaagacuaauagagcagagucaauacaacacaguccuggagagacagggaggaaagugucggugacuucucacaacggaagggucauaucuucaugggaaucauauaaaagcggaagugagaccaagcuguga

SEQ ID NO: 63011 - RNA, 1575 nt, Artificial Sequence
  derived and/or modified CDS sequence (wt) from glycoprotein__RABV__FJ602449.1
augauuccucaaguucuuuuguuuguuccccuucuaguuuucucgucguguuuugggaaauuccccauuuauacgauaccagacaaacuugguccauggagucccaucgauauacaucaucucagcuguccgaacaaucugguuguggaagaugaaggaugcaccaaucugucugguuuuuccuacauggaacucaaagugggauauauuucagccauaaaagugaacggauucaccuguacagguguggugacagaagcagaaaccuacacuaacuuuguugguuaugucaccaccacguuuaagagaaagcacuuucgcccuaugccggaugcaugcagagccgcauacaauuggaagauggcuggugaccccagguaugaagagucucugcacaauccguacccugacuaccacuggcuccgaacugucaagaccaccaaggagucccuugucaucauaucuccgagcguugcagauuuggacccguacgauaaaucccuucacucgagaguuuuuccuggcggaaaaugcucaggaauaaccguguccuccacuugcugcucuaccaaccacgauuacaccaucuggaugccugaaaauccuagacugggaacuucgugugacauuuucaccaauaguagagggaagagggcaucaaaagggggcaagacuuguggauuuguggaugaaagaggcuuguacaagucucuaaagggagcaugcaagcugaaacuaugugggguucuaggacuuagacuuauggacggaacaugggucgcaauucagacaucagaugagaucaaauggugcucuccugaucagcuaguaaaucuacacgacuuucacucggaugagauugaacaucuuguuguggaggaguuggucaaaaagagggaagagugucuggacgcacuggagacuauuaugaccacaaaguccgugaguuucagacgucuuagucauuugaggaagcuagucccuggguuuggaaaggcguauaccauauucaacaaaacccugauggaggcugaugcucacuauaaaucaauccggacuuggaaugaaaucauccccucuaaaggguguuugagaguuggggggagaugucauccucaugugaacgggguguucuucaacgguauuauacuggguccugacggacauguucuaaucccagagaugcaaucgucccuccuccaccagcauauggaauuguuggaguccucagucaucccuuugaugcaucccuuagcagacccgucaacaguuuuuaaagacggcgacgaugcagaggacuuuguugagguucaccuuccggaugugcacaagcagaucucggggguugaucuuggucucccaaacugggggaaguaugugaugauaagugcaggugcucugacugcauuaauguugaugauuuucuuaaugacguguugcagaaagacuaauagagcagagucaauacagcacaguccuggagagacagggaggaaagugucgguaacuucucacaacggaagggucauaucuucaugggaaucauauaaaagcggaggugagaccaagcuguga

SEQ ID NO: 63012 - RNA, 1575 nt, Artificial Sequence
  derived and/or modified CDS sequence (wt) from glycoprotein__RABV__FJ602450.1
augauuccucaaguucuuuuguuuguuccccuucuaauuuucucgucgugucuugggaaauuccccauuuacacgauaccagacaaacuugguccauggagucccaucgauauacaucaucucagcuguccgaacaaucugguuguggaagaugaaggaugcaccaaucugucuggauuuuccuacauggaacucaaagugggauauauuucagccauaaaagugaacggauucaccuguacagguguggugacagaagcagaaaccuacacuaacuuuguugguuaugucaccaccacguuuaagagaaagcacuuucgcccuaugccggaugcgugcagagccgcauacaacuggaagauggcuggugaccccagguaugaagagucucugcacaauccguacccugacuaccacuggcuccggacugucaagaccuccaaggagucccuugucaucauaucuccgagcguugcagauuuggacccguacgauaaaucccuucacucgagaguuuuuccuggcggaaaaugcucaggaauaaccguguccuccacuugcugcucuacuaaccacgacuacaccaucuggaugccugaaaauccuagacugggaacuucgugugacauuuucaccaauaguagagggaagagggcaucaaaagggggcaagacuuguggauuuguggaugaaagaggcuuguacaagucucuaaagggagcaugcaaguugaagcuaugugggguucuaggacuuagacuuauggacggaacaugggucgcaauucagacaucagaugagaucaaauggugcucuccugaucagcuaguaaaucuacacgacuuucacucggaugagauugaacaucucguuguggaggaguuggucaaaaagagggaagagugucuggacgcacuggagacuauuaugaccacaaaguccgugaguuucaggcgucuuagucauuugaggaagcuagucccuggguuuggaaaggcguauaccauauucaacaaaaccuugauggaggcugaugcucacuauaaaucaauccggacuuggaaugaaaucaucccuucuaaaggguguuuaagaguuggggggagaugucacccucaugugaacgggguguucuucaacggcauuauacuggguccugacggacauguucuaaucccagagaugcaaucgucccuccuccaccagcauauggaauuguuggaguccucagucaucccuuugaugcaucccuuagcagacccgucaacagucuuuaaagacggcgacgaggcagaggacuuuguugagguucaccuuccggaugugcacaagcagaucucggggguugaucuuggucucccaaacugggggaaguaugugcugauaagugcaggugcucugaccgcaucaauguugaugauuuucuuaaugacguguugcagaaagacuaauagagcagagucaauacaacacaguccuggagagacggggaggaaagugucgguaacuucucacaacggaagggucauaucuucaugggaaucauauaaaagcggaggugagaccaagcuguga

SEQ ID NO: 63013 - RNA, 1575 nt, Artificial Sequence
  derived and/or modified CDS sequence (wt) from glycoprotein__RABV__FJ602451.1
augauuccucaaguucuuuuguuuguuccccuucuaguuuucucgucguguuuugggaaauuccccauuuauacgauaccagacaaacuugguccauggagucccaucgauauacaucaucucagcuguccgaacaaucugguuguggaagaugaaggaugcaccaaucugucugguuuuuccuacauggaacucaaagugggauauauuucagccauaaaagugaacggauucaccuguacagguguggugacagaagcagaaaccuacacuaacuuuguugguuaugucaccaccacguuuaagagaaagcacuuucgcccuaugccggaugcaugcagagccgcauacaauuggaagauggcuggugaccccagguaugaagagucucugcacaauccguacccugacuaccacuggcuccgaacugucaagaccaccaaggagucccuugucaucauaucuccgagcguugcagauuuggacccguacgauaaaucccuucacucgagaguuuuuccuggcggaaaaugcucaggaauaaccguguccuccacuugcugcucuaccaaccacgauuacaccaucuggaugccugaaaauccuagacugggaacuucgugugacauuuucaccaauaguagagggaagagggcaucaaaagggggcaagacuuguggauuuguggaugaaagaggcuuguacaagucucuaaagggagcaugcaagcugaaacuaugugggguucuaggacuuagacuuauggacggaacaugggucgcaauucagacaucagaugagaucaaauggugcucuccugaucagcuaguaaaucuacacgacuuucacucggaugagauugaacaucuuguuguggaggaguuggucaaaaagagggaagagugucuggacgcacuggagacuauuaugaccacaaaguccgugaguuucagacgucuuagucauuugaggaagcuagucccuggguuuggaaaggcguauaccauauucaacaaaacccugauggaggcugaugcucacuauaaaucaauccggacuuggaaugaaaucauccccucuaaaggguguuugagaguuggggggagaugucauccucaugugaacgggguguucuucaacgguauuauacugggucccgacggacauguucuaaucccagagaugcaaucgucccuccuccaccagcauauggaauuguuggaguccucagucaucccuuugaugcaucccuuagcagacccgucaacagucuuuaaagacggcgacgaggcagaggacuuuguugagguucaccuuccggaugugcacaagcagaucucggggguugaucuuggucucccaaacugggggaaguaugugcugauaagugcaggugcucugacugcauuaauguugaugauuuucuuaaugacguguugcagaaagacuaauagagcagagucaauacaacacaguccuggagagacagggaggaaagugucgguaacuucucacaacggaagggucauaucuucaugggaaucauauaaaagcggaggugagaccaagcuguga

SEQ ID NO: 63014 - RNA, 1575 nt, Artificial Sequence
  derived and/or modified CDS sequence (wt) from glycoprotein__RABV__FJ602452.1
augguuccucaagcccuucuguuuguaccccuucuggccauuccauuguguuuugggaaauuccccauuuacacgauaccagacaaacucggucccuggagucccauugauauacaucaccucagcuguccaaauaauuugguuguggaggaugaaggauguaccaaucugucaggauucucauacauggaacuuaaaguaggauacauuucagccauaaaggugaacggguucacuuguacggguguggugacggaagcagaaaccuacacuaacuuuguuggcuaugucaccaccacguuuaagagaaagcacuuucgaccaacaccggaugcaugcagauccgcauacaauuggaagauggcuggugaccccagauacgaagagucucugcacaaucccuauccugauuaucauuggcuccggacuguaaaaaccaccaaagaguccuuuguuaucauaucuccaaguguggcagaucuagauccguacgauaaaucccuucauucgagaguuuuuccuagaggaaagugcucaggaauaacggugucuucuaccuacugcucuaccaaccaugacuacaccauuuggaugccugaaaaucccagacuggggaccucuugugauauuuucaccaauagcagagggaagagagcauccaaagggagcaagaccuguggauuuguagaugagagaggcuuguacaaaucucuaaaaggagcaugcaaacugaagcugugugggguucuuggacuuagacuuauggauggaacaugggucgcgauucagacaucagacgagaccaaguggugcccuccugaccagcuagugaaucuacaugacuuucauucggaugagauugaacaucuuguuguggaggaguuggucaagaaaagggaagagugccuagaugcacuggaguccaucaugaccaccaaguccgugagcuuccgacgucucagucacuugaggaaacuugugccuggguucggaaaagcauacaccauauucaauaagaccuugauggaggcugaugcucacuacaaaucgguccggacuuggaacgagaucauccccucuaaaggguguuugagaguuggaggcagaugucauccccaugugaacgggguguuuuuuaaugguauuauccuaggcccugacggccaugucuuaaucccggaaaugcagucaucucuccuucagcagcauauggaguuguuggaauccucggucauccccuuaaugcauccuuuggcagauccaucaacgguuuuuaaagauggugacgaggcggaggauuuuguugagguucaccuuccagaugugcauaagcaggucucaggggucgaucucggucucccaagcugggggaaguauguguugaugagcgcaggcauuuugacugcacugauguugaugaucuucuuaaugacguguugccgaaggacuaauagagcagagucaauacaacacagucuuggagagacagggaggaaagugucgguaaccucccaaagcgggagggucauaucuucaugggagucauacaaaagcggaggugagaccaagcuguaa

SEQ ID NO: 63015 - RNA, 1575 nt, Artificial Sequence
  derived and/or modified CDS sequence (wt) from glycoprotein__RABV__FJ602453.1
augauuccucaaguucuuuuguuuguuccccuucuaguguucucgucguguuuugggaaauuccccauuuacacgauaccagacaaacuugguccauggagucccaucgauauacaucaucucagcuguccgaacaaucugguuguggaagaugaaggaugcaccaaucugucuggauuuuccuacauggaacucaaagugggauauauuucagccauaaaagugaacggauucaccuguacagguguggugacagaagcagaaaccuacacgaacuuuguugguuaugucaccaccacguuuaagagaaagcacuuucgcccuacgccggaugcgugcagagccgcauacaacuggaagauggcuggugaccccagguaugaagagucucugcacaauccguacccugauuaucacuggcuccgaacugucaagaccuccaaggagucccuugucaucauaucuccgagcguugcagauuuggacccauacgauaaaucccuucacucgagaguuuuucccggcggaaaaugcucaggaauaaccguguccuccacuugcugcucuacuaaccacgacuacaccaucuggaugccugaaaauccuagacugggaacuucgugugacauuuucaccaauaguagagggaagagggcaucaaaagggggcaagacuuguggauuuguggaugaaagaggcuuguacaagucucuaaagggagcaugcaagcugaagcuaugugggguucuaggacuuagacuuauggacggaacaugggucgcaauucagacaucagaugagaucaaauggugcucuccugaucagcuaguaaaucuacacgacuuucacucagaugagauugaacaucuuguuguggaggaguuggucaaaaagagggaagagugucuggacgcacuggagacuauuaugaccacaaaguccgugaguuucaggcgucuuagucauuugaggaagcuagucccuggguuuggaaaggcguauaccauauucaacaaaaccuugauggaggcugaugcucacuauaaaucaauccggacuuggaaugaaaucauccccucuaaaggguguuuaagaguuggggggagaugucauccucaugugaacgggguguucuucaacggcauuauacuggguccugacggacauguucuaaucccagagaugcaaucgucccuccuccaccagcauauggaauuguuggaguccucagucaucccuuugaugcaucccuuagcagacccgucaacaguuuuuaaagacggcgacgaggcagaggacuuuguugagguucaccucccggaugugcacaagcagaucucggggguugaucuuggucucccaaacugggggaaguacgugcugguaagugcaggugcucugacugcauuaauguugaugauuuucuugaugacguguugcagaaagacuaauagagcagagucaauacaacacaguccuggagagacagggaggaaagugucgguaacuucucacaacggaagggucauaucuucaugggaaucauauaaaaguggaggugagaccaagcuguga

SEQ ID NO: 63016 - RNA, 1575 nt, Artificial Sequence
  derived and/or modified CDS sequence (wt) from glycoprotein__RABV__FJ602454.1
augauuccucaaguucuuuuguuuguuccccuucuaguuuucucgucguguuuugggaaauuccccauuuauacgauaccagacaaacuugguccauggagucccaucgauauacaucaucucagcuguccgaacaaucugguuguggaagaugaaggaugcaccaaucugucugguuuuuccuacauggaacucaaagugggauauauuucagccauaaaagugaacggauucaccuguacagguguggugacagaagcagaaaccuacacuaacuuuguugguuaugucaccaccacguuuaagagaaagcacuuucgcccuaugccggaugcaugcagagccgcauacaauuggaagauggcuggugaccccagguaugaagagucucugcacaauccguacccugacuaccacuggcuccgaacugucaagaccaccaaggagucccuugucaucauaucuccgagcguugcagauuuggacccguacgauaaaucccuucacucgagaguuuuuccuggcggaaaaugcucaggaauaaccguguccuccacuugcugcucuaccaaccacgauuacaccaucuggaugccugaaaauccuagacugggaacuucgugugacauuuucaccaauaguagagggaagagggcaucaaaagggggcaagacuuguggauuuguggaugaaagaggcuuguacaagucccuaaagggagcaugcaagcugaaacuaugugggguucuaggacuuagacuuauggacggaacaugggucgcaauucagacaucagaugagaucaaauggugcucuccugaucagcuaguaaaucuacacgacuuucacucggaugagauugaacaucuuguuguggaggaguuggucaaaaagagggaagagugucuggacgcacuggagacuauuaugaccacaaaguccgugaguuucagacgucuuagucauuugaggaagcuagucccuggguuuggaaaggcguauaccauauucaacaaaacccugauggaggcugaugcucacuauaaaucaauccggacuuggaaugaaaucauccccucuaaaggguguuugagaguuggggggagaugucauccucaugugaacgggguguucuucaacggcauuauacuggguccugacggacauguucuaaucccagagaugcaaucgucccuccuccaccagcauauggaauuguuggaguccucagucaucccuuugaugcaucccuuagcagacccgucaacagucuuuaaagacggcgacgaggcagaggacuuuguugagguucaccuuccggaugugcacaagcagaucucggggguugaucuuggucucccaaacugggggaaguaugugcugauaagugcaggugcucugacugcauuaauguugaugauuuucuuaaugacguguugcagaaagacuaauagagcagagucaauacaacacaguccuggagagacagggaggaaagugucgguaacuucucacaacggaagggucauaucuucaugggaaucauauaaaagcggaggugagaccaagcuguga

SEQ ID NO: 63017 - RNA, 1575 nt, Artificial Sequence
  derived and/or modified CDS sequence (wt) from glycoprotein__RABV__FJ602455.1
augauuccucaaguucuuuuguuuguuccccuucuaguuuucucgucguguuuugggaaauuccccauuuauacgauaccagacaaacuugguccauggagucccaucgauauacaucaucucagcuguccgaacaaucugguuguggaagaugaaggaugcaccaaucugucugguuuuuccuacauggaacucaaagugggauauauuucagccauaaaagugaacggauucaccuguacagguguggugacagaagcagaaaccuacacuaacuuuguugguuaugucaccaccacguuuaagagaaagcacuuucgcccuaugccggaugcaugcagagccgcauacaauuggaagauggcuggugaccccagguaugaagagucucugcacaauccguacccugacuaccacuggcuccgaacugucaagaccaccaaggagucccuugucaucauaucuccgagcguugcagauuuggacccguacgauaaaucccuccacucgagaguuuuuccuggcggaaaaugcucaggaauaaccguguccuccacuugcugcucuaccaaccacgauuacaccaucuggaugccugaaaauccuagacugggaacuucgugugacauuuucaccaauaguagagggaagagggcaucaaaagggggcaagacuuguggauuuguggaugaaagaggcuuguacaagucucuaaagggagcaugcaagcugaaacuaugugggguucuaggacuuagacuuauggacggaacaugggucgcaauucagacaucagaugagaucaaauggugcucuccugaucagcuaguaaaucuacacgacuuucacucggaugagauugaacaucuuguuguggaggaguuggucaaaaagagggaagagugucuggacgcacuggagacuauuaugaccacaaaguccgugaguuucagacgucuuagucauuugaggaagcuagucccuggguuuggaaaggcguauaccauauucaauaaaacccugauggaggcugaugcucacuauaaaucaauccggacuuggaaugaaaucauccccucuaaaggguguuugagaguuggggggagaugucauccucaugugaacgggguguucuucaacggcauuauacuggguccugacggacauguucuaaucccagagaugcaaucgucccuccuccaccagcauauggaauuguuggaguccucagucaucccuuugaugcaucccuuagcagacccgucaacagucuuuaaagacggcgacgaggcagaggacuuuguugagguucaccuuccggaugugcacaagcagaucucggggguugaucuuggucucccaaacugggggaaguaugugcugauaagugcaggugcucugacugcauuaauguugaugauuuucuuaaugacguguugcagaaagacuaauagagcagagucaauacaacacaguccuggagagacagggaggaaagugucgguaacuucucacaacggaagggucauaucuucaugggaaucauauaaaagcggaggugagaccaagcuguga

SEQ ID NO: 63018 - RNA, 1575 nt, Artificial Sequence
  derived and/or modified CDS sequence (wt) from glycoprotein__RABV__FJ602456.1
augauuccucaaguucuuuuguuuguuccccuucuaguuuucucgucguguuuugggaaauuccccauuuauacgauaccagacaaacuugguccauggagucccaucgauauacaucaucucagcuguccgaacaaucugguuguggaagaugaaggaugcaccaaucugucugguuuuuccuacauggaacucaaagugggauauauuucagccauaaaagugaacggauucaccuguacagguguggugacagaagcagaaaccuacacuaacuuuguugguuaugucaccaccacguuuaagagaaagcacuuucgcccuaugccggaugcaugcagagccgcauacaauuggaagauggcuggugaccccagguaugaagagucucugcacaauccguacccugacuaccacuggcuccgaacugucaagaccaccaaggagucccuugucaucauaucuccgagcguugcagauuuggacccguacgauaaaucccuucacucgagaguuuuuccuggcggaaaaugcucaggaauaaccguguccuccacuugcugcucuaccaaccacgauuacaccaucuggaugccugaaaauccuagacugggaacuucgugugacauuuucaccaauaguagagggaagagggcaucaaaagggggcaagacuuguggauuuguggaugaaagaggcuuguacaagucucuaaagggagcaugcaagcugaaacuaugugggguucuaggacuuagacuuauggacggaacaugggucgcaauucagacaucagaugagaucaaauggugcucuccugaucagcuaguaaaucuacacgacuuucacucggaugagauugaacaucuuguuguggaggaguuggucaaaaagagggaagagugucuggacgcacuggagacuauuaugaccacaaaguccgugaguuucagacgucuuagucauuugaggaagcuagucccuggguuuggaaaggcguauaccauauucaacaaaacccugauggaggcugaugcucacuauaaaucaauccggacuuggaaugaaaucauccccucuaaaggguguuugagaguuggggggagaugucauccucaugugaacgggguguucuucaacggcauuauacuggguccugacggacauguucuaaucccagagaugcaaucgucccuccuccaccagcauauggaauuguuggaguccucagucaucccuuugaugcaucccuuagcagacccgucaacagucuuuaaagacggcgacgaggcagaggacuuuguugagguucaccuuccggaugugcacaagcagaucucggggguugaucuuggucucccaaacugggggaaguaugugcugauaagugcaggugcucugacugcauuaauguugaugauuuucuuaaugacguguugcagaaagacuaauagagcagagucaauacaacacaguccuggagagacagggaggaaagugucgguaacuucucacaacggaagggucauaucuucaugggaaucauauaaaagcggaggugagaccaagcuguga

SEQ ID NO: 63019 - RNA, 1575 nt, Artificial Sequence
  derived and/or modified CDS sequence (wt) from glycoprotein__RABV__FJ602457.1
augauuccucaaguucuuuuguuuguuccccuucuaguuuucucgucguguuuugggaaauuccccauuuacacgauaccagacaaacuugguccauggagucccaucgauauacaucaucucagcuguccgaacaaucugguuguggaagaugaaggaugcaccaaucugucuggauuuuccuacauggaacucaaagugggauauauuucagccauaaaagugaacggauucaccuguacagguguggugaccgaagcagaaaccuacacuaacuuuguugguuaugucaccaccacguuuaagagaaagcacuuucgcccuaugccggaugcgugcagagccgcauacaacuggaagauggcuggugaccccagguaugaagagucucugcacaauccguaccccgacuaccacuggcuccgaacugucaagaccaccaaggagucccuugucaucauaucuccgagcguugcagauuuggacccguacgauaaaucccuucacucgagaguuuuuccuggcggaaaaugcucaggaauaaccguguccuccacuugcugcucuacuaaccacgacuacaccaucuggaugccugaaaauccuagacugggaacuucaugugacauuuucaccaauaguagagggaagagggcaucaaaagggggcaagacuuguggauuuguggaugaaagaggcuuguacaagucucuaaagggagcaugcaagcugaagcuaugugggguucuaggacuuagacuuauggacggaacaugggucgcgauucagacaucagaugagaucaaauggugcucuccugaucagcuaguaaaucuacacgacuuucacucggaugagauugaacaucuuguuguggaggaguuggucaaaaagagggaagagugucuggacgcacuggagacuauuaugaccacaaaguccgugaguuucagacgucuuagucauuugaggaagcuagucccuggguuuggaaaggcguauacuauauucaacaaaaccuugauggaggcugaugcucacuacaaaucaauccgaacuuggaaugaaaucauccccuccaaaggguguuuaagaguuggggggagaugucauccucaugugaacgggguguucuucaacggcauuauacuggguccugacggacauguucuaaucccagagaugcagucgucccuccuccaccagcauauggaauuguuggaguccucagucaucccuuugaugcaucccuuagcagacccgucaacagucuuuaaagacggcgacgaggcagaggacuuuguugagguucaccuuccggaugugcacaagcagaucucggggguugaucuuggucucccaaacugggggaaguaugugcugauaagugcaggugcucugacugcauuaauguugacgauuuucuuaaugacguguugcagaaagacuaauagagcagagucaauacaacacaguccuggagagacagggaggaaagugucggugacuucucacaacggaagggucauaucuucaugggaaucauauaaaagcggaagugagaccaagcuguga

SEQ ID NO: 63020 - RNA, 1575 nt, Artificial Sequence
  derived and/or modified CDS sequence (wt) from glycoprotein__RABV__FJ602458.1
augauuccucaaguucuuuuguuuguuccccuucuaguuuucucgucguguuuugggaaauuccccauuuacacgauaccagacaaacuugguccauggagucccaucgauauacaucaucucagcuguccgaacaaucugguuguggaagaugaaggaugcaccaaucugucuggauuuuccuacauggaacucaaagugggauauauuucagccauaaaagugaacggauucaccuguacagguguggugaccgaagcagaaacuuacacuaacuuuguugguuaugucaccaccacguuuaagagaaagcacuuucgcccuaugccggaugcgugcagagccgcauacaacuggaagauggcuggugaccccagguaugaagagucucugcacaauccguaccccgacuaccacuggcuccgaacugucaagaccaccaaggagucccuugucaucauaucuccgagcguugcagauuuggacccguacgauaaaucccuucacucgagaguuuuuccuggcggaaaaugcucaggaauaaccguguccuccacuugcugcucuacuaaccacgacuacaccaucuggaugccugaaaauccuagacugggaacuucaugugacauuuucaccaauaguagagggaagagggcaucaaaagggggcaagacuuguggauuuguggaugaaagaggcuuguacaagucucuaaagggagcaugcaagcugaagcuaugugggguucuaggacuuagacuuauggacggaacaugggucgcgauucagacaucagaugagaucaaauggugcucuccugaucagcuaguaaaucuacacgacuuucacucggaugagauugaacaucuuguuguggaggaguuggucaaaaagagggaagagugucuggacgcacuggagacuauuaugaccacaaaguccgugaguuucagacgucuuagucauuugaggaagcuagucccuggguuuggaaaggcguauaccauauucaacaaaaccuugauggaggcugaugcucacuacaaaucaauccggacuuggaaugaaaucauccccuccaaaggguguuuaagaguuggggggagaugucauccucaugugaacgggguguucuucaacggcauuauacuggguccugacggacauguucuaaucccagagaugcagucgucccuccuccaccagcauauggaauuguuggaguccucagucaucccuuugaugcaucccuuagcagacccgucaacagucuuuaaagacggcgacgaggcagaggacuuuguugagguucaccuuccggaugugcacaagcagaucucggggguugaucuuggucucccaaacugggggaaguaugugcugauaagugcaggugcucugacugcauuaauguugacgauuuucuuaaugacguguugcagaaagacuaauagagcagagucaauacaacacaguccuggagagacagggaggaaagugucagugacuucucacaacggaagggucauaucuucaugggaaucauauaaaagcggaagugagaccaagcuguga

SEQ ID NO: 63021 - RNA, 1575 nt, Artificial Sequence
  derived and/or modified CDS sequence (wt) from glycoprotein__RABV__FJ602459.1
augauuccucaaguucuuuuguuuguuccccuucuaguuuucucgucgugucuugggaaauuccccauuuacacgauaccagacaaacuugguccauggagucccaucgauauacaucaucucagcuguccgaacaaucugguuguggaagaugaaggaugcaccaaucugucuggauuuuccuacauggaacucaaagugggauauauuucagccauaaaagugaacggauucaccuguacagguguggugacagaagcagaaaccuacacuaacuuuguugguuaugucaccaccacguuuaagagaaagcacuuucgcccuaugcuggaugcgugcagagccgcauacaacuggaagauggcuggugaccccagguaugaagagucucugcacaauccguacccugacuaccacuggcuccggacugucaagaccuccaaggagucccuugucaucauaucuccgagcguugcagauuuggacccguacgauaaaucccuucacucgagaguuuuuccuggcggaaaaugcucaggaauaaccguguccuccacuugcugcucuacuaaccacgacuacaccaucuggaugccugaaaauccuagacugggaacuucgugugacauuuucaccaauaguagagggaagagggcaucaaaagggggcaagacuuguggauuuguggaugaaagaggcuuguacaagucucuaaagggagcaugcaaguugaagcuaugugggguucuaggacuuagacuuauggacggaacaugggucgcaauucagacaucagaugagaucaaauggugcucuccugaucagcuaguaaaucuacacgacuuucacucggaugagauugaacaucucguuguggaggaguuggucaaaaagagggaagagugucuggacgcacuggagacuauuaugaccacaaaguccgugaguuucaggcgucuuagucauuugaggaagcuagucccuggguuuggaaaggcguauaccauauucaacaaaaccuugauggaggcugaugcucacuauaaaucaauccggacuuggaaugaaaucauccccucuaaaggguguuuaagaguuggggggagaugucauccucaugugaacgggguguucuucaacggcauuauacuggguccugacggacauguucuaaucccagagaugcaaucgucccuccuccaccagcauauggaauuguuggaguccucagucaucccuuugaugcaucccuuagcagacccgucaacagucuuuaaagacggcgacgaggcagaggacuuuguugagguucaccuuccggaugugcacaagcagaucucggggguugaucuuggucucccaaacugggggaaguaugugcugauaagugcaggugcucugacugcauccauguugaugauuuucuuaaugacguguugcagaaagacuaauagagcagagucaauacaacacaguccuggagagacggggagaaaagugucgguaacuucucacaacggaagggucauaucuucaugggaaucauauaaaagcggaggugagaccaagcuguga

SEQ ID NO: 63022 - RNA, 1575 nt, Artificial Sequence
  derived and/or modified CDS sequence (wt) from glycoprotein__RABV__FJ712193.1
augauuccucaaguucuauuguuuguuccccuucuaguuuucucgucguguuuugggaaauuccccauuuacacgauaccagacaaacuugguccauggagucccaucgauauacaucaucucagcuguccgaacaaucugguuguggaagaugaaggaugcaccaaucugucuggauuuuccuacauggaacucaaagugggauauauuucagccauaaaagugaacggauucaccuguacagguguggugaccgaagcagaaaccuacacuaacuuuguugguuaugucaccaccacguuuaagagaaagcacuuucgcccuaugccggaugcgugcagagccgcauacaacuggaagauggcuggugaccccagguaugaagagucucugcacaauccguaccccgacuaccacuggcuccgaacugucaagaccaccaaggagucccuugucaucauaucuccgagcguugcagauuuggacccguacgauaaaucccuucacucgagaguuuuuccuggcggaaaaugcucaggaauaaccguguccuccacuugcugcucuacuaaccacgacuacaccaucuggaugccugaaaauccuagacugggaacuucaugugacauuuucaccaauaguagagggaagagggcaucaaaagggggcaagacuuguggauuuguggaugaaagaggcuuguacaagucucuaaagggagcaugcaagcugaagcuaugugggguucuaggacuuagacuuauggacggaacaugggucgcgauucagacaucagaugagaucaaauggugcucuccugaucagcuaguaaaucuacaugacuuucacucggaugagauugaacaucuuguuguggaggaguuggucaaaaagagggaagagugucuggacgcacuggagacuauuaugaccacaaaguccgugaguuucagacgucuuagucauuugaggaagcuagucccuggguuuggaaaggcguauaccauauucaacaaaaccuugauggaggcugaugcucacuacaaaucaauccggacuuggaaugaaaucauccccucaaaaggguguuuaagaguuggggggagaugucauccucaugugaacgggguguucuucaauggcauuauacuggguccugacggacauguucuaaucccagagaugcagucgucccuccuccaccagcauauggaauuguuggaguccucagucaucccuuugaugcaucccuuagcagacccgucaacagucuuuaaagacggcgacgaggcagaggacuuuguugagguucaccuuccggaugugcacaagcagaucucggggauugaucuuggucucccaaacugggggaaguaugugcugauaagugcaggugcucugacugcauuaauguugacgauuuucuuaaugacguguugcagaaagacuaauagagcagagucaauacaacacaguccuggagagacagggaggaaagugucggugacuucucacaacggaagggucauaucuucaugggaaucauauaaaagcggaagugagaccaagcuguga

SEQ ID NO: 63023 - RNA, 1575 nt, Artificial Sequence
  derived and/or modified CDS sequence (wt) from glycoprotein__RABV__FJ712194.1
augauuccucaaguucuauuguuuguuccccuucuaguuuucucgucguguuuugggaaauuccccauuuacacgauaccagacaaacuugguccauggagucccaucgauauacaucaucucagcuguccgaacaaucugguuguggaagaugaaggaugcaccaaucugucuggauuuuccuacauggaacucaaagugggauauauuucagccauaaaagugaacggauucaccuguacagguguggugaccgaagcagaaaccuacacuaacuuuguugguuaugucaccaccacguuuaagagaaagcacuuucgcccuaugccggaugcgugcagagccgcauacaacuggaagauggcuggugaccccagguaugaagagucucugcacaauccguaccccgacuaccacuggcuccgaacugucaagaccaccaaggagucccuugucaucauaucuccgagcguugcagauuuggacccguacgauaaaucccuucacucgagaguuuuuccuggcggaaaaugcucaggaauaaccguguccuccacuugcugcucuacuaaccacgacuacaccaucuggaugccugaaaauccuagacugggaacuucaugugacauuuucaccaauaguagagggaagagggcaucaaaagggggcaagacuuguggauuuguggaugaaagaggcuuguacaagucucuaaagggagcaugcaagcugaagcuaugugggguucuaggacuuagacuuauggacggaacaugggucgcgauucagacaucagaugagaucaaauggugcucuccugaucagcuaguaaaucuacaugacuuucacucggaugagauugaacaucuuguuguggaggaguuggucaaaaagagggaagagugucuggacgcacuggagacuauuaugaccacaaaguccgugaguuucagacgucuuagucauuugaggaagcuagucccuggguuuggaaaggcguauaccauauucaacaaaaccuugauggaggcugaugcucacuacaaaucaauccggacuuggaaugaaaucauccccucaaaaggguguuuaagaguuggggggagaugucauccucaugugaacgggguguucuucaauggcauuauacuggguccugacggacauguucuaaucccagagaugcagucgucccuccuccaccagcauauggaauuguuggaguccucagucaucccuuugaugcaucccuuagcagacccgucaacagucuuuaaagacggcgacgaggcagaggacuuuguugagguucaccuuccggaugugcacaagcagaucucggggguugaccuuggucucccaaacugggggaaguaugugcugauaagugcaggugcucugacugcauuaauguugacgauuuucuuaaugacguguugcagaaagacuaauagagcagagucaauacaacacaguccuggagagacagggaggaaagugucggugacuucucacaacggaagggucauaucuucaugggaaucauauaaaagcggaagugagaccaagcuguga

SEQ ID NO: 63024 - RNA, 1575 nt, Artificial Sequence
  derived and/or modified CDS sequence (wt) from glycoprotein__RABV__FJ712195.1
augaucccucaggcucuucuguuuguaccccuucugguuguuccauuguguuuugggaaauuccccauuuacacgauaccagacaaacucggucccuggagucccauugauauacaucaucucagcuguccgaauaauuugguuguggaggaugaaggauguaccaaucugucaggauucucauacauggaacuuaaagugggauauauuucagccauaaaggugaauggguucacuuguacggguguggugacagaagcagaaaccuacacuaacuuuguuggcuaugucaccaccacguuuaagagaaagcacuuccgaccaacgccggaugcaugcagaucugcauacaauuggaagauggcuggugaccccagauaugaagagucucugcacaaucccuauccggauuaucauuggcuccgaacuguaaaaaccaccaaggaguccuuuguuaucauaucuccgaguguggcagaucuagacccguacgauaaaucccuucauucgagaguuuuuccuagagggaaaugcucaggaauaacgguguccucuaccuacugcucuaccaaccaugacuacaccaucuggaugccugagaaucccagauuggggaccucuugugauauuuucaccaauagccgagggaagagagcauucaaagggagcaagaccuguggauuuguagaugagagaggcuuguacaaaucucuaaaaggagcaugcaaacugaagcugugcggaguucuuggacuuagacuuauggauggaacaugggucgcgauucagacaucagacgagaccaaguggugcccuccugaccagcuaguaaaucuacaugacuuucauucggaugagauugaacaucuuguuguggaggaguuggucaagaaaagagaagagugucuagaugcacuggaguccaucaugaccaccaaguccgugaguuuccgacgucucagucacuugaggaaacuugugccuggguuuggaaaagcauacaccauauucaacaagaccuugauggaggcugaugcucacuacaagucgguccgaacuuggaaugagaucauccccucaaaaggguguuuaagaguugggggcagaugucacccccaugugaacggaguguuuuucaacgguaucauccugggcccugacggccauguccugaucccggaaaugcagucaucccuccuccagcagcauauggagcuguuggaauccucaguuauccccuugaugcauccuuuggcagauccaucaacgguuuuuaaaaauggugacgaggcggaggauuuuguugagguacaccuuccagaugugcauaagcaggucucagggguugaucucggucucccaagcugggggaaguauguguugaugagugcaggcauucugacugcacugauguugaugauuuucuuaaugacguguugccgaaggaccaauagaccagaaucaauacaacacagucuuggagagacggggaggaaagugucgguaaccucccaaagcgggagggucauaucuucaugggagucauauaaaaguggaggugagaccaagcuguaa

SEQ ID NO: 63025 - RNA, 1575 nt, Artificial Sequence
  derived and/or modified CDS sequence (wt) from glycoprotein__RABV__FJ712196.1
augaucccucaggcucuucuguuuguaccccuucugguuguuccauuguguuuugggaaauuccccauuuacacgauaccagacaaacucggucccuggagucccauugauauacaucaucucagcuguccgaauaauuugguuguggaggaugaaggauguaccaaucugucaggauucucauacauggaacuuaaagugggauauauuucagccauaaaggugaauggguucacuuguacggguguggugacagaagcagaaaccuacacuaacuuuguuggcuaugucaccaccacguuuaagagaaagcacuuccgaccaacgccggaugcaugcagaucugcauacaauuggaagauggcuggugaccccagauaugaagagucucugcacaaucccuauccggauuaucauuggcuccgaacuguaaaaaccaccaaggaguccuuuguuaucauaucuccgaguguggcagaucuagacccguacgauaaaucccuucauucgagaguuuuuccuagagggaaaugcucaggaauaacgguguccucuaccuacugcucuaccaaccaugacuacaccaucuggaugccugagaaucccagauuggggaccucuugugauauuuucaccaauagccgagggaagagagcauucaaagggagcaagaccuguggauuuguagaugagagaggcuuguacaaaucucuaaaaggagcaugcaaacugaagcugugcggaguucuuggacuuagacuuauggauggaacaugggucgcgauucagacaucaagagagaccaaguggcgcccuccugaccagcuaguaaaucuacaugacuuucauucggaugagauugaacaucuuguuguggaggaguuggucaagaaaagagaagagugucuagaugcacuggaguccaucaugaccaccaaguccgugaguuuccgacgucucagucacuugaggaaacuugugccuggguuuggaaaagcauacaccauauucaacaagaccuugauggaggcugaugcucacuacaagucgguccgaacuuggaaugagaucauccccucaaaaggguguuuaagaguugggggcagaugucacccccaugugaacggaguguuuuucaacgguaucauccugggcccugacggccauguccugaucccggaaaugcagucaucccuccuccagcagcauauggagcuguuggaauccucaguuauccccuugaugcauccuuuggcagauccaucaacgguuuuuaaaaauggugacgaggcggaggauuuuguugagguacaccuuccagaugugcauaagcaggucucagggguugaucucggucucccaagcugggggaaguauguguugaugagugcaggcauucugacugcacugauguugaugauuuucuuaaugacguguugccgaaggaccaauagaccagaaucaauacaacacagucuuggagagacggggaggaaagugucgguaaccucccaaagcgggagggucauaucuucaugggagucauauaaaaguggaggugagaccaagcuguaa

SEQ ID NO: 63026 - RNA, 1575 nt, Artificial Sequence
  derived and/or modified CDS sequence (wt) from glycoprotein__RABV__FJ719749.1
augaucccucaggcucuucuguuuguaccccuucugguuguuccauuguguuuugggaaauuccccauuuacacgauaccagacaaacucggucccuggaguuccauugauauacaucaucucagcuguccgaauaauuuaguuguggaggaugaaggauguaccaaucugucaggauucucauacauggaacuuaaaguaggauauauuucagccauaaaggugaauggguucacuuguacggguguggugacagaagcagaaaccuacacuaacuuuguuggcuaugucaccaccacguuuaagagaaagcacuuccgaccaacgccggaugcaugcagaucugcauacaauuggaagauggcuggugaccccagauaugaagagucucugcacaaucccuauccggauuaucauuggcuccgaacuguaaaaaccaccaaagaguccuuuguuaucauaucuccaaguguggcagaucuagacccguacgauaagucccuucauucgagaguuuuuccuagagggaaaugcucaggaauaacgguguccucuaccuacugcccuaccaaccaugacuacaccaucuggaugccugagaaucccagauuggggaccucuugugauauuuucaccaauagccgagggaagagagcacucaaagggagcaagaccugcggauuuguagaugagagaggcuuguacaaaucucuaaaaggagcaugcaaacugaagcugugcgggguucccggacucagacuuauggauggaacaugggucgcgauucagacaucagacgagaccaaguggugcccuccugaccagcuaguaaaucuacaugacuuucauucggaugagauugagcaucuuguuguggaggaguuggucaagaaaagagaagagugucuagaugcacuggaguccaucaugaccaccaaguccgugaguuuccgacgucucagucacuugaggaaacuugugccuggguuuggaaaagcauacaccauauucaauaagaccuugauggaggcugaugcucacuacaagucgguccgaacuuggaacgagaucauccccucuaaaggguguuuaagaguugggggcagaugucacccccaugugaacggaguguuuuucaacgguaucauccugggcccugacggccauguccugaucccggaaaugcagucaucccuccuccagcagcauauggagcuguuggaauccucgguuauccccuugaugcauccuuuggcagauccaucaacgguuuuuaaaaauggugacgagguggaggauuucguugagguacaccuuccagaugugcauaagcaggucucgggggucgauuucggucucccaaguugggggaaguauguguugaugagugcaggcauucugacugcacugauguuggugauuuucuuaaugacauguugccgaaggaccaauagaucagaaucaauacaacacagucuuggagagacggggaggaaagugucgguaaccucccaaagcgggagggucauaucuucaugggagucauauaaaaguggaggugagaccaagcuguaa

SEQ ID NO: 63027 - RNA, 1575 nt, Artificial Sequence
  derived and/or modified CDS sequence (wt) from glycoprotein__RABV__FJ719752.1
augaucccucaggcucuucuguuuguaccccuucugguuguuccauuguguuuuggaaaauuccccauuuacacgauaccagacaaacucgguccauggagucccaucgauauacaucaucucagcuguccgaauaauuugguuguggaggaugaaggauguaccaaucugucaggguucucauacauggaacuuaaaguaggauauauuucagccauaaaggugaauggguucacuuguacggguguggugacagaagcagaaaccuacacuaacuuuguuggcuaugucaccaccacguuuaagagaaagcacuuccgaccaacgccggaugcaugcagaucugcauacaauuggaagauggcuggugaccccagauaugaagagucucugcacaaucccuauccggauuaucauuggcuccgaacuguaaaaaccacaaaagaguccuuuguuaucauaucuccaaguguggcagaucuagacccguacgauaaaucccuucauucgagaguuuuuccuagagggaaaugcucaggaauaacgguguccucuaccuacugcccuaccaaccaugacuacaccaucuggaugccugagaaucccagauuggggaccucuugugauauuuucaccaauagccgagggaagagagcauucaaagggagcaagaccuguggauuuguagaugagagaggcuuguacaaaucucuaaaaggagcaugcaaacugaagcugugcggaguucuuggacucagacuuauggauggaacauggguugcgauucagacaucagacgagaccaaguggugcccuccugaccagcuaguaaaucuacaugacuuucauucggaugagauugaacaucuuguuguggaggaguuggucaagaaaagagaagagugucuagaugcacuggaguccaucaugaccaccaaguccgugaguuuccgacgucucagucacuugaggaaacuugugccuggguuuggaaaagcauacaccauauucaauaagaccuugauggaggcugaugcucacuacaagucgguccgaacuuggaacgagaucauccccucuaaaggguguuuaagaguugggggcagaugucacccccaugugaacggaguguuuuucaacgguaucauccugggcccugacggccauguccugaucccggaaaugcagucaucccuccuccagcagcauauggagcuguuggaauccucgguuauucccuugaugcauccuuuggcagauccaucaacgguuuuuaaaaauggugacgaggcggaggauuuuguugagguacaccuuccagaugugcauaagcaggucucagggguugaucucggucucccaagcugggggaaguauguguugaugagugcaggcauucugacugcacugauguugaugauuuucuuaaugacguguugccgaaggaccaauagaccagaaucaauacaacacagucuuggagagacggggaggaaagugucgguaaccucccaaagcgggagggucauaucuucaugggagucauauaaaaguggaggugagaccaagcuguaa

SEQ ID NO: 63028 - RNA, 1575 nt, Artificial Sequence
  derived and/or modified CDS sequence (wt) from glycoprotein__RABV__FJ719756.1
augaucccucaggcucuucuguuuguaccccuucugguuguuccauuguguuuugggaaauuccccauuuacacgauaccagacaaacucgguccauggagucccauugauauacaucaucucagcuguccgaauaauuugguuguggaggaugaaggauguaccaaucugucaggauucucauacauggaacuuaaagugggauauauuucagccauaaaggugaauggguucacuuguacggguguggugacagaagcagaaaccuacacuaacuuuguuggcuaugucaccaccacguuuaagagaaagcacuuccgaccaacgccggaugcaugcagaucugcauacaauuggaagauggcuggugaccccagauaugaagagucucugcacaaucccuauccggauuaucauuggcuccgaacuguaaaaaccaccaaggaguccuuuguuaucauaucuccgaguguggcagaucuagacccguacgauaaaucccuucauucgagaguuuuuccuagagggaaaugcucaggaauaacgguguccucuaccuacugcucuaccaaccaugacuacaccaucuggaugccugagaaucccagauuggggaccucuugugauauuuucaccaauagccgagggaagagagcauucaaagggagcaagaccuguggauuuguagaugagagaggcuuguacaaaucucuaaaaggagcaugcaaacugaagcugugcggaguucuuggacucagacuuauggauggaacaugggucgcgauucagacaucagacgagaccaaguggugcccuccugaccagcuaguaaaucuacaugacuuucauucggaugagauugaacaucuuguuguggaggaguuggucaagaaaagagaagagugucuagaugcacuggaguccaucaugaccaccaaguccgugaguuuccgacgucucagucacuugaggaaacuugugccuggguuuggaaaagcauacaccauauucaauaagaccuugauggaggcugaugcucacuacaagucgguccgaacuuggaacgagaucauccccucuaaaggguguuuaagaguugggggcagaugucacccccaugugaacggaguguuuuucaacgguaucauccugggcccugacggccauguccugaucccggaaaugcagucaucccuccuccagcagcauauggagcuguuggaauccucaguuauccccuugaugcauccuuuggcagauccaucaacgguuuuuaaaaauggugacgaggcggaggauuuuguugagguacaccuuccagaugugcauaagcaggucucagggguugaucucggucucccaagcugggggaaguauguguugaugagugcaggcauucugacugcacugauguugaugauuuucuuaaugacguguugccgaaggaccaauagaccagaaucaauacaacacagucuuggagagacggggaggaaagugucgguaaccucccaaagcgggagggucauaucuucaugggagucauauaaaaguggaggugagaccaagcuguaa

SEQ ID NO: 63029 - RNA, 1575 nt, Artificial Sequence
  derived and/or modified CDS sequence (wt) from glycoprotein__RABV__FJ825129.1
augauuccucaaguucuauuguuuguuccccuucuaguuuucucgucguguuuugggaaauuccccauuuacacgauaccagacaaacuugguccauggagucccaucgauauacaucaucucagcuguccgaacaaucugguuguggaagaugaaggaugcaccaaucugucuggauuuuccuacauggaacucaaagugggauauauuucagccauaaaagugaacggauucaccuguacagguguggugaccgaagcagaaaccuacacuaacuuuguugguuaugucaccaccacguuuaagagaaagcacuuucgcccuaugccggaugcgugcagagccgcauacaacuggaagauggcuggugaccccagguaugaagagucucugcacaauccguaccccgacuaccacuggcuccgaacugucaagaccaccaaggagucccuugucaucauaucuccgagcguugcagauuuggacccguacgauaaaucccuucacucgagaguuuuuccuggcggaaaaugcucaagaauaaccguguccuccacuugcugcucuacuaaccacgacuacaccaucuggaugccugaaaauccuagacugagaacuucaugugacauuuucaccaauaguagagggaagagggcaucaaaacggggcaagacuuguggauuuguggaugaaagaggcuuguacaagucucuaaagggagcaugcaagcugaagcuaugugggguucuaggacuuagacuuauggacggaacaugggucgcgauucagacaucagaugagaucaaauggugcucuccugaucagcuaguaaaucuacaugacuuucacucggaugagauugaacaucuuguuguggaggaguuggucaaaaagagggaagagugucuggacgcacuggagacuauuaugaccacaaaguccgugaguuucagacgucuuagucauuugaggaagcuagucccuggguuuggaaaggcguauaccauauucaacaaaaccuugauggaggcugaugcucacuacaaaucaauccggacuuggaaugaaaucauccccucaaaaggguguuuaagaguuggggggagaugucauccucaugugaacgggguguucuucaauggcauuauacuggguccugacggacauguucuaaucccagagaugcagucgucccuccuccaccagcauauggaauuguuggaguccucagucaucccuuugaugcaucccuuagcagacccgucaacagucuuuaaagacggcgacgaggcagaggacuuuguugagguucaccuuccggaugugcacaagcagaucucggggauugaucuuggucucccaaacugggggaaguaugugcugauaagugcaggugcucugacugcauuaauguugacgauuuucuuaaugacguguugcagaaagacuaauagagcagagucaauacaacacaguccuggagagacagggaggaaagugucggugacuucucacaacggaagggucauaucuucaugggaaucauauaaaagcggaagugagaccaagcuguga

SEQ ID NO: 63030 - RNA, 1575 nt, Artificial Sequence
  derived and/or modified CDS sequence (wt) from glycoprotein__RABV__FJ825130.1
augauuccucaaguucuauuguuuguuccccuucuaguuuucucgucguguuuugggaaauuccccauuuacacgauaccagacaaacuugguccauggagucccaucgauauacaucaucucagcuguccgaacaaucugguuguggaagaugaaggaugcaccaaucugucuggauuuuccuacauggaacucaaagugggauauauuucagccauaaaagugaacggauucaccuguacagguguggugaccgaagcagaaaccuacacuaacuuuguugguuaugucaccaccacguuuaagagaaagcacuuucgcccuaugccggaugcgugcagagccgcauacaacuggaagauggcuggugaccccagguaugaagagucucugcacaauccguaccccgacuaccacuggcuccgaacugucaagaccaccaaggagucccuugucaucauaucuccgagcguugcagauuuggacccguacgauaaaucccuucacucgagaguuuuuccuggcggaaaaugcucaggaauaaccguguccuccacuugcugcucuacuaaccacgacuacaccaucuggaugccugaaaauccuagacugggaacuucaugugacauuuucaccaauaguagagggaagagggcaucaaaagggggcaagacuuguggauuuguggaugaaagaggcuuguacaagucucuaaagggagcaugcaagcugaagcuaugugggguucuaggacuuagacuuauggacggaacaugggucgcgauucagacaucagaugagaucaaauggugcucuccugaucagcuaguaaaucuacaugacuuucacucggaugagauugaacaucuuguuguggaggaguuggucaaaaagagggaagagugucuggacgcacuggagacuauuaugaccacaaaguccgugaguuucagacgucuuagucauuugaggaagcuagucccuggguuuggaaaggcguauaccauauucaacaaaaccuugauggaggcugaugcucacuacaaaucaauccggacuuggaaugaaaucauccccucaaaaggguguuuaagaguuggggggagaugucauccucaugugaacgggguguucuucaauggcauuauacuggguccugacggacauguucuaaucccagagaugcagucgucccuccuccaccagcauauggaauuguuggaguccucagucaucccuuugaugcaucccuuagcagacccgucaacagucuuuaaagacggcgacgaggcagaggacuuuguugagguucaccuuccggaugugcacaagcagaucucggggguugaucuuggucucccaaacugggggaaguaugugcugauaagugcaggugcucugacugcauuaauguugacgauuuucuuaaugacguguugcagaaagacuaauagagcagagucaauacaacacaguccuggagagacagggaggaaagugucggugacuucucacaacggaagggucauaucuucaugggaaucauauaaaagcggaagugagaccaagcuguga

SEQ ID NO: 63031 - RNA, 1575 nt, Artificial Sequence
  derived and/or modified CDS sequence (wt) from glycoprotein__RABV__FJ825131.1
augauuccucaaguucuauuguuuguuccccuucuaguuuucucgucguguuuugggaaauuccccauuuacacgauaccagacaaacuugguccauggagucccaucgauauacaucaucucagcuguccgaacaaucugguuguggaagaugaaggaugcaccaaucugucuggauuuuccuacauggaacucaaagugggauauauuucagccauaaaagugaacggauucaccuguacagguguggugaccgaagcagaaaccuacacuaacuuuguugguuaugucaccaccacguuuaagagaaagcacuuucgcccuaugccggaugcgugcagagccgcauacaacuggaagauggcuggugaccccagguaugaagagucucugcacaauccguaccccgacuaccacuggcuccgaacugucaagaccaccaaggagucccuugucaucauaucuccgagcguugcagauuuggacccguacgauaaaucccuucacucgagaguuuuuccuggcggaaaaugcucaggaauaaccguguccuccacuugcugcucuacuaaccacgacuacaccaucuggaugccugaaaauccuagacugggaacuucaugugacauuuucaccaauaguagagggaagagggcaucaaaagggggcaagacuuguggauuugugcaugaaagaggcuuguacaagucucuaaagggagcaugcaagcugaagcuaugugggguucuaggacuuagacuuauggacggaacaugggucgcgauucagacaucagaugagaucaaauggugcucuccugaucagcuaguaaaucuacaugacuuucacucggaugagauugaacaucuuguuguggaggaguuggucaaaaagagggaagagugucuggacgcacuggagacuauuaugaccacaaaguccgugaguuucagacgucuuagucauuugaggaagcuagucccuggguuuggaaaggcguauaccauauucaacaaaaccuugauggaggcugaugcucacuacaaaucaauccggacuuggaaugaaaucauccccuccaaaggguguuuaagaguuggggggagaugucauccucaugugaacgggguguucuucaauggcauuauacuggguccugacggacauguucuaaucccagagaugcagucgucccuccuccaccagcauauggaauuguuggaguccucagucaucccuuugaugcaucccuuagcagacccgucaacagucuuuaaagacggcgacgaggcagaggacuuuguugagguucaccuuccggaugugcacaagcagaucucggggguugaucuuggucucccaaacugggggaaguaugugcugauaagugcaggugcucugacugcauuaauguugacgauuuucuuaaugacguguugcagaaagacuaauagagcagagucaauacaacacaguccuggagagacagggaggaaagugucggugacuucucacaacggaagggucauaucuucaugggaaucauauaaaagcggaagugagaccaagcuguga

SEQ ID NO: 63032 - RNA, 1575 nt, Artificial Sequence
  derived and/or modified CDS sequence (wt) from glycoprotein__RABV__FJ825132.1
augauuccucaaguucuuuuguuuguuccccuucuaguuuucucgucguguuucgggaaauuccccauuuacacgauaccagacaaacuugguccauggagucccaucgauauacaucaccucagcuguccgaacaaucugguuguggaagaugaaggaugcaccaaucugucuggauuuuccuacauggaacucaaagugggauauauuucagccauaaaagugaacggauucaccuguacagguguggugaccgaagcagaaaccuacacuaacuuuguugguuaugucaccaccacguuuaagagaaagcacuuucgcccuaugccggaugcgugcagagccgcauacaacuggaagauggcuggugaccccagguaugaagagucucugcacaauccguaccccgacuaccacuggcuccgaacugucaagaccaccaaggagucccuugucaucauaucuccgagcguugcagauuuggacccguacgauaaaucccuucacucgagaguuuuuccuggcggaaaaugcucaggaauaaccguguccuccacuugcugcucuacuaaccacgacuacaccaucuggaugccugaaaauccuagacugggaacuucaugugacauuuucaccaauaguagagggaagagggccucaaaagggggcaagacuuguggauuuguggaugaaagaggcuuguacaagucucugaggggagcaugcaagcugaagcuaugugggguucuaggacuuagacuuauggacggaacaugggucgcaauucagacaucagaugagaucaaauggugcucuccugaucagcuaguaaaucuacacgacuuucacucggaugagaucgaacaucuuguuguggaggaguuggucaaaaagagggaagagugucuggacgcacuggagacuaucaugaccacaaaguccgugaguuucagacgucuuagucauuugaggaagcuagucccuggguuuggaaaggcguauaccauauucaacaagaccuugauggaggcugaugcucacuauaaaucaauccggacuuggaaugaaaucauccccuccaaaggguguuuaagaguuggggggagaugucauccucaugugaacgggguguucuucaacggcauuauacuggguccugacggacauguucucaucccagagaugcagucgucccuccuccaccagcauauggaauuguuggaguccucagucaucccuuugaugcaucccuuagcagacccgucaacagucuuuaaagacggcgacgaggcagaggacuuuguugagguucaccuuccggaugugcacaagcagaucucggggguugaucuuggucucccaaacugggggaaguaugugcugauaagugcaggugcucugacugcauuaauguugaugauuuucuuaaugacguguugcagaaagacuaauagagcagagucaauacaacacaguccuggagagacaggguggaaaguaucggugacuucucacaacggaagggucauaucuucaugggaaucauauaaaagcggaagugagaccaagcuguga

SEQ ID NO: 63033 - RNA, 1575 nt, Artificial Sequence
  derived and/or modified CDS sequence (wt) from glycoprotein__RABV__FJ825133.1
augauuccucaaguucuuuuguuuguuccccuucuaguuuucucgucguguuucgggaaauuccccauuuacacgauaccagacaaacuugguccauggagucccaucgauauacaucaccucagcuguccgaacaaucugguuguggaagaugaaggaugcaccaaucugucuggauuuuccuacauggaacucaaagugggauauauuucagccauaaaagugaacggauucaccuguacagguguggugaccgaagcagaaaccuacacuaacuuuguugguuaugucaccaccacguuuaagagaaagcacuuucgcccuaugccggaugcgugcagagccgcauacaacuggaagauggcuggugaccccagguaugaagagucucugcacaauccguaccccgacuaccacuggcuccgaacugucaagaccaccaaggagucccuugucaucauaucuccgagcguugcagauuuggacccguacgauaaaucccuucacucgagaguuuuuccuggcggaaaaugcucaagaauaaccguguccuccacuugcugcucuacuaaccacgacuacaccaucuggaugccugaaaauccuagacugggaacuucaugugacauuuucaccaauaguagagggaagagggccucaaaagggggcaagacuuguggauuuguggaugaaagaggcuuguacaagucucugaggggagcaugcaagcugaagcuaugugggguucuaggacuuagacuuauggacggaacaugggucgcaauucagacaucagaugagaucaaauggugcucuccugaucagcuaguaaaucuacacgacuuucacucggaugagaucgaacaucuuguuguggaggaguuggucaaaaagagggaagagugucuggacgcacuggagacuaucaugaccacaaaguccgugaguuucagacgucuuagucauuugaggaagcuagucccuggguuuggaaaggcguauaccauauucaacaagaccuugauggaggcugaugcucacuauaaaucaauccggacuuggaaugaaaucauccccuccaaaggguguuuaagaguuggggggagaugucauccucaugugaacgggguguucuucaacggcauuauacuggguccugacggacauguucucaucccagagaugcagucgucccuccuccaccagcauauggaauuguuggaguccucagucaucccuuugaugcaucccuuagcagacccgucaacagucuuuaaagacggcgacgaggcagaggacuuuguugagguucaccuuccggaugugcacaagcagaucucggggguugaucuuggucucccaaacugggggaaguaugugcugauaagugcaggugcucugacugcauuaauguugaugauuuucuuaaugacguguugcagaaagacuaauagagcagagucaauacaacacaguccuggagagacagggaggaaaguaucggugacuucucacaacggaagggucauaucuucaugggaaucauauaaaagcggaagugagaccaagcuguga

SEQ ID NO: 63034 - RNA, 1575 nt, Artificial Sequence
  derived and/or modified CDS sequence (wt) from glycoprotein__RABV__FJ825134.1
augaucccucaggcucuucuguuuguaccccuucugguuguuccauuguguuuugggaaauuccccauuuacacgauaccagacaaacucggucccuggagucccauugauauacaucaucucagcuguccgaauaauuugguuguggaggaugaaggauguaccaaucugucaggauucucauacauggaacuuaaagugggauauauuucagccauaaaggugaauggguucacuuguacggguguggugacagaagcagaaaccuacacuaacuuuguuggcuaugucaccaccacguuuaagagaaagcacuuccgaccaacgccggaugcaugcagaucugcauacaauuggaagauggcuggugaccccagauaugaagagucucugcacaaucccuauccggauuaucauuggcuccgaacuguaaaaaccaccaaggaguccuuuguuaucauaucuccgaguguggcagaucuagacccguacgauaaaucccuucauucgagaguuuuuccuagagggaaaugcucaggaauaacgguguccucuaccuacugcucuaccaaccaugacuacaccaucuggaugccugagaaucccagauuggggaccucuugugauauuuucaccaauagccgagggaagagagcauucaaagggagcaagaccuguggauuuguagaugagagaggcuuguacaaaucucuaaaaggagcaugcaaacugaagcugugcggaguucuuggacucagacuuauggacggaacaugggucgcgauucagacaucagacgagaccaaguggugcccuccugaccagcuaguaaaucuacaugacuuucauucggaugagauugaacaucuuguuguggaggaguuggucaagaaaagagaagagugucuagaugcacuggaguccaucaugaccaccaaguccgugaguuuccgacgucucagucacuugaggaaacuugugccuggguuuggaaaagcauacaccauauucaauaagaccuugauggaggcugaugcucacuacaagucgguccgaacuuggaacgagaucauccccucuaaaggguguuuaagaguugggggcagaugucacccccaugugaacggaguguuuuucaacgguaucauccugggcccugacggccauguccugaucccggaaaugcagucaucccuccuccagcagcauauggagcuguuggaauccucaguuauccccuugaugcauccuuuggcagauccaucaacgguuuuuaaaaauggugacgaggcggaggauuuuguugagguacaccuuccagaugugcauaagcaggucucagggguugaucucggucucccaagcugggggaaguauguguugaugagugcaggcauucugacugcacugauguugaugauuuucuuaaugacguguugccgaaggaccaauagaccagaaucaauacaacacagucuuggagagacggggaggaaagugucgguaaccucccaaagcgggagggucauaucuucaugggagucauauaaaaguggaggugagaccaagcuguaa

SEQ ID NO: 63035 - RNA, 1575 nt, Artificial Sequence
  derived and/or modified CDS sequence (wt) from glycoprotein__RABV__FJ866832.1
augauuccucaaguucuuuuguuuguuccccuucuaguuuucucgucguguuuugggaaauuccccauuuacacgauaccagacaaacuugguccauggagucccaucgauauacaucaucucagcuguccgaacaaucugguuguggaagaugaaggaugcaccaauuugucuggauuuuccuacauggaacucaaagugggauauauuucagccauaaaagugaacggauucaccuguacagguguggugaccgaagcagaaaccuacacuaacuuuguugguuaugucaccaccacguuuaagagaaagcacuuucgcccuaugccggaugcgugcagagccgcauacaacuggaagauggcuggugaccccagguaugaagagucucugcacaauccguaccccgacuaccacuggcuccgaacugucaagaccaccaaggagucccuugucaucauaucuccgagcguugcagauuuggacccguacgauaaaucccuucacucgagaguuuuuccuggcggaaaaugcucaggaauaaccguguccuccacuugcugcucuacuaaccacgacuacaccaucuggaugccugaaaauccuagacugggaacuucaugugacauuuucgccaauaguagagggaagagggcaucaaaagggggcaagacuuguggauuuguggaugaaagaggcuuguacaagucucuaaagggagcaugcaagcugaagcuaugugggguucuaggacuuagacuuauggacggaacaugggucgcgauucagacaucagaugagaucaaauggugcucuccugaucagcuaguaaaucuacacgacuuucacucggaugagauugaacaucuuguuguggaggaguuggucaaaaagagggaagagugucuggacgcacuggagacuauuaugaccacaaaguccgugaguuucagacgucuuagucauuugaggaagcuagucccuggguuuggaaaggcguauaccauauucaacaaaaccuugauggaggcugaugcucacuacaaaucaauccggacuuggaaugaaaucauccccuccaaaggguguuuaagaguuggggggagaugucauccucaugugaacgggguguucuucaacggcauuauacuggguccugacggacauguucuaaucccagagaugcagucgucccuccuccaccagcauauggaauuguuggaguccucagucaucccuuugaugcaucccuuagcagacccgucaacagucuuuaaagacggcgacgaggcagaggacuuuguugagguucaccuuccggaugugcacaagcagaucucggggguugaucuuggucucccaaacugggggaaguaugugcugauaagugcaggugcuuugacugcauuaauguugacgauuuucuuaaugacguguugcagaaagacuaauagagcagagucaauacaacacaguccuggagagacagggaggaaagugucggugacuucucacaacggaagggucauaucuucaugggaaucauauaaaagcggaagugagaccaagcuguga

SEQ ID NO: 63036 - RNA, 1575 nt, Artificial Sequence
  derived and/or modified CDS sequence (wt) from glycoprotein__RABV__FJ866834.1
augauuccucaaguucuuuuguuuguuccccuucuaguuuucucgucguguuuugggaaauuccccauuuacacgauaccagacaaacuugguccauggagucccaucgauauacaucaucucagcuguccgaacaaucugguuguggaagaugaaggaugcaccaauuugucuggauuuuccuacauggaacucaaagugggauauauuucagccauaaaagugaacggauucaccuguacagguguggugaccgaagcagaaaccuacacuaacuuuguugguuaugucgccaccacguuuaagagaaagcacuuucgcccuaugccggaugcgugcagagccgcauacaacuggaagauggcuggugaccccagguaugaagagucucugcacaauccguaccccgacuaccacuggcuccgaacugucaagaccaccaaggagucccuugucaucauaucuccgagcguugcagauuuggacccguacgauaaaucccuucacucgagaguuuuuccuggcggaaaaugcucaggaauaaccguguccuccacuugcugcucuacuaaccacgacuacaccaucuggaugccugaaaauccuagacugggaacuucaugcgacauuuucaccaauaguagagggaagagggcaucaaaagggggcaagacuuguggauuuguggaugaaagaggcuuguacaagucucuaaagggagcaugcaagcugaagcuaugugggguucuaggacuuagacuuauggacggaacaugggucgcgauucagacaucagaugagaucaaauggugcucuccugaucagcuaguaaaucuacacgacuuucacucggaugagauugaacaucuuguuguggaggaguuggucaaaaagagggaagagugucuggacgcacuggagacuauuaugaccacaaaguccgugaguuucagacgucuuagucauuugaggaagcuagucccuggguuuggaaaggcguguaccauauucaacaaaaccuugauggaggcugaugcucacuacaaaucaauccggacuuggaaugaaaucauccccuccaaaggguguuuaagaguuggggggagaugucauccucaugugaacgggguguucuucaacggcauuauacuggguccugacggacauguucuaaucccagagaugcagucgucccuccuccaccagcauauggaauuguuggaguccucagucaucccuuugaugcaucccuuagcagacccgucaacagucuuuaaagacggcgacgaggcagaggacuuuguugagguucaccuuccggaugugcacaagcagaucucggggguugaucuuggucucccaaacugggggaaguaugugcugauaagugcaggugcuuugacugcauuaauguugacgauuuucuuaaugacguguugcagaaagacuaauagagcagagucaauacaacacaguccuggagagacagggaggaaagugucggugacuucucacaacggaagggucauaucuucaugggaaucauauaaaagcggaagugagaccaagcuguga

SEQ ID NO: 63037 - RNA, 1575 nt, Artificial Sequence
  derived and/or modified CDS sequence (wt) from glycoprotein__RABV__FJ866835.1
augauuccucaaguucuuuuguuuguuccccuucuaguuuucucgucguguuuugggaaauuccccauuuacacgauaccagacaaacuugguccauggagucccaucgauauacaucaucucagcuguccgaacaaucugguuguggaagaugaaggaugcaccaauuugucuggauuuuccuacauggaacucaaagugggauauauuucagccauaaaagugaacggauucaccuguacagguguggugaccgaagcagaaaccuacacuaacuuuguugguuaugucaccaccacguuuaagagaaagcacuuucgcccuaugccggaugcgugcagagccgcauacaacuggaagauggcuggugaccccagguaugaagagucucugcacaauccguaccccgacuaccacuggcuccgaacugucaagaccaccaaggagucccuugucaucauaucuccgagcguugcagauuuggacccguacgauaaaucccuucacucgagaguuuuuccuggcggaaaaugcucaggaauaaccguguccuccacuugcugcucuacuaaccacgacuacaccaucuggaugccugaaaauccuagacugggaacuucaugugacauuuucaccaauaguagagggaagggggcaucaaaagggggcaagacuuguggauuuguggaugaaagaggcuuguacaagucucuaaagggagcaugcaagcugaagcuaugugggguucuaggacuuagacuuauggacggaacaugggucgcgauucagacaucagcugagaucaaauggugcucuccugaucagcuaguaaaucuacacgacuuucacucggaugagauugaacaucuuguuguggaggaguuggucaaaaagagggaagagugucuggacgcacuggagacuauuaugaccacaaaguccgugaguuucagacgucuuagucauuugaggaagcuagucccuggguuuggaaaggcguauaccauauucaacaaaaccuugauggaggcugaugcucacuacaaaucaauccggacuuggaaugaaaucauccccuccaaaggguguuuaagaguuggggggagaugucauccucaugugaacgggguguucuucaacggcauuauacuggguccugacggacauguucuaaucccagagaugcagucgucccuccuccaccagcauauggaauuguuggaguccucagucaucccuuugaugcaucccuuagcagacccgucaacagucuuuaaagacggcgacgaggcagaggacuuuguugagguucaccuuccggaugugcacaagcagaucucggggguugaucuuggucucccaaacugggggaaguaugugcugauaagugcaggugcuuugacugcauuaauguugacgauuuucuuaaugacguguugcagaaagacuaauagagcagagucaauacaacacaguccuggagagacagggaggaaagugucggugacuucucacaacggaagggucauaucuucaugggaaucauauaaaagcggaagugagaccaagcuguga

SEQ ID NO: 63038 - RNA, 1575 nt, Artificial Sequence
  derived and/or modified CDS sequence (wt) from glycoprotein__RABV__FJ959397.1
augauuccucaagcucuguuguuuguaccucuucugguuuuuccauuguguuucgggaaauuccccauuuacacgauaccagacaaacucggccccuggagucccaucgauauacaucaccucagcuguccgaacaaucugguuguggaggacgaaggauguaccaaucugucaggauucucauacauggagcuuaaaguaggauauauuucggccauaaaggugaacggguucacuuguacgggugugguaacggaagcagaaaccuacacuaacuuugucgguuaugucaccaccacguuuaagagaaagcacuuccgaccaacaccggaugcaugcagaucagcauacaauuggaagauggcaggugaccccagauaugaagagucucugcacaaucccuauccugauuaucauuggcuccggacuguaaaaaccaccaaagagucuguuguuaucauaucuccaaguguggcagacuuagacccguacgauaaaucacuucauucgagaguuuuuccuagaggaaaaugcucaggaauaacggugucuucugccuacugcucuaccaaccaugauuauaccaucuggaugccugaaaauccuagacuggggaccucuugugauauuuucaccaacagcagagggaagagagcauccaaagggagcaagaccuguggauuuguggaugagagaggcuuguacaaaucucuaaaaggagcaugcaaacugaagcuguguggaguucuuggacuuaggcuuauggacggaaccugggucgcgauucagacaucaaacgagaccaaguggugcccuccugaucaacuagugaaucuacaugacuuucauucagaugagauugaacaucuuguuguggaggaguugguuaagaagagggaggagugucuagaugcacuggaguccaucaugaccaccaaguccgugaguuucagacgucucagucacuugaggaagcuugugccuggauuuggaaaagcauacaccauauucaacaagaccuuaauggaggcugaugcucacuacaaaucgguccgaacuuggaaugagaucauccccucgaaaggguguuuaagagucggggggagaugucauccucaugugaacggaguauuuuucaaugguaucauccuaggcccugacggccaugucuuaaucccggaaaugcagucaucccuccuccagcagcauauggaguuguuggaauccucggucauccccuuaaugcaucccuuggcagauccaucaacgguuuuuaaagauggugacgagguggaggauuuuguugagguucaccuuccagaugugcauaagcaggucucagggguugaucucggucucccaaacugggggaaggauguguugaugggcgcaggcguuuugacggcacugauguugaugauuuuccuaaugacguguugccgaaggacuaauagagcagaaucaauacaacacagucuuggagagacagggaggaaagugucggugaccucccaaagcgggagggucauaucuucaugggagucauauaaaagcggaggugagaccaagcuguaa

SEQ ID NO: 63039 - RNA, 1575 nt, Artificial Sequence
  derived and/or modified CDS sequence (wt) from glycoprotein__RABV__FJ979833.1
augguuccucaggcucuuuuguuuguaccccuucuggguuuuucguuguguuucgggaaguuccccauuuacacgauaccagacgaacuuggucccuggagcccuauugacauacaccaucucagcuguccaaauaaccugguuguggaggaugaaggauguaccaaccuguccgaguucuccuacauggaacucaaagugggauacaucucagccaucaaagugaacggguucacuugcacagguguugugacagaggcagaggccuacaccaacuuuguugguuaugucacaaccacauucaagagaaagcauuuccgccccaccccagacgcauguagagccgcguauaacuggaagauggccggugaccccagauaugaagagucccuacacaauccauaccccgacuaccacuggcuucgaacuguaagaaccaccaaagagucccucauuaucauauccccaagugugacagauuuggacccauaugacaaaucccuucacucaagggucuucccuggcggaaagugcucaggaauaacgguguccucuaccuacugcucaacuaaccaugauuacaccauuuggaugcccgaggauccgagaccaaggacaccuugugacauuuuuaccaauagcagagggaagagagcauccaaagggaacaagacuugcggcuuuguggaugaaagaggccuguauaagucucuaaaaggagcaugcaggcucaaguuauguggaguucuuggacuuagacuuauggauggaacaugggucgcgaugcaaacaucagaugaaaccaaauggugcccuccagaucaguuggugaauuugcacgacuuucaaucagacgagauugagcaucucguuguggaggaguuagucaagaaaagagagggaugucuggaugcauuagaguccaucaugaccaccaagucaguaaguuucagacguuucagucaccugagaaaacuugucccaggguuuggaaaagcauauaccauauucaacaaaaccuugauggaggcugaugcucacuacaagucaguccggaccuggaaugagaucauccccucaaaaggguguuugaaaguuggaggaaggugccauccucaugugaacgggguguuuuucaaugguauaauauuagggccugacggccauguccuaaucccagagaugcaaucaucccuccuccagcaacauauggaguuguugaaaucuucaguuaucccccugaugcacccccuggcagacccuucuacaguuuucaaagaaggugaugaggcugaggauuuuguugaaguucaccuccccgauguguacaaacggaucucagggguugaccugggucucccgaacuggggaaaguauguauugaugacugcaggggccaugauuggccugguguugauauuuucccuaaugacauggugcagaagagccaaucgaccagaaucgaaacaacgcaguuuuggagggacagggaggaaugugucagucacuucccaaagcggaaaagucauaccuucaugggaaucauauaagaguggaggugagaccggacuguga

SEQ ID NO: 63040 - RNA, 1575 nt, Artificial Sequence
  derived and/or modified CDS sequence (wt) from glycoprotein__RABV__GQ303557.1
augauuccucaggcucuuuuguuuguaccccuuuugguuuucucaucgugcuucgggaaauuccccaucuacacgauaccagacaaacucggcccuuggaguccuauugacauacaucaucucaguugcccuaacaauuuaguuguggaggaugaggggugcaccaaccugucaggauucuccuacauggaacucaaagugggguacauuucagccauaaaagugaacggguucacuugcacggguguggugacagaagcagagaccuacacaaacuuugucggcuacgucaccaccacauuuaagagaaagcacuuccgcccgacaccugacgccugcagagcagcauauaacuggaagauggcaggugaccccagauaugaggaaucucugcauaauccguaucccgauuaucacuggcuccggacuguaaaaaccaccaaggagucucuuguuaucauaucuccgagugugucggacuuagacccguacgauaaaucucuucauuccagaguuuuucccagcgguaaaugcucaggaauaacaguaucuucuaccuauugucccacuaaccaugacuauacuaucuggaugccggaaaauccgagacuagggaccucuugugacauuuucaccaauagcagagggaagagagcauccaaagggggcaagaccuguggauuuguggacgaaagaggcuuguacaagucucuaaaaggggcaugcaaauugaaacuauguggaguucuuggacuuagacuuauggacggaacauggguugcgauucaaacaucugaugaggccaaauggugcccuccugaucaguuagugaauauacaugauuuucgcucagaugagauugaacaucuuguuguggaagaguuaguaaagaaaagagaagagugucuagaugcacuggagucuaucaugaccaccaaguccguaaguuucagacgccucagucacuugaggaagcucguccccggguuugggaaagcauauaccauuuucaacaaaaccuugauggaggcugaugcucacuacaaaucaguccguacauggaaugagaucauccccucuaaaggauguuuaagaguuggggggagaugucacccccaugugaacgggguguuuuucaaugguaucauccuggguccugauggacauguucuaaucccagagaugcagucaucucuccuucaacagcauauggaguuguuggaauccucgguaaucccgcuaaugcaucccuuggcagaucccucaacgguuuuuaaggacggugacgaggcggaagauuuugucgagguucaccuuccggauguccacaagcaggucucgggaguugaucucggucucccaagcugggggaaguaugugcugaugaguguaggcgcuaugauugcacugauguugaugauuuuccugaugacguguugcagaaaagcuaacggagcagaaacaauacaacaccgucucggagagacgggaaggaaagugucugucaccucccaaagcgggagggucauaucuuccugggagucguauaagagcgggggugagaccaagcuguag

SEQ ID NO: 63041 - RNA, 1575 nt, Artificial Sequence
  derived and/or modified CDS sequence (wt) from glycoprotein__RABV__GQ406342.1
augguuccucaggcucuccuguuuguaccccuucugguuuuuccauuguguuuugggaaauucccuauuuacacgauaccagacaagcuuggucccuggagcccgauugacauacaucaccucagcugcccaaacaauuugguaguggaggacgaaggaugcaccaaccugucaggguucuccuacauggaacuuaaaguuggauacaucuuagccauaaaaaugaacggguucacuugcacaggcguugugacggaggcugaaaccuacacuaacuucguugguuaugucacaaccacguucaaaagaaagcauuuccgcccaacaccagaugcauguagagccgcguacaacuggaagauggccggugaccccagauaugaagagucucuacacaauccguacccugacuaccgcuggcuucgaacuguaaaaaccaccaaggagucucucguuaucauaucuccaaguguggcagauuuggacccauaugacagaucccuucacucgagggucuucccuagcgggaagugcucaggaguagcggugucuucuaccuacugcuccacuaaccacgauuacaccauuuggaugcccgagaauccgagacuagggaugucuugugacauuuuuaccaauaguagagggaagagagcauccaaagggagugagacuugcggcuuuguagaugaaagaggccuauauaagucuuuaaaaggagcaugcaaacucaaguuauguggaguucuaggacuuagacuuauggauggaacaugggucgcgaugcaaacaucaaaugaaaccaaauggugcccucccgaucaguuggugaaccugcacgacuuucgcucagacgaaauugagcaccuuguuguagaggaguuggucaggaagagagaggagugucuggaugcacuagaguccaucaugacaaccaagucagugaguuucagacgucucagucauuuaagaaaacuugucccuggguuuggaaaagcauauaccauauucaacaagaccuugauggaagccgaugcucacuacaagucagucagaacuuggaaugagauccucccuucaaaaggguguuuaagaguuggggggaggugucauccucaugugaacgggguguuuuucaaugguauaauauuaggaccugacggcaaugucuuaaucccagagaugcaaucaucccuccuccagcaacauauggaguuguuggaauccucgguuaucccccuugugcacccccuggcagacccgucgaccguuuucaaggacggugacgaggcugaggauuuuguugaaguucaccuucccgaugugcacaaucaggucucaggaguugacuugggucucccgaacugggggaaguauguauuacugagugcaggggcccugacugccuugauguugauaauuuuccugaugacauguuguagaagagucaaucgaucagaaccuacgcaacacaaucucagagggacagggagggaggugucagucacuccccaaagcgggaagaucauaucuucaugggaaucacacaagagugggggugagaccagacuguga

SEQ ID NO: 63042 - RNA, 1575 nt, Artificial Sequence
  derived and/or modified CDS sequence (wt) from glycoprotein__RABV__GQ412744.1
augguuccucaagcucuuuugcuuguaccccuucuggguuuuucuuuguguuucgggaaauucccuauuuacacgauaccagacacacuuggucccuggagcccgaucgauauacaucaucucaguugcccaaacaauuugguuguggaggaugaaggaugcaccaaccugucaggguucuccuacauggaacuuaaaguuggacacaucucagccauaaaggugaacggguucacuugcacaggcguugugacagaggcagaaaccuacacuaacuuuguugguuaugucaccaccacguucaaaagaaagcauuuccgcccaacaccagaugcauguagagccgcguacaacuggaagauggccggugaccccagauaugaagagucucuacacaguccguacccugacuaccauuggcuucgaacuguaaaaaccacaaaggagucucucguuaucauaucuccaaguguggcaaauuuggacccauaugacaacucccuucacucgagggucuucccuagcggaaagugcucaggaauaacggugccuucugucuacugcucaacuaaccacgauuacaccguuuggaugccugaaauucugagacuagggacaucuugugauauuuuuaccaauaguagagggaagagagcauccaaggggagcaagaccuguggcuuuguagaugaaaggggccuauauaagucucuaaaaggcgcaugcaaacucaaguuauguggaguuccuggacuuagacuuauggacggaacaugggucgcgaugcagacaucaaaugagaccaaaugguguccucccggucaguugguuaaucugcacgaccuucacucagacgaaauugagcaucuuguuguagaggaguuggucaagaaaagagaggagugucuggaugcacuagaguccaucauaaccaccaagucagugaguuucagacgucucagucauuuaagaaaacuuguccccggguucggaaaagcauauaccauauucaacaagaccuugauggaggcugaagcucacuacaagucagucaggacuuggaaugagaucauccccucaaaaggguguuugagaguuggagggaggugucauccucauguaaacgggguauuuuucaaugguauaauauuagggccugacggccauguuuuaaucccagagaugcaaucaucccuccuccagcaacauauagaguuauuggaauccucaguuauuccccugaugcacccccuugcagacccguucacaguuuucaaggacggcgaugagauugaggauuuuguggaaguucaccuucccgaugugcacgaacaggucucagggguugaccugggucucccgaacuggggggaguauguauuacugagugcagggaccuuaauugccuugauguugauaauuuuccuaauaacauguuguaaaagagucgaucggccagaaucuacgcaacgcagucuuagagggacagggaggaaugugucagugaccucccaaagcgggaaauucauaccuucaugggagucguauaaaagugggggugagacuggacuguga

SEQ ID NO: 63043 - RNA, 1575 nt, Artificial Sequence
  derived and/or modified CDS sequence (wt) from glycoprotein__RABV__GQ472535.1
augguuccucaagcccuucuguuuguaccccuucuggccguuccauuguguuuugggaaauuccccauuuacacgauaccagacaaacucggucccuggagucccauugauauacaucaucucagcuguccgaauaauuugguuguggaggaugaaggauguaccaaucugucaggauuuucauacauggaacuuaaaguaggauacauuucagccauaaaggugaacggguucacuuguacggguguggugacggaagcagaaaccuacaccaacuuuguuggcuaugucaccaccacguuuaagagaaagcacuuucgaccaacaccggaugcgugcagauccacauacaauuggaagauggcuggugaccccagacacgaagagucucugcacaaucccuauccugauuaucauuggcuccggacuguaaaaaccaccaaagaguccuuugucaucauaucuccaaguguggcagaucuagauccguacgauaaaucccuucauucgagaguuuuuccuagaggaaaaugcucaggaauaacggugucuucuaccuacugcucuacuaaccaugacuacaccaucuggaugccugaaaaucccagacuggggaccucuugugauauuuucaccaacagcagagggaagagagcauccaaagggagcaagaccuguggcuuuguagaugagagaggcuuguacaaaucucuaaaaggagcaugcaaacugaagcugugugggguucuuggacuuagacuuauggauggaacaugggucgcgauucagacaucagacgagaccaaguggugcccuccugaccagcuagugaaucuacaugacuuucauucggaugagauugaacaucuuguuguggaggaguuggucaagaaaagggaagagugucuagaugcacuggaguccaucaugaccaccaaguccgugaguuuccgacgucucagucacuugaggaaacuugugccuggauucggaaaagcauacaccauauucaauaagaccuugauggaggcugaugcucacuacaaaucgguccggacuuggaacgagaucauccccucuaaaggguguuugagaguuggaggcagaugucauccccaugugaacgggguguuuuucaaugguauuauccuaggcccugacggccaugucuugaucccggaaaugcagucaucccuccuucagcagcauauggaguuguuggaauccucggucauccccuuaaugcauccuuuggcagauccaucaacgguuuuuaaagauggugacgaggcggaggauuuuguugagguucaccuuccagaugugcauaagcaggucucaggggucgaucucggucucccaagcugggggaaguaugcguugaugagcgcaggcauuuugacugcacugauguugaugauuuucuuaaugacguguugccgaaggaccaauagagcagaaucaauacaacacagucuuggagagacagggaggaaagucucgguaaccucccaaaacgggagggucauaucuucaugggagucauacaaaagcggaggugagaccaagcuguaa

SEQ ID NO: 63044 - RNA, 1575 nt, Artificial Sequence
  derived and/or modified CDS sequence (wt) from glycoprotein__RABV__GQ472536.1
augguuccucaagcccuucuguuuguaccccuucuggccauuccauuguguuuugggaaauucccuauuuacacgauaccagacaaacucggucccuggagucccauugauauacaucaccucagcuguccgaauaauuugguuguggaggaugaaggauguaccaaucugucaggauucucauacauggaacuuaaaguaggauacauuucagccauaaaggugaacggguucacuuguacggguguggugacggaagcagaaaccuacacuaacuuuguuggcuaugucaccaccacguuuaagagaaagcacuuucgaccaacaccggaugcaugcagauccgcauacaauuggaagauggcuggugaccccagauacgaagagucucugcacaaucccuauccugauuaucauuggcuucggacuguaaaaaccaccaaagaguccuuuguuaucauaucuccaaguguggcagaucuagauccguacgauaaaucccuccuuucgagaguuuuuccuagaggaaaaugcucaggaauaacggugucuucuaccuacugcucuaccaaccaugacuacaccaucuggaugccugaaaaucccagacuggggaccucuugugauauuuucaccaauaguagagggaagagagcauccaaagggagcaagaccuguggauuuguagaugagagaggcuuguacaaaucucuaaaaggagcaugcaaacugaagcugugugggguucuuggacuuagacuuauggauggaacaugggucgcgauucagacaucagacgagaccaaguggugcccuccugaccagcuagugaaucuacaugacuuucauucggaugagauugaacaucuuguuguggaggaguuggucaagaaaagggaagagugccuagaugcacuggaguccaucaugaccaccaaguccgugaguuuccgacgucucagucacuugaggaaacuugugccuggguucggaaaagcauacaccauauucaauaagaccuugauggaggcugaugcucacuacaagucgguccggacuuggaacgagaucauccccucuaaaggguguuugagaguuggaggcagaugucauccccaugugaacgggguguuuuuuaaugguauuauccuaggcccugacggccaugucuuaaucccggaaaugcagucaucucuccuucagcagcauauggaguuguuggaauccucggucaucccccuaaugcauccuuuggcagauccaucaacgguuuuuaaagauggugacgaggcggaggauuuuguugagguucaccuuccagaugugcauaagcaggucucaggggucgaucucggucucccaagcugggggaaguauguguugaugagcgcaggcauuuugacugcacugaugcugaugaucuucuuaaugacguguugccgaaggacuaauagagcagagucaauacaacacagucuuggagagacagggaggaaagugucgguaaccucccaaagcgggagggucauaucuucaugggagucauacaaaagcggaggugagaccaaguuguaa

SEQ ID NO: 63045 - RNA, 1575 nt, Artificial Sequence
  derived and/or modified CDS sequence (wt) from glycoprotein__RABV__GQ472537.1
augguuccucaagcccuucuguuuguaccccuucuggccauuccauuguguuuugggaaauucccuauuuacacgauaccagacaaacucggucccuggagucccauugauauacaucaccucagcuguccgaauaauuugguuguggaggaugaaggauguaccaaucugucaggauucucauacauggaacuuaaaguaggauacauuucagccauaaaggugaacggguucacuuguacggguguggugacggaggcagaaaccuacacuaacuuuguuggcuaugucaccaccacguuuaagagaaagcacuuucgaccaacaccggaugcaugcagauccgcauacaauuggaagauggcuggugaccccagauacgaagagucucugcacaaucccuauccugauuaucauuggcuucggacuguaaaaaccaccaaagaguccuuuguuaucauaucuccaaguguggcagaucuagauccguacgauaaaucccuccauucgagaguuuuuccuagaggaaaaugcucaggaauaacggugucuucuaccuacugcucuaccaaccaugacuacaccaucuggaugccugaaaaucccagacuggggaccucuugugauauuuucaccaauaguagagggaagagagcauccaaagggagcaagaccuguggauuuguagaugagagaggcuuguacaaaucucuaaaaggagcaugcaaacugaagcugugugggguucuuggacuuagacuuauggauggaacaugggucgcgauucagacaucagacgagaccaaguggugcccuccugaccagcuagugaaucuacaugacuuucauucggaugagauugaacaucuuguuguggaggaguuggucaagaaaagggaagagugccuagaugcacuggaguccaucaugaccaccaaguccgugaguuuccgacgucucagucacuugaggaaacuugugccuggguucggaaaagcauacaccauauucaauaagaccuugauggaggcugaugcucacuacaagucgguccggacuuggaacgagaucauccccucuaaaggguguuugagaguuggaggcagaugucauccccaugugaacgggguguuuuuuaaugguauuauccuaggcccugacggccaugucuuaaucccggaaaugcagucaucucuccuucagcagcauauggaguuguuggaauccucggucaucccccuaaugcauccuuuggcagauccaucaacgguuuuuaaagauggugacgaggcggaggauuuuguugagguucaccuuccagaugugcauaagcaggucucaggggucgaucucggucucccaagcugggggaaguauguguugaugagcgcaggcauuuugacugcacugaugcugaugaucuucuuaaugacguguugccgaaggacuaauagagcagagucaauacaacacagucuuggagagacagggaggaaagugucgguaaccucccaaagcgggagggucauaucuucaugggagucauacaaaagcggaggugagaccaaguuguaa

SEQ ID NO: 63046 - RNA, 1575 nt, Artificial Sequence
  derived and/or modified CDS sequence (wt) from glycoprotein__RABV__GQ472539.1
augauuccucaaguucuuuuguuuguuccccuucuaguuuucucgucauguuucgggaaauuccccauuuacacgauaccagacaaacuugguccauggagucccaucgauauacaucaucucagcuguccgaacaaucugguuguggaagaugaaggaugcaccaaucuguccggauuuuccuacauggaacucaaagugggauauauuucagccauaaaagugaacggauucaccuguacagguguggugacagaagcagaaaccuacacgaacuuuguugguuaugucaccaccacguuuaagagaaagcacuuucgcccuaugccggaugcguguagagcugcauacaacuggaaaauggcuggugaccccagguaugaagagucucugcacaauccguacccugacuaccacuggcuccgaacugucaagaccaccaaagagucccuugucaucauaucuccgagcguugcagauuuggacccguacgauaaaucccuucacucgagaguuuuuccuggcggaaaaugcucaggaauaaccguguccuccacuugcugcucuacuaaccacgacuacaccaucuggaugccugaaaauccuagacugggaacuucgugugacauuuucaccaauaguagagggaagagggcaucaaaagggggcaagacuuguggauuuguggaugaaagaggcuuguacaagucucuaaagggagcaugcaagcugaagcuaugugggguucugggacuuagacuuauggacggaacaugggucgcaauucagacaucagaugagaucaaauggugcucuccugaucagcuaguaaaucuacacgacuuucacucggaugagauugaacaucuuguuguggaggaguuggucaaaaagagggaagagugucuggacgcacuggagacuauuaugaccacaaaguccgugaguuucagacgucuuagucauuugaggaagcuagucccuggguuuggaaaggcguacaccauauucaacaaaaccuugauggaggcugaugcucacuauaaaucaauccggacuuggaaugaaaucauccccucuaaaggguguuuaagaguuggggggagaugucauccucaugugaacgggguguucuucaacggcauuauacugggucuugacggacauguucuaaucccagagaugcaaucgucccuccuccaccaacauauggaauuguuggaguccucagucaucccguugaugcaucccuuagcagacccgucaacagucuuuaaggacggcgacgaggcagaggacuuuguugagguucaccuuccggaugugcacaagcagaucucgggggucgaucuuggucucccaaacugggggaaguauguguugacaagugcaggugcucugacugcauuaauguuaaugauuuucuuaaugacguguugcagaaagacuaauagagcagagucaauacaacgcaguccuggagagacagagaggaaagugucgguaacuucucacaacgggagggucauaucuucaugggaaucauauaaaagcggaggugagaccaagcuguga

SEQ ID NO: 63047 - RNA, 1575 nt, Artificial Sequence
  derived and/or modified CDS sequence (wt) from glycoprotein__RABV__GQ472540.1
augguuccucaagcccuucuguuuguaccccuucuggccgucccauuguguuuugggaaauuccccauuuacacgauaccagacaaacuuggucccuggagucccauugacauacaucaucucagcuguccgaauaauuugguuguggaagaugaaggauguaccaaucugucaggauuuucauacauggaacuuaaaguaggauacauuucagccauaaaggugaacggguucacuuguacggguguggugacggaagcagaaaccuacacuaacuuuguuggcuaugucaccaccacguuuaagagaaagcacuuucgaccaacuccggaugcaugcagauccgcauacaauuggaagauggcuggugaccccagauacgaagagucucugcacaaucccuauccugauuaucauuggcuccggacuguaaaaaccaccaaagaguccuuuguuaucauaucuccaaguguggcagaucuagauccguacgauaaaucccuucauucgagaguuuuuccuagaggaaaaugcucaggaauaacggugucuucuaccuacugcucuacuaaccaugacuacaccaucuggaugccugaaaaucccagacuggggaccucuugugauauuuucaccaacagcagagggaagagagcauccaaagggagcaagaccuguggauuuguagaugagggaggcuuguacaaaucucuaaaaggagcaugcaaacugaagcugugugggguucuuggacuuagacuuauggauggaacaugggucgcgauucagacaucagacgagaccaaguggugcccuccugaccagcuagugaaucuacaugacuuucauucggaugagauugaacaucuuguuguggaggaguuggucaagaaaagggaagagugucuagaugcacuggaguccaucaugaccaccaaguccgugaguuuccgacgucucagucacuugaggaaacuugugcccggguucggaaaagcauacaccauauucaauaagaccuugauggaggcugaugcucacuacaaaucgguccggacuuggaacgagaucauccccucuaaaggguguuugagaguuggaggcagaugucauccccaugugaacgggguguuuuuuaaugguauuauccuaggcccugacggccaugucuugaucccggaaaugcagucaucucuccuucagcaacauauggaguuguuggaauccucggucaucccauuaaugcauccuuuggcagauccaucaacgguguuuaaagauggugacgaggcggaggauuuuguugagguucaccuuccagaugugcauaagcaggucucaggggucgaucucggucucccaagcugggggaaguauguguugaugagcgcaggcauuuugacugcacugauguugacgauuuucuuaaugacguguugccgaaggacuaauagagcagagucgauacaacacagucuuggggagacagggaggaaagugucgguaaccucccaaagcgggagggucauaucuucaugggagucauacaaaagcggaggugagaccaagcuguaa

SEQ ID NO: 63048 - RNA, 1575 nt, Artificial Sequence
  derived and/or modified CDS sequence (wt) from glycoprotein__RABV__GQ472541.1
augguuccucaagcccuucuguuuguaccccuucuggccauuccacuguguuuugggaaauuccccauuuacacgauaccagacaaacucggucccuggagucccauugauauacaucaccucagcuguccgaauaauuugguuguggaggaugaaggauguaccaaucugucaggauucucauacauggaacuuaaaguaggauacauuucagccauaaaggugaacggguucacuuguacggguguggugacggaagcagaaaccuacacuaacuuuguuggcuaugucaccaccacguuuaagagaaagcacuuucgaccaacaccggaugcaugcagauccgcauacaauuggaagauggcuggugaccccagauacgaagagucucugcacaaucccuauccugauuaucauuggcuucggacuguaaaaaccaccaaagaguccuuuguuaucauaucuccaaguguggcagaucuagauccguacgauaaaucccuccauucgagagucuuuccuagaggaaaaugcucaggaauaacggugucuucuaccuacugcucuaccaaccaugacuacaccaucuggaugccugaaaaucccagacuggggaccucuugugauauuuucaccaauaguagagggaagagagcauccaaagggagcaagaccuguggauuuguagaugagagaggcuuguacaaaucucuaaaaggagcaugcaaacugaagcugugugggguucuuggacuuagacuuauggauggaacaugggucgcgauucagacaucagacgagaccaaguggugcccuccugaccagcuagugaaucuacaugacuuucauucggaugagauugaacaucuuguuguggaggaguuggucaagaaaagggaagagugccuagaugcacuggaguccaucaugaccaccaaguccgugaguuuccgacgucucagucacuugaggaaacuugugccuggguucggaaaagcauacaccauauucaauaagaccuugauggaggcugaugcucacuacaagucgguccggacuuggaacgagaucauccccucuaaaggguguuugagaguuggaggcagaugucauccccaugugaacgggguguuuuuuaaugguauuauccuaggcccugacggccaugucuuaaucccggaaaugcagucaucucuccuucagcagcauauggaguuguuggaauccucggucaucccccuaaugcauccuuuggcagauccaucaacgguuuuuaaagauggugacgaggcggaggauuuugaugagguucaccuuccagaugugcauaagcaggucucaggggucgaucucggucucccaagcugggggaaguauguguugaugagcgcaggcauuuugacugcacugaugcugaugaucuucuuaaugacguguugccgaaggacuaauagagcagagucaauacaacacagucuuggagagacagggaggaaagugucggugaccucccaaagcgggagggucauaucuucaugggagucauacaaaagcggaggugagaccaaguuguaa

SEQ ID NO: 63049 - RNA, 1575 nt, Artificial Sequence
  derived and/or modified CDS sequence (wt) from glycoprotein__RABV__GQ472542.1
augauuccucaaguucuuuuguuuguuccccuucuaguuuucucgucauguuucgggaaauuccccauuuacacgauaccagacaaacuugguccauggagucccaucgauauacaucaucucagcuguccgaacaaucuuguuguggaagaugaagggugcaccaaucugucuggauuuuccuacauggaacucaaagugggauauauuucagccauaaaagugaacggauucaccuguacagguguggugacagaagcagagaccuacacgaacuuuguugguuaugucaccaccacguuuaagagaaagcacuuucgcccuaugccggaugcguguagagccgcauacaacuggaagauggcuggugaccccagguaugaagagucucugcacaauccguacccugacuaccacuggcuccgaacugucaagaccaccaaggagucccuugucaucauaucuccgagcguugcagauuuggacccguacgauaaaucccuucacucgagaguuuuuccuggcggaaaaugcucaggaauaaccguguccuccacuugcugcucuacuaaccacgacuacaccaucuggaugccugaaaauccuagacugggaacuucgugugacauuuucaccaauaguagagggaagagggcaucaaaagggggcaagacuuguggauuuguggaugaaagaggcuuguacaagucucuaaaaggagcaugcaagcugaagcuaugugggguucuaggacuuagacuuauggacggaacaugggucgcaauucagacaucagaugagaucaaauggugcucuccugaucagcuaguaaaucuacacgacuuucacucggaugagauugaacaucuuguuguggaggaguuggucaaaaagggggaagagugucuggacgcacuggagacuauuaugaccacaaaauccgugaguuucagacgucuuagucauuugaggaagcuagucccuggguuuggaaaagcguauaccauauucaacaaaaccuugauggaggcugaugcucacuauaaaucaauccggacuuggaaugaaaucauccccucuaaaggguguuuaagaguuggggggagaugucauccucaugugaacgggguauucuucaacggcauuauacuggguccugacggacauguucuaaucccagagaugcaaucgucccuccuccaccagcauauggaauuguuggaguccucagucaucccguugaugcaucccuuagcagacccgucaacagucuuuaaagacggcgacgaggcagaggacuuuguugagguucaccuuccggaugugcacaagcagaucucggggguugaucuuggucucccaaacugggggaaguacgugcugauaagugcaggugcucugacugcaucaauguugaugauuuucuuaaugacguguugcagaaaggcuaauagagcagagucaauacaacacaauccuggagagacagggaggaaagugucgguaacuucucacaacggaagggucauaucuucaugggaaucauauaaaagcggaggugagaccaagcuguga

SEQ ID NO: 63050 - RNA, 1575 nt, Artificial Sequence
  derived and/or modified CDS sequence (wt) from glycoprotein__RABV__GQ472543.1
augguuccucaagcccuucuguuuguaccccuucuggccauuccauuguguuuugggaaauuccccauuuacacgauaccagacaaacucggucccuggagucccauugauauacaucaccucagcuguccgaauaauuugguuguggaggaugaaggauguaccaaucugucaggauucucauacauggaacuuaaaguaggauacauuucagccauaaaggugaacggguucacuuguacggguguggugacggaagcagaaaccuacacuaacuuuguuggcuaugucaccacuacguucaagagaaagcacuuucgaccaacaccggaugcaugcagauccgcauacaauuggaagauggcuggugaccccagauacgaagagucucugcacaaucccuauccugauuaucauuggcuucggacuguaaaaaccaccaaagaguccuuuguuaucauaucuccaaguguggcagaucuagauccguacgauaaaucccuccauucgagaguuuuuccuagaggaaaaugcucaggaauaacggugucuucuaccuacugcucuaccaaccaugacuacaccaucuggaugccugaaaaucccagacuggggaccucuugugauauuuucaccaauaguagagggaagagagcauccaaagggagcaagaccuguggauuuguagaugagagaggcuuguacaaaucucuaaaaggagcaugcaaacugaagcugugugggguucuuggacuuagacuuauggaugggacaugggucgcgauucagacaucggacgagaccaaguggugcccuccugaccagcuagugaaucuacaugacuuucauucggaugagauugaacaucuuguuguggaggaguuggucaagaaaagggaagagugccuagaugcacuggaguccaucaugaccaccaaguccgugaguuuccgacgucucagucacuugaggaaacuugugccuggguucggaaaagcauacaccauauucaauaagaccuugauggaggcugaugcucacuacaagucgguccggacuuggaacgagaucauccccucuaaaggguguuugagaguuggagguagaugucauccccaugugaacgggguguuuuuuaaugguauuauccuaggcccugacggccaugucuuaaucccggaaaugcagucaucucuccuucagcagcauauggaguuguuggaauccucggucaucccccuaaugcauccuuuggcagauccaucaacgguuuuuaaagauggugacgaggcggaggauuuuguugagguucaccuuccagaugugcauaagcaggucucaggggucgaucucggucucccaagcugggggaaguauguguugaugagcgcaggcauuuugacugcacugaugcugaugaucuucuuaaugacguguugccgaaggacuaauagagcagagucaauacaacacagucuuggagagacagggaggaaagugucgguaaccucccaaagcgggagggucauaucuucaugggagucauacaaaagcggaggugagaccaaguuguaa

SEQ ID NO: 63051 - RNA, 1575 nt, Artificial Sequence
  derived and/or modified CDS sequence (wt) from glycoprotein__RABV__GQ472544.1
augauuccucaaguucuuuuguuuguuccccuucuaguuuucucgucauguuucgggaaauuccccauuuacacgauaccagacaaacuugguccauggagucccaucgauauacaucaucucagcuguccgaacaaucuuguuguggaagaugaagggugcaccaaucugucuggauuuuccuacauggaacucaaagugggauauauuucagccauaaaagugaacggauucaccuguacagguguggugacagaagcagagaccuacacgaacuuuguugguuaugucaccaccacguuuaagagaaagcacuuucgcccuaugccggaugcguguagagccgcauacaacuggaagauggcuggugaccccagguaugaagagucucugcacaauccguacccugacuaccacuggcuccgaacugucaagaccaccaaggagucccuugucaucauaucuccgagcguugcagauuuggacccguacgauaaaucccuucacucgagaguuuuuccuggcggaaaaugcucaggaauaaccguguccuccacuugcugcucuacuaaccacgacuacaccaucuggaugccugaaaauccuagacugggaacuucgugugacauuuucaccaauaguagagggaagagggcaucaaaagggggcaagacuuguggauuuguggaugaaagaggcuuguacaagucucuaaaaggagcaugcaagcugaagcuaugugggguucuaggacuuagacuuauggacggaacaugggucgcaauucagacaucagaugagaucaaauggugcucuccugaucagcuaguaaaucuacacgacuuucacucggaugagauugaacaucuuguuguggaggaguuggucaaaaagagggaagagugucuggacgcacuggagacuauuaugaccacaaaauccgugaguuucagacgucuuagucauuugaggaagcuagucccuggguuuggaaaagcguauaccauauucaacaaaaccuugauggaggcugaugcccacuauaaaucaauccggacuuggaaugaaaucauccccucuaaaggguguuuaagaguuggggggagaugucauccucaugugaacgggguguucuucaacggcauuauacuggguccugacggacauguucuaaucccagagaugcaaucgucccuccuccaccagcauauggaauuguugggguccucagucaucccguugaugcaucccuuagcagacccgucaacagucuuuaaagacggcgacgaggcagaggacuuuguugagguucaccuuccggaugugcacaagcagaucucggggguugaucuuggucucccaaacugggggaaguacgugcugauaagugcaggugcucugacugcaucaauguugaugauuuucuuaaugacguguugcagaaaggcuaauagagcagagucaauacaacacaauccuggagagacagggaggaaagugucgguaacuucucacaacggaagggucauaucuucaugggaaucauauaaaagcggaggugagaccaagcuguga

SEQ ID NO: 63052 - RNA, 1575 nt, Artificial Sequence
  derived and/or modified CDS sequence (wt) from glycoprotein__RABV__GQ472545.1
augguuccucaaguucuuuuguuuguuccccuucuaguuuucucgucauguuucgggaaauuccccauuuacacgauaccagacaaacuugguccauggagucccaucgauauacaucaucucagcuguccgaacaaucuuguuguggaagaugaagggugcaccaaucugucuggauuuuccuacauggaacucaaagugggauauauuucagccauaaaagugaacggauucaccuguacagguguggugacagaagcagaaaccuacacgaacuuuguugguuaugucaccaccacguuuaagagaaagcacuuucgcccuaugccggaugcgugcagagccgcauacaacuggaagauggcuggugaccccagguaugaagagucucugcacaauccguacccugacuaccacuggcuccgaacugucaagaccaccaaggagucccuugucaucauaucuccgagcguugcagauuuggacccguacgauaaaucccuucacucgagaguuuuuccuggcggaaaaugcucaggaauaaccguguccuccacuugcugcucuacuaaccacgacuacaccaucuggaugccugaaaauccuagacugggaacuucgugugacauuuucaccaauaguagagggaagagggcaucaaaagggggcaagacuuguggauuuguggaugaaagaggcuuguacaagucucuaaagggagcaugcaagcugaagcuaugugggguucuaggacuuaggcuuauggacggaacauggguugcaauucagacaucagaugagaucaaauggugcucuccugaucagcuaguaaaucuacacgacuuucacucggaugagauugaacauuuuguuguggaggaguuggucaaaaagagggaagagugucuggacgcacuggagacuauuaugaccacaaaguccgugaguuucagacgucuuagucauuugaggaagcuagucccuggguuuggaaaggcguauaccauauucaacaaaaccuugauggaggcugaugcucacuauaaaucaauccggacuuggaaugaaaucauccccucuaaaggguguuuaagaguuggggggagaugucauccucaugugaacgggguguucuucaacggcauuauacuggguccugacggacauguucuaaucccagagaugcaaucgucccuccuccaccagcauauggaauuguuggaguccucagucaucccguugaugcaucccuuagcagacccgucaacagucuuuaaagacggcgacgaggcagaggacuuuguugagguucaccuuccggaugugcacaagcagaucucggggguugaucuuggucucccaaacugggggaaguaugugcugauaagugcaggugcucugacugcauuaauguugaugauuuucuuaaugacguguugcagaaaggcuaauagagcagagucaauacaacacaauccuggagagacagggaggaaagugucgguaacuucucacaacggaagggucauaucuucaugggaaucauauaaaagcggaggugagaccaaacuguag

SEQ ID NO: 63053 - RNA, 1575 nt, Artificial Sequence
  derived and/or modified CDS sequence (wt) from glycoprotein__RABV__GQ472546.1
augguuccucaagcccuucuguuuguaccccuucuggccauuccauuguguuuugggaaauucccuauuuacacgauaccagacaaacucggucccuggagucccauugauauacaucaccucagcuguccgaauaauuugguuguggaggaugaaggauguaccaaucugucaggauucucauacauggaacuuaaaguaggauacauuucagccauaaaggugaacggguucacuuguacggguguggugacggaagcagaaaccuacacuaacuuuguuggcuaugucaccaccacguuuaagagaaagcacuuucgaccaacaccggaugcaugcagauccgcauacaauuggaagauggcuggugaccccagauacgaagagucucugcacaaucccuauccugauuaucauuggcuucggacuguaaaaaccaccaaagaguccuuuguuaucauaucuccaaguguggcagaucuagauccguacgauaaaucccuccauucgagaguuuuuccuagaggaaaaugcucaggaauaacggugucuucuaccuacugcucuaccaaccaugacuacaccaucuggaugccugaaaaucccagacuggggaccucuugugauauuuucaccaauaguagagggaagagagcauccaaagggagcaagaccuguggauuuguagaugagagaggcuuguacaaaucucuaaaaggagcaugcaaacugaagcugugugggguucuuggacuuagacuuauggauggaacaugggucgcgauucagacaucagacgagaccaaguggugcccuccugaccagcuagugaaucuacaugacuuucauucggaugagauugaacaucuuguuguggaggaguuggucaagaaaagggaagagugccuagaugcacuggaguccaucaugaccaccaaguccgugaguuuccgacgucucagucacuugaggaaacuugugccuggguucggaaaagcauacaccauauucaauaagaccuugauggaggcugaugcucacuacaagucgguccggacuuggaacgagaucauccccucuaaaggguguuugagaguuggaggcagaugucauccccaugugaacgggguguuuuuuaaugguauuauccuaggcccugacggccaugucuuaaucccggaaaugcagucaucucuccuucagcagcauauggaguuguuggaauccucggucaucccccuaaugcauccuuuggcagauccaucaacgguuuuuaaagauggugacgaggcggaggauuuuguugagguucaccuuccagaugugcauaagcaggucucaggggucgaucucggucucccaagcugggggaaguauguguugaugagcgcaggcauuuugacugcacugaugcugaugaucuucuuaaugacguguugccgaaggacuaauagagcagagucaauacaacacagucuuggagagacagggaggaaagugucgguaaccucccaaagcgggagggucauaucuucaugggagucauacaaaagcggaggugagaccaaguuguaa

SEQ ID NO: 63054 - RNA, 1575 nt, Artificial Sequence
  derived and/or modified CDS sequence (wt) from glycoprotein__RABV__GQ472547.1
augguuccucaagcccuucuguuuguaccccuucuggccauuccauuguguuuugggaaauucccuauuuacacgauaccagacaaacucggucccuggagucccaucgauauacaucaccucagcuguccgaauaauuugguuguggaggaugaaggauguaccaaucugucaggauucucauacauggaacuuaaaguaggauacauuucagccauaaaggugaacggguucacuuguacggguguggugacggaagcagaaaccuacacuaacuuuguuggcuaugucaccaccacguuuaagagaaagcacuuucgaccaacaccggaugcaugcagauccgcauacaauuggaagauggcuggugaccccagauacgaagagucucugcacaaucccuauccugauuaucauuggcuucggacuguaaaaaccaccaaagaguccuuuguuaucauaucuccaaguguggcagaucuagauccguacgauaaaucccuccauucgagaguuuuuccuagaggaaaaugcucaggaauaacggugucuucuaccuacugcucuaccaaccaugacuacaccaucuggaugccugaaaaucccagacuggggaccucuugugauauuuucaccaauaguagagggaagagagcauccaaagggagcaagaccuguggauuuguagaugagagaggcuuguacaaaucucuaaaaggagcaugcaaacugaagcugugugggguucuuggacuuagacuuauggauggaacaugggucgcgauucagacaucagacgagaccaaguggugcccuccugaccagcuagugaaucuacaugacuuucauucggaugagauugaacaucuuguuguggaggaguuggucaagaaaagggaagagugccuagaugcacuggaguccaucaugaccaccaaguccgugaguuuccgacgucucagucacuugaggaaacuugugccuggguucggaaaagcauacaccauauucaauaagaccuugauggaggcugaugcucacuacaagucgguccggacuuggaacgagaucauccccucuaaaggguguuugagaguuggaggcagaugucauccccaugugaacgggguguuuuuuaaugguauuauccuaggcccugacggccaugucuuaaucccggaaaugcagucaucucuccuacagcagcauauggaguuguuggaauccucggucaucccccuaaugcauccuuuggcagauccaucaacgguuuuuaaagauggugacgaggcggaggauuuuguugagguucaccuuccagaugugcauaagcaggucucaggggucgaucucggucucccaagcugggggaaguauguguugaugagcgcaggcauuuugacugcacugaugcugaugaucuucuuaaugacguguugccgaaggacuaauagagcagagucaauacaacacagucuuggagagacagggaggaaagugucgguaaccucccaaagcgggagggucauaucuucaugggagucauacaaaagcgaaggugagaccaaguuguaa

SEQ ID NO: 63055 - RNA, 1575 nt, Artificial Sequence
  derived and/or modified CDS sequence (wt) from glycoprotein__RABV__GQ472548.1
augauuccucaaguucuuuuguuuguuccccuucuaguuuucucgucauguuucgggaaauuccccauuuacacgauaccagacaaacuugguccauggagucccaucgauauacaucaucucagcuguccgaacaaucugguuguggaagaugaaggaugcaccaaucuguccggauuuuccuacauggaacucaaagugggauauauuucagccauaaaagugaacggauucaccuguacagguguggugacagaagcagaaaccuacacgaacuuuguugguuaugucaccaccacguuuaagagaaagcacuuucgcccuaugccggaugcguguagagcugcauacaacuggaaaauggcuggugaccccagguaugaagagucucugcacaauccguacccugacuaccacuggcuccgaacugucaagaccaccaaagagucccuugucaucauaucuccgagcguugcagauuuggacccguacgauaaaucccuucacucgagaguuuuuccuggcggaaaaugcucaggaauaaccguguccuccacuugcugcucuacuaaccacgacuacaccaucuggaugccugaaaauccuagacugggaacuucgugugacauuuucaccaauaguagagggaagagggcaucaaaagggggcaagacuuguggauuuguggaugaaagaggcuuguacaagucucuaaagggagcaugcaagcugaagcuaugugggguucugggacuuagacuuauggacggaacaugggucgcaauucagacaucagaugagaucaaauggugcucuccugaucagcuaguaaaucuacacgacuuucacucggaugagauugaacaucuuguuguggaggaguuggucaaaaagagggaagagugucuggacgcacuggagacuauuaugaccacaaaguccgugaguuucagacgucuuagucauuugaggaagcuagucccuggguuuggaaaggcuuacaccauauucaacaaaaccuugauggaggcugaugcucacuauaaaucaauccggacuuggaaugaaaucauccccucuaaaggguguuuaagaguuggggggagaugucauccucaugugaacgggguguucuucaacggcauuauacuggguccugacggacauguucuaaucccagagaugcaaucgucccuccuccaccagcauauggaauuguuggaguccucagucaucccguugaugcaucccuuagcagacccgucaacagucuuuaaggacggcgacgaggcagaggacuuuguugagguucaccuuccggaugugcacaagcagaucucgggggucgaucuuggucucccaaacugggggaaguauguguugacaagugcaggugcucugacugcauuaauguuaaugauuuucuuaaugacguguugcagagagacuaauagagcagagucaauacaacgcaguccuggagagacagagaggaaagugucgguaacuucucacaacgggagggucauaucuucaugggaaucauauaaaagcggaggugagaccaagcuguga

SEQ ID NO: 63056 - RNA, 1575 nt, Artificial Sequence
  derived and/or modified CDS sequence (wt) from glycoprotein__RABV__GQ472549.1
augguuccgcaagcccuucuguuuguaccccuucuggccguuccauuguguuuagggaaauuccccauuuacacgauaccagacaaacucggucccuggagucccauugacauacaucaucucagcuguccgaauaacuugguuguggaagaugaaggauguaccaaucugucaggauuuucauacauggaacuuaaaguaggauacauuucagccauaaaggugaacggguucacuuguacggguguggugacggaagcagaaaccuacacuaacuuuguuggcuaugucaccaccacguuuaagagaaagcacuuucgaccaacuccggaugcaugcagauccgcauacaauuggaagauggcuggugaccccagauacgaagagucucugcacaaucccuauccugauuaucauuggcuccggacuguaaaaaccaccaaagaguccuuuguuaucauaucuccaaguguggcagaucuagauccguacgauaaaucccuucauucgagaguuuuuccuagaggaaaaugcucgggaauaacggugucuucuaccuacugcucuacuaaccaugacuacaccaucuggaugccugaaaaucccagacuggggaccucuugugauauuuucaccaacagcagagggaagagagcauccaaagggagcaagaccuguggauuuguagaugagagaggcuuguacaaaucucuaaaaggagcaugcaaacugaagcugugugggguucuuggacuuagacuuauggauggaacaugggucgcgauucagacaucagacgagaccaaguggugcccuccugaccagcuagugaaucuacaugacuuucauucggaugagauugaacaucuuguuguggaggaguuggucaagaaaagggaagagugucuagaugcacuggaguccaucaugaccaccaaguccgugaguuuccgacgucucagucacuugaggaaacuugugccuggguucggaaaagcauacaccauauucaauaagaccuugauggaggcugaugcucacuacaaaucgguccggacuuggaacgagaucauccccucuaaaggguguuugagaguuggaggcagaugucauccccaugugaaugggguguuuuuuaaugguauuauccuaggcccugacggccaugucuugaucccagaaaugcagucaucucuccuucagcaacauauggaguuguuggaauccucggucauccccuuaaugcauccuuuggcagauccaucaacgguguuuaaagauggugacgaggcagaggauuuuguugagguucaccuuccagaugugcauaagcaugucucaggggucgaucucggucucccaagcugggggaaguauguguuggugagcgcaggcauuuugacugcacugauguugacgauuuucuuaaugacguguugccgaaggacuaauagagcagaaucaauacaacacagucuuggagagacagggaggaaagugucgguaaccucccaaagcgggagggucauaucuucaugggagucauacaaaagcggaggugagaccaagcuguaa

SEQ ID NO: 63057 - RNA, 1575 nt, Artificial Sequence
  derived and/or modified CDS sequence (wt) from glycoprotein__RABV__GQ472550.1
augguuccucaagcccuucuguuuguaccccuucuggccauuccauuguguuuugggaaauuccccauuuacacgauaccagacaaacucggucccuggagucccauugauauacaucaccucagcuguccgaauaauuugguuguggaggaugaaggauguaccaaucugucaggauucucauacauggaacuuaaaguaggauacauuucagccauaaaggugaacggguucacuuguacggguguggugacggaagcagaaaccuacacuaacuuuguuggcuaugucaccaccacguuuaagagaaagcacuuucgaccaacaccggaugcaugcagauccgcauacaauuggaagauggcuggugaccccagauacgaagagucucugcacaaucccuauccugauuaucauuggcuucggacuguaaaaaccaccaaagaguccuuuguuaucauaucuccaaguguggcagaucuagauccguacgauaaaucccuccauucgagaguuuuuccuagaggaaaaugcucaggaauaacggugucuucuaccuacugcucuaccaaccaugacuacaccaucuggaugccugaaaaucccagacuggggacuucuugugauauuuucaccaauaguagagggaagagagcauccaaagggagcaagaccuguggauuuguagaugagagaggcuuguacaaaucucuaaaaggagcaugcaaacugaagcugugugggguucuuggacuuagacuuauggauggaacaugggucgcgauucagacaucagacgagaccaaguggugcccuccugaccagcuagugaaucuacaugacuuucauucggaugagauugaacaucuuguuguggaggaguuggucaagaaaaggggagagugccuagaugcacuggaguccaucaugaccaccaaguccgugaguuuccgacgucucagucacuugaggaaacuugugccuggguucggaaaagcauacaccauauucaauaagaccuugauggaggcugaugcucacuacaagucgguccggacuuggaacgagaucauccccucuaaaggguguuugagaguuggaggcagaugucauccccaugugaacgggguguuuuuuaaugguauuauccuaggcccugacggccaugucuuaaucccggaaaugcagucaucucuccuucagcagcauauggaguuguuggaauccucggucaucccccuaaugcauccuuuggcagauccaucaacgguuuuuaaagauggugacgaggcggaggauuuuguugagguucaccuuccagaugugcauaagcaggucucaggggucgaucucggucucccaagcugggggaaguauguguugaugagcgcaggcauuuugacugcacugaugcugaugaucuucuuaaugacguguugccgaaggacuaauagagcagagucaauacaacacagucuuggagagacagggaggaaagugucgguaaccucccaaagcgggagggucauaucuucaugggagucauacaaaagcggaggugagaccaaguuguaa

SEQ ID NO: 63058 - RNA, 1575 nt, Artificial Sequence
  derived and/or modified CDS sequence (wt) from glycoprotein__RABV__GQ472551.1
augguuccucaaguucuuuuguuuguuccccuucuaguuuucucgucauguuucgggaaauuccccauuuacacgauaccagacaaacuugguccauggagucccaucgauauacaucaucucagcuguccgaacaaucuuguuguggaagaugaagggugcaccaaucuguccggauuuuccuacauggaacucaaagugggguauauuucagccauaaaagugaacggauucaccuguacagguguggugacagaagcagaaaccuacacgaacuuuguugguuaugucaccaccacguuuaagagaaagcacuuucgcccuaugccggaugcgugcagagccgcauacaacuggaagauggcuggugaccccagguaugaagagucucugcacaauccguacccugacuaccacuggcuccgaacugucaagaccaccaaggagucccuugucaucauaucuccgagcguugcagauuuggacccguacgauaaaucccuucacucgagaguuuuuccuggcggaaaaugcucaggaauaaccguguccuccacuugcugcucuacuaaccacgacuacaccaucuggaugccugaaaauccuagacugggaacuucgugugacauuuucaccaauaguagagggaagagggcaucaaaagggggcaagacuuguggauuuguggaugaaagaggauuguacaagucucuaaagggagcaugcaagcugaagcuaugugggguucuaggacuuagacuuauggacggaacauggguugcaauucagacaucagaugagaucaaauggugcucuccugaucagcuaguaaaucuacacgacuuucacucggaugagauugaacaucuuguuguggaggaguuggucaaaaagagggaagagugucuggacgcacuggagacuauuaugaccacaaaguccgugaguuucagacgucuuagucauuugaggaagcuagucccuggguuuggaaaggcguauaccauauucaacaaaaccuugauggaggcugaugcucacuauaaaucaauccggacuuggaaugaaaucauccccucuaaaggguguuuaagaguuggggggagaugucauccucaugugaacgggguguucuucaacggcauuauacuggguccugacggacauguucuaaucccagagaugcaaucgucccuccuccaccagcauauggaauuguuggaguccucagucaucccguugaugcaucccuuagcagauccgucaacagucuuuaaagacggcgacgaggcagaggacuuuguugagguucaccuuccggaugugcacaagcagaucucggggguugaucuuggucucccaaacugggggaaguaugugcugauaagugcgggugcucugacugcauuaauguugaugauuuucuuaaugacguguugcagaaaggcuaauagagcagagucaaugcaacacaauccuggagagacagggaggaaagugucgguaacuucucacaacggaagggucauaucuucaugggaaucauauaaaagcggaggugagaccaaacuguga

SEQ ID NO: 63059 - RNA, 1575 nt, Artificial Sequence
  derived and/or modified CDS sequence (wt) from glycoprotein__RABV__GQ472552.1
augauuccucaggcucuuuuguuugugccccuuuugguuuucucguugugcuucgggaaauuccccaucuacacgauaccagacaaacuuggcccuuggaguccuauugauauacaucaucucaguugcccuaacaauuuaguuguggaggaugagggguguaccaaccugucaggauucuccuacauggaacucaaaguaggguacauuucagccauaaaagugaacggguucacuugcacggguguggugacagaagcagagaccuacacaaacuuugucggcuacgucaccaccacguuuaagagaaagcacuuccgcccgacaccagaugccugcagagcagcauauaacuggaagauggcaggugaccccagauaugaggaaucucugcauaauccguauccugauuaucacuggcuccggacuguaaagaccaccaaggagucucuuguuaucauaucuccaagugugucggacuuagacccguacgauaaaucucuucauuccagaguuuuucccagcgguaaaugcucaggaauaacagugucuucuaccuauugucccacuaaccaugacuauaccaucuggaugccggaaaauccgagacuagggaccucuugugacauuuucaccaauagcagagggaagagagcauccaaagggagcaagaccuguggauuuguggacgaaagaggcuuguacaagucucuaaaaggggcaugcaaauugaagcuauguggaguucuuggacuuagacuuauggacggaacaugggcugcgauucaagcaucugaugaggccaaauggugcccuccugaucaguuagugaauauacaugauuuucgcucugaugagauugaacaucuuguuguggaagaguuaguaaagaaaagggaagagugucuagaugcacuagagucuaucaugaccaccaaguccguaaguuucagacgccucagucacuugaggaagcucguccccggguuugggaaagcauauaccauauucaacaaaaccuugauggaggcugaugcucacuacaaaucaguccguacauggaaugagaucaucccuucuaaaggguguuuaagaguuggggggagaugucacccccaugugaacgggguguuuuucaaugguaucauccuggguccugauggacauguucuaauuccggagaugcagucgucucuccuucaacagcauauggaguuauuggaauccucgguaauaccgcugaugcaucccuuggcagaucccucaacaguuuuuaaggacggugacgaggcggaagauuuugucgagguucaccuuccggauguccacaagcaggucucgggaguugaucucggucucccaagcugggggaaguauguucugaugaguguaggcgcuaugauugcacugauguugaugauuuucuugacgacguguugcagaaaagcuaauggagcagaaucaauacaacaccgucucggagagacgggaaggaaagugucggucaccucccaaagcgggagggucauaucuuccugggagucguauaaaagcgggggugagaccaagcuguag

SEQ ID NO: 63060 - RNA, 1575 nt, Artificial Sequence
  derived and/or modified CDS sequence (wt) from glycoprotein__RABV__GQ472553.1
augauuccucaaguucuuuuguuuguuccccuucuaguuuucucgucauguuucgggaaauuccccauuuacacgauaccagacaaacuugguccauggagucccaucgauauacaucaucucagcuguccgaacaaucugguuguggaagaugaaggaugcaccaaucuguccggauuuuccuacauggaacucaaagugggauauauuucagccauaaaagugaacggauucaccuguacagguguggugacagaagcagaaaccuacacgaacuuuguugguuaugucaccaccacguuuaagagaaagcacuuucgcccuaugccggaugcguguagagcugcauacaacuggaaaauggcuggugaccccagguaugaagagucucugcacaauccguacccugacuaccacuggcuccgaacugucaagaccaccaaagagucccuugucaucauaucuccgagcguugcagauuuggacccguacgauaaaucccuucacucgagaguuuuuccuggcggaaaaugcucaggaauaaccguguccuccacuugcugcucuacuaaccacgacuacaccaucuggaugccugaaaauccuagacugggaacuucgugugacauuuucaccaauaguagagggaagagggcaucaaaagggggcaagacuuguggauuuguggaugaaagaggcuuguacaagucucuaaagggagcaugcaagcugaagcuaugugggguucugggacuuagacuuauggacggaacauggguugcaauucagacaucagaugagaucaaauggugcucuccugaucagcuaguaaaucuacacgacuuucacucggaugagauugaacaucuuguuguggaggaguuggucaaaaagagggaagagugucuggacgcacuggagacuauuaugaccacaaaguccgugaguuucagacgucuuagucauuugaggaagcuagucccuggguuuggaaaggcuuacaccauauucaacaaaaccuugauggaggcugaugcucacuauaaaucaauccggacuuggaaugaaaucauccccucuaaaggguguuuaagaguuggggggagaugucauccucaugugaacgggguguucuucaacggcauuauacuggguccugacggacauguucuaaucccagagaugcaaucgucccuccuccaccagcauauggaauuguuggaguccucagucaucccguugaugcaucccuuagcagacccgucaacagucuuuaaggacggcgacgaggcagaggacuuuguugagguucaccuuccggaugugcacaagcagaucucgggggucgaucuuggucucccaaacugggggaaguauguguugacaagugcaggugcucugacugcauuaauguuaaugauuuucuuaaugacguguugcagagagacuaauagagcagagucaauacaacgcaguccuggagagacagagaggaaagugucgguaacuucucacaacgggagggucauaucuucaugggaaucauauaaaagcggaggugagaccaagcuguga

SEQ ID NO: 63061 - RNA, 1575 nt, Artificial Sequence
  derived and/or modified CDS sequence (wt) from glycoprotein__RABV__GQ472554.1
augguuccucaagcccuucuguuuguaccccuucuggccauuccauuguguuuugggaaauuccccauuuacacgauaccagacaaacucggucccuggagucccauugauauacaucaccucagcuguccgaauaauuugguuguggaggaugaaggauguaccaaucugucaggauucucauacauggaacuuaaaguaggauacauuucagccauaaaggugaacggguucacuuguacggguguggugacggaagcagaaaccuacacuaacuuuguuggcuaugucaccaccacguuuaagagaaagcacuuucgaccaacaccggaugcaugcagauccgcauacaauuggaagauggcuggugaccccagauacgaagagucucugcacaaucccuauccugauuaucauuggcuucggacuguaaaaaccaccaaagaguccuuuguuaucauaucuccaaguguggcagaucuagauccguacgauaaaucccuccauucgagaguuuuuccuagaggaaaaugcucaggaauaacggugucuucuaccuacugcucuaccaaccaugacuacaccaucuggaugccugaaaaucccagacuggggaccucuugugauauuuucaccaauaguagagggaagagagcauccaaagggagcaagaccuguggauuuguagaugagagaggcuuguacaaaucucuaaaaggagcaugcaaacugaagcugugugggguucuuggacuuagacuuauggauggaacaugggucgcgauucagacaucagacgagaccaaguggugcccuccugaccagcuagugaaucuacaugacuuucauucggaugagauugaacaucuuguuguggaggaguuggucaagaaaagggaagaaugccuagaugcacuggaguccaucaugaccaccaaguccgugaguuuccgacgucucagucacuugaggaaacuugugccuggguucggaaaagcauacaccauauucaauaagaccuugauggaggcugaugcucacuacaagucgguccggacuuggaacgagaucauccccucuaaaggguguuugagaguuggaggcagaugucauccccaugugaacgggguguuuuuuaaugguauuauccuaggcccugacggccaugucuuaaucccggaaaugcagucaucucuccuucagcagcauauggaguuguuggaauccucggucaucccccuaaugcauccuuuggcagauccaucaacgguuuuuaaagauggugacgaggcggaggauuuuguugagguucaccuuccagaugugcauaagcaggucucaggggucgaucucggucucccaagcugggggaaguauguguugaugagcgcaggcauuuugacugcacugaugcugaugaucuucuuaaugacguguugccgaaggacuaauagagcagagucaauacaacacagucuuggagagacagggaggaaagugucgguaaccucccaaagcgggagggucauaucuucaugggagucauacaaaagcggaggugagaccaaguuguaa

SEQ ID NO: 63062 - RNA, 1575 nt, Artificial Sequence
  derived and/or modified CDS sequence (wt) from glycoprotein__RABV__GQ472555.1
augguuccucaaguucuuuuguuuguuccccuucuaguuuucucgucauguuucgggaaauuccccauuuacacgauaccagacaaacuugguccauggagucccaucgauauacaucaucucagcuguccgaacaaucuuguuguggaagaugaagggugcaccaaucuguccggauuuuccuacauggaacucaaagugggauauauuucagccauaaaagugaacggauucaccuguacagguguggugacagaagcagaaaccuacacgaacuuuguugguuaugucaccaccacguuuaagagaaagcacuuucgcccuaugccggaugcgugcagagccgcauacaacuggaagauggcuggugaccccagguaugaagagucucugcacaauccguacccugacuaccacuggcuccgaacugucaagaccaccaaggagucccuugucaucauaucuccgagcguugcagauuuggacccguacgauaaaucccuucacucgagaguuuuuccuggcggaaaaugcucaggaauaaccguguccuccacuugcugcucuacuaaccacgacuacacccucuggaugccugaaaauccuagacugggaacuucgugugacauuuucaccaauaguagagggaagagggcaucaaaagggggcaagacuuguggauuuguggaugaaagaggauuguacaagucucuaaagggagcaugcaagcugaagcuaugugggguucuaggacuuagacuuauggacggaacauggguugcaauucagacaucagaugagaucaaauggugcccuccugaucagcuaguaaaucuacacgacuuucacucggaugagauugaacaucuuguuguggaggaguuggucaaaaagagggaagagugucuggacgcacuggagacuauuaugaccacaaaguccgugaguuucagacgucuuagucauuugaggaagcuagucccuggguuuggaaaggcguauaccauauucaacaaaaccuugauggaggcugaugcucacuauaaaucaauccggacuuggaaugaaaucauccccucuaaaggguguuuaagaguuggggggagaugucauccucaugugaacgggguguucuucaacggcauuauacuggguccugacggacauguucuaaucccagagaugcaaucgucccuccuccaccagcauauggaauuguuggaguccucagucaucccguugaugcaucccuuggcagacccgucaacagucuuuaaagacggcgacgaggcagaggacuuuguugagguucaccuuccggaugagcacaagcagaucucggggguugaucuuggucucccaaacuggaggaaguaugugcugauaagugcgggugcucugacugcauuaauguugaugauuuucuuaaugacguguugcagaaaggcuaauagagcagagucaauacaacacaauccuggagagacagggaggaaagugucgguaacuucucccaacggaagggucauaucuucaugggaaucauauaaaagcggaggugagaccaaacuguga

SEQ ID NO: 63063 - RNA, 1575 nt, Artificial Sequence
  derived and/or modified CDS sequence (wt) from glycoprotein__RABV__GQ472556.1
augguuccucaaguucuuuuguuuguuccccuucuaguuuucucgucauguuucgggaaauuccccauuuacacgauaccagacaaacuugguccauggagucccaucgauauacaucaucucagcuguccgaacaaucuuguuguggaagaugaagggugcaccaaucuguccggauuuuccuacauggaacucaaagugggguauauuucagccauaaaagugaacggauucaccuguacagguguggugacagaagcagaaaccuacacgaacuuuguugguuaugucaccaccacguuuaagagaaagcacuuucgcccuaugccggaugcgugcagaaccgcauacaacuggaagauggcuggugaccccagguaugaagagucucugcacaauccguacccugacuaccacuggcuccgaacugucaagaccaccaaggagucccuugucaucauaucuccgagcguugcagauuuggacccguacgauaaaucccuucacucgagaguuuuuccuggcggaaaaugcucaggaauaaccguguccuccacuugcugcucuacuaaccacgacuacaccaucuggaugccugaaaauccuagacugggaacuucgugugacauuuucaccaauaguagagggaagagggcaucaaaagggggcaagacuuguggauuuguggaugaaagaggaucguacaagucucuaaagggagcaugcaagcugaagcuaugugggguucuaggacuuagacuuauggacggaacauggguugcaauucagacaucagaugagaucaaauggugcucuccugaucagcuaguaaaucuacacgacuuucacucggaugagauugaacaucuuguuguggaggaguuggucaaaaagagggaagagugucuggacgcacuggagacuauuaugaccacaaaguccgugaguuucagacgucuuagucauuugaggaagcuagucccuggguuuggaaaggcguauaccauauucaacaaaaccuugauggaggcugaugcucacuauaaaucaauccggacuuggaaugaaaucauccccucuaaaggguguuuaagaguuggggggagaugucauccucaugugaacgggguguucuucaacggcauuauacuggguccugacggacauguucuaaucccagagaugcaaucgucccuccuccaccagcauauggaauuguuggaguccucagucaucccguugaugcaucccuuagcagauccgucaacagucuuuaaagacggcgacgaggcagaggacuuuguugagguucaccuuccggaugugcacaagcagaucucggggguugaucuuggucucccaaacugggggaagcaugugcugauaagugcgggugcucugacugcauuaauguugaugauuuuccuaaugacguguugcagaaaggcuaauagagcagagucaauacaacacaauccuggagagacagggaggaaagugucgguaacuucucacaacggaagggucauaucuucaugggaaucauauaaaagcggaggugagaccaaacuguga

SEQ ID NO: 63064 - RNA, 1575 nt, Artificial Sequence
  derived and/or modified CDS sequence (wt) from glycoprotein__RABV__GQ472557.1
augguuccucaagcccuucuguuuguaccccuucuggccauuccauuguguuuugggaaauucccuauuuacacgauaccagacaaacucggucccuggagucccauugauauacaucaccucagcuguccgaauaauuugguuguggaggaugaaggauguaccaaucugucaggauucucauacauggaacuuaaaguaggauacauuucagccauaaaggugaacggguucacuuguacggguguagugacggaagcagaaaccuacacuaacuuuguuggcuaugucaccaccacguuuaagagaaagcacuuucgaccaacaccggaugcaugcagauccgcauacaauuggaagauggcuggugaccccagauacgaagagucucugcacaaucccuauccugauuaucauuggcuucggacuguaaaaaccaccaaagaguccuuuguuaucauaucuccaaguguggcagaucuagauccguacgauaaaucccuccauucgagaguuuuuccuagaggaaaaugcucaggaauaacggugucuucuaccuacugcucuaccaaccaugacuacaccaucuggaugccugaaaaucccagacuggggaccucuugugauauuuucaccaauaguagagggaagagagcauccaaagggagcaagaccuguggauuuguagaugagagaggcuuguacaaaucucuaaaaggagcaugcaaacugaagcugugugggguucuuggacuuagacuuauggauggaacaugggucgcgauucagacaucagacgagaccaaguggugcccuccugaccagcuagugaaucuacaugacuuucauucggaugagauugaacaucuuguuguggaggaguuggucaagaaaagggaagagugccuagaugcacuggaguccaucaugaccaccaaguccguaaguuuccgacgucucagucacuugaggaaacuugugccuggguucggaaaagcauacaccauauucaauaagaccuugauggaggcugaugcucacuacaagucgguccggacuuggaacgagaucauccccucuaaaggguguuugagaguuggaggcagaugucauccccaugugaacgggguguuuuuuaaugguauuauccuaggcccugacggccaugucuuaaucccggaaaugcagucaucucuccuucagcagcauauggaguuguuggaauccucggucaucccccuaaugcauccuuuggcagauccaucaacgguuuuuaaagauggugacgaggcggaggauuuuguugagguucaccuuccagaugugcauaagcaggucucagggguugaucucggucucccaagcugggggaaguauguguugaugagcgcaggcauuuugacugcacugaugcugaugaucuucuuaaugacguguugccgaaggacuaauagagcagagucaauacaacacagucuuggagagacagggaggaaagugucgguaaccucccaaagcgggagggucauaucuucaugggagucauacaaaagcggaggugagaccaaguuguaa

SEQ ID NO: 63065 - RNA, 1575 nt, Artificial Sequence
  derived and/or modified CDS sequence (wt) from glycoprotein__RABV__GQ472558.1
auggcuccucaagcccuucuguuuguaccccuucuggccguuccauuguguuuagggaaauuccccauuuacacgauaccagacaaacucggucccuggagucccauugacauacaucaucucagcuguccgaauaacuugguuguggaagaugaaggauguaccaaucugucaggauuuucauacauggaacuuaaaguaggauacauuucagccauaaaggugaacggguucacuuguacggguguggugacggaagcagaaaccuacacuaacuuuguuggcuaugucaccaccacguuuaagagaaagcacuuucgaccaacuccggaugcaugcagauccgcauacaauuggaagauggcuggugaccccagauacgaagagucucugcacaaucccuauccugauuaucauuggcuccggacuguaaaaaccaccaaagaguccuuuguuaucauaucuccaaguguggcagaucuagauccguacgauaaaucccuucauucgagaguuuuuccuagaggaaaaugcucaggaauaacggugucuucuaccuacugcucuacuaaccaugacuacaccaucuggaugccugaaaaucccagacuggggaccucuugugauauuuucaccaacagcagagggaagagagcauccaaagggagcaagaccuguggauuuguagaugagagaggcuuguacaaaucucuaaaaggagcaugcaaacugaagcugugugggguucuuggacuuagacuuauggauggaacaugggucgcgauucagacaucagacgagaccaaguggugcccuccugaccagcuagugaaucuacaugacuuucauucggaugagauugaacaucuugucguggaggaguuggucaagaaaagggaagagugucuagaugcacuggaguccaucaugaccaccaaguccgugaguuuccgacgucucagucacuugaggaaacuugugccuggguucggaaaagcauacaccauauucaauaagaccuugauggaggcugaugcucacuacaaaucgguccggacuuggaacgagaucauccccucuaaaggguguuugagaguuggaggcagaugucauccccaugugaaugggguguuuuuuaaugguauuauccuaggcccugacggccaugucuugaucccagaaaugcagucaucucuccuucagcaacauauggaguuguuggaauccucggucauccccuuaaugcauccuuuggcagauccaucaacgguguuuaaagauggugacgaggcagaggauuuuguugagguucaccuuccagaugugcauaagcaggucucaggggucgaucucggucucccaagcugggggaaguauguguugaugagcgcaggcauuuugacugcacugauguugacgauuuucuuaaugacguguugccgaaggacuaauagagcagaaucaauacaacacagucuuggagagacagggaggaaagugucgguaaccucccaaagcgggagggucauaucuucaugggagucauacaaaagcggaggugagaccaagcuguaa

SEQ ID NO: 63066 - RNA, 1575 nt, Artificial Sequence
  derived and/or modified CDS sequence (wt) from glycoprotein__RABV__GQ472559.1
auggcuucacaagcccuucuguuuguaccccuucuggccauuccauuguguuuugggaaauuccccauuuacacgauaccagacaaacucggucccuggagucccauugauauacaucaccucagcuguccgaauaauuugguuguggaggaugaaggauguaccaaucugucaggauucucauacauggaacuuaaaguaggauacauuucagccauaaaggugaacggguucacuuguacugguguggugacggaagcagaaaccuacacuaacuuuguuggcuaugucaccacuacguuuaagagaaagcacuuucgaccaacaccggaugcaugcagauccgcauacaauuggaagauggcuggugaccccagauacgaagagucucugcacaaucccuauccugauuaucauuggcuucggacuguaaaaaccaccaaagagucccuuguuaucauaucuccaaguguggcagaucuagauccguacgauaaaucccuccauucgagaguuuuuccuagaggaaaaugcucaggaauaacggugucuucuaccuacugcucuaccaaccaugacuacaccaucuggaugccugaaaaucccagacuggggaccucuugugauauuuucaccaauaguagagggaagagagcauccaaagggagcaagaccuguggauuuguagaugagagaggcuuguacaaaucucuaaaaggagcaugcaaacugaagcugugugggguucuuggacuuagacuuauggauggaacaugggucgcgauucagacaucagacgagaccaaguggugcccuccugaccagcuagugaaucuacaugacuuucauucggaugagauugaacaucuuguuguggaggaguuggucaagaaaagggaagagugccuagaugcacuggaguccaucaugaccaccaaguccgugaguuuccgacgucucagucacuugaggaaacuugugccuggguucggaaaagcauacaccauauucaauaagaccuugauggaggcugaugcucacuacaagucgguccggacuuggaacgagaucauccccucuaaaggguguuugagaguuggaggcagaugucauccccaugugaacgggguguuuuuuaaugguauuauccuaggcccugacggccaugucuuaaucccggaaaugcagucaucucuccuucagcagcauauggaguuguuggaauccucggucaucccccuaaugcauccuuuggcagauccaucaacgguuuuuaaagauggugacgaggcggaggauuuuguugagguucaccuuccagaugugcauaagcaggucucaggggucgaucucggucucccaagcugggggaaguauguguugaugagcgcaggcauuuugacugcacugaugcugaugaucuucuuaaugacguguugccgaaggacuaauagagcagagucaauacaacacagucuuggagagacagggaggaaagugucgguaaccucccaaagcgggagggucauaucuucaugggagucauacaaaagcggaggugagaccaaguuguaa

SEQ ID NO: 63067 - RNA, 1575 nt, Artificial Sequence
  derived and/or modified CDS sequence (wt) from glycoprotein__RABV__GQ472560.1
augguuccucaaguucuuuuguuuguuccccuucuaguuuucucgucauguuucgggaaauuccccauuuacacgauaccagacaaacuugguccauggagucccaucgauauacaucaucucagcuguccgaacaaucuuguuguggaagaugaagggugcaccaaucuguccggauuuuccuacauggaacucaaagugggauauauuucagccauaaaagugaacggauucaccuguacagguguggugacagaagcagaaaccuacacgaacuuuguugguuaugucaccaccacguuuaagagaaagcacuuucgcccuacgccggaugcgugcagagccgcauacaacuggaagauggcuggugaccccagguaugaagagucucugcacaauccguacccugacuaccacuggcuccgaacugucaagaccaccaaggagucccuugucaucauaucuccgagcguugcagauuuggacccguacgauaaaucccuucacucgggaguuuuuccuggcggaaaaugcucaggaauaaccguguccuccacuugcugcucuacuaaccacgacuacaccaucuggaugccugaaaauccuagacugggaacuucgugugacauuuucaccaauaguagagggaagagggcaucaaaagggggcaagacuuguggauuuguggaugaaagaggauuguacaagucucuaaagggagcaugcaagcugaagcuaugugggguucuaggacuuagacuuauggacggaacauggguugcaauucagacaucagaugagaucaaauggugcucuccugaucagcuaguaaaucuacacgacuuucacucggaugagauugaacaucuuguuguggaggaguuggucaaaaagaggaaagagugucuggacgcacuggagacuauuaugaccacaaaguccgugaguuucagacgucuuagucauuugaggaagcuagucccuggguuuggaaaggcguauaccauauucaacaaaaccuugauggaggcugaugcucacuauaaaucaauccggacuuggaaugaaaucauccccucuaaaggguguuuaagaguuggggggagaugucauccucaugugaacgggguguucuucaacggcauuauacuggguccugacggacauguucuaaucccagagaugcaaucgucccuccuccaccagcauauggaauuguuggaguccucagucaucccguugaugcaucccuuagcagacccgucaacagucuuuaaagacggcgacgaggcagaggacuuuguugagguucaccuuccggaugugcacaagcagaucucggggguugaucuuggucucccaaacugggggaaguaugugcugauaagugcgggugcucugacugcauuaauguugaugauuuucuuaaugacguuuugcagaaaggcuaauagagcagagucaauacaacacaauccuggagagacagggaggaaagugucgguaacuucucacaacggaagggucauaucuucaugggaaucauauaaaagcggaggugagaccaaacuguga

SEQ ID NO: 63068 - RNA, 1575 nt, Artificial Sequence
  derived and/or modified CDS sequence (wt) from glycoprotein__RABV__GQ857450.1
augauuccucaaguucuuuuauuuguuccccuucuaguuuucucgucguguuuugggaaauuccccauuuacacgauaccagacaaacuugguccauggagucccauugauauacaucaucucagcuguccgaacaaucugguuguggaagaugaaggaugcaccaaucugucuggauuuuccuacauggaacucaaagugggauauauuucagccauaaaagugaacggauucaccuguacagguguggugacagaagcagaaaccuacacgaacuuuguugguuaugucaccaccacguuuaagagaaagcacuuucgcccuacgccggaugcgugcagagccgcauacaacuggaagauggcuggugaccccagguaugaagagucucugcacaauccguacccugauuaccacuggcuccgaacugucaagaccuccaaggagucccuugucaucauaucuccgagcguugcagauuuggacccguacgauaaaucccuucacucgagaguuuuuccuggcggaaaaugcucaggaauaaccguguccuccacuugcugcucuacuaaccacgacuacaccaucuggaugccugaaaauccuagacugggaacuucgugugacauuuucaccaauaguagagggaagagggcaucaaaagggggcaagacuuguggauuuguggaugaaagaggcuuguacaagucucuaaagggagcaugcaagcugaagcuaugugggguucuaggacuuagacuuauggacggaacaugggucgcgauucagacaucagaugagaucaaauggugcucuccugaucagcuaguaaaucuacacgacuuucacucagaugagauugaacaucuuguuguggaggaguuggucaaaaagagggaagaaugucuggacgcacuggagacuauuaugaccacaaaguccgugaguuucaggcgucuuagucauuugaggaagcuagucccuggguuuggaaaggcguauaccauauucaacaaaaccuugauggaggcugaugcucacuauaaaucaauccggacuuggaaugaaaucauccccucuaaaggguguuuaagaguuggggggagaugucauccucaugugaacgggguguucuucaacggcauuauacuggguccugacggacauguucuaaucccagagaugcaaucgucccuccuccaccagcauauggaauuguuggaguccucagucaucccuuugaugcaucccuuagcagacccgucaacaguuuuuaaagacggcgacgaggcagaggacuuuguugagguucaccuuccggaugugcacaagcagaucucggggguugaucuuggucucccaaacugggggaaguacgugcugguaagugcaggugcucugacugcauuaauguugaugauuuucuuaaugacguguugcagaaagacuaauagagcagagucaauacaacacaguccuggagagacagggaggaaagugucgguaacuucucacaacggaagggucauauccucaugggaaucauauaaaaguggaggugagaccaagcuguga

SEQ ID NO: 63069 - RNA, 1575 nt, Artificial Sequence
  derived and/or modified CDS sequence (wt) from glycoprotein__RABV__GQ857451.1
augauuccucaaguucuuuuguuuguuccccuucuaguguucucgucguguuuugggaaauuccccauuuacacgauaccagacaaacuugguccauggagucccaucgauauacaucaucucagcuguccgaacaaucugguuguggaagaugaaggaugcaccaaucugucuggauuuuccuacauggaacucaaagugggauauauuucagccauaaaagugaacggauucaccuguacagguguggugacagaagcagaaaccuacacgaacuuuguugguuaugucaccaccacguuuaagagaaagcacuuucgcccuacgccggaugcgugcagagccgcauacaacuggaagauggcuggugaccccagguaugaagagucucugcacaauccguacccugauuaucacuggcuccgaacugucaagaccuccaaggagucccuugucaucauaucuccgagcguugcagauuuggacccguacgauaaaucccuucacucgagaguuuuuccuggcggaaaaugcucaggaauaaccguguccuccacuugcugcucuacuaaccacgacuacaccaucuggaugccugaaaauccuagacugagaacuucgugugacauuuucaccaauaguagagggaagagggcaucaaaagggggcaagacuuguggauuuguggaugaaagaggcuuguacaagucucuaaagggagcaugcaagcugaagcuaugugggguucuaggacuuagacuuauggacggaacaugggucgcaauucagacaucagaugagaucaaauggugcucuccugaucagcuaguaaaucuacacgacuuucacucagaugagauugaacaucuuguuguggaggaguuggucaaaaagagggaagagugucuggacgcacuggagacuauuaugaccacaaaguccgugaguuucaggcgucuuagucauuugaggaagcuagucccuggguuuggaaaggcguauaccauauucaacaaaaccuugauggaggcugaugcucacuauaaaucaauccggacuuggaaugaaaucauccccucuaaaggguguuuaagaguuggggggagaugucauccucaugugaacgggguauucuucaacggcauuauacuggguccugacggacauguucuaaucccagagaugcaaucgucccuccuccaccagcauauggaauuguuggaguccucagucaucccuuugaugcaucccuuagcagacccgucaacaguuuuuaaagacggcgacgaggcagaggacuuuguugagguucaccuuccggaugugcacaagcagaucucggggguugaucuuggucucccaaacugggggaaguacgugcugguaagugcaggugcucugacugcauuaauguugaugauuuucuugaugacguguugcagaaagacuaauagagcagagucaauacaacacaguccuggagagacagggaggaaggugucgguaacuucucacaacggaagggucauaucuucaugggaaucauauaaaaguagaggcgagaccaagcuguga

SEQ ID NO: 63070 - RNA, 1575 nt, Artificial Sequence
  derived and/or modified CDS sequence (wt) from glycoprotein__RABV__GQ857452.1
augauuccucaaguucuuuuguuuguuccccuucuaguguucucgucguguuuugggaaauuccccauuuacacgauaccagacaaacuugguccauggagucccaucgauauacaucaucucagcuguccgaacaaucugguuguggaagaugaaggaugcaccaaucugucuggauuuuccuacauggaacucaaagugggauauauuucagccauaaaagugaacggauucaccuguacagguguggugacagaagcagaaaccuacacgaacuuuguugguuaugucaccaccacguuuaagagaaagcacuuucgcccuacgccggaugcgugcagagccgcauacaacuggaagauggcuggugaccccagguaugaagagucucugcacaauccguacccugauuaucacuggcuccgaacugucaagaccuccaaggagucccuugucaucauaucuccgagcguugcagauuuggacccguacgauaaaucccuucacucgagaguuuuuccuggcggaaaaugcucaggaauaaccguguccuccacuugcugcucuacuaaccacgacuacaccaucuggaugccugaaaauccuagacugggaacuucgugugacauuuucaccaauaguagagggaagagggcaucaaaagggggcaagacuuguggauuuguggaugaaagaggcuuguacaagucucuaaagggagcaugcaagcugaagcuaugugggguucuaggacuuagacuuauggacggaacaugggucgcaauucagacaucagaugagaucaaauggugcucuccugaucagcuaguaaaucuacacgacuuucacucagaugagauugaacaucuuguuguggaggaguuggucaaaaagagggaagagugucuggacgcacuggagacuauuaugaccacaaaguccgugaguuucaggcgucuuagucauuugaggaagcuagucccuggguuuggaaaggcguauaccauauucaacaaaaccuugauggaggcugaugcucacuauaaaucaauccggacuuggaaugaaaucauccccucuaaaggguguuuaagaguuggggggagaugucauccucaugugaacgggguauucuucaacggcauuauacuggguccugacggacauguucuaaucccagagaugcaaucgucccuccuccaccagcauauggaauuguuggaguccucagucaucccuuugaugcaucccuuagcagacccgucaacaguuuuuaaagacggcgacgaggcagaggacuuuguugagguucaccuuccggaugugcacaagcagaucucggggguugaucuuggucucccaaacugggggaaguacgugcugguaagugcaggugcucugacugcauuaauguugaugauuuucuugaugacguguugcagaaagacuaauagagcagagucaauacaacacaguccuggagagacagggaggaaggugucgguaacuucucacaacggaagggucauaucuucaugggaaucauauaaaaguggaggcgagaccaagcuguga

SEQ ID NO: 63071 - RNA, 1575 nt, Artificial Sequence
  derived and/or modified CDS sequence (wt) from glycoprotein__RABV__GQ857453.1
augauuccucaaguucuuuuguuuguuccccuucuaguguucucgucguguuuugggaaauuccccauuuacacgauaccagacaaacuugguccauggagucccaucgauauacaucaucucagcuguccgaacaaucugguuguggaagaugaaggaugcaccaaucugucuggauuuuccuacauggaacucaaagugggauauauuucagccauaaaagugaacggauucaccuguacagguguggugacagaagcagaaaccuacacgaacuuuguuggguaugucaccaccacguuuaagagaaagcacuuucgcccuacgccggaugcgugcagagccgcauacaacuggaagauggcuggugaccccagguaugaagagucucugcacaauccguacccugauuaucacuggcuccgaacugucaagaccuccaaggagucccuugucaucauaucuccgagcguugcagauuuggacccguacgauaaaucccuucacucgagaguuuuuccuggcggaaaaugcucaggaauaacaguguccuccacuugcugcucuacuaaccacgacuacaccaucuggaugccugaaaauccuagacugggaacuucgugugacauuuucaccaauaguagagggaagagggcaucaaaagggggcaagacuuguggauuuguggaugaaagaggcuuguacaagucucuaaagggagcaugcaagcugaagcuaugugggguucuaggacuuagacuuauggacggaacaugggucgcaauucagacaucagaugagaucaaauggugcucuccugaucagcuaguaaaucuacacgacuuucacucagaugagauugaacaucuuguuguggaggaguuggucaaaaagagggaagagugucuggacgcacuggagacuauuaugaccacaaaguccgugaguuucaggcgucuuagucauuugaggaagcuagucccuggguuuggaaaggcguauaccauauucaacaaaacccugauggaggcugaugcucacuauaaaucaauccggacuuggaaugaaaucauccccucuaaaggguguuuaagaguuggggggagaugucauccucaugugaacgggguguucuucaacggcauuauacuggguccugacggacauguucuaaucccagagaugcaaucgucccuccuccaccagcauauggaauuguuggaguccucagucaucccuuugaugcaucccuuagcagacccgucaacaguuuuuaaagacggcgacgaggcagaggacuuuguugagguucaccuuccggaugugcacaagcagaucucggggguugaucuuggucucccaaacugggggaaguacgugcugguaagugcgggugcucugacugcauuaauguugaugauuuucuuaaugacguguugcaggaagacuaauagaguagagucaauacaacacaguccuggagagacagggaggaaagugucgguaacuucucacaacggaagggucauaucuucaugggaaucauauaaaaguggaggugagaccaagcuguga

SEQ ID NO: 63072 - RNA, 1575 nt, Artificial Sequence
  derived and/or modified CDS sequence (wt) from glycoprotein__RABV__GQ857454.1
augauuccucaaguucuuuuguuuguuccccuucuaguguucucgucguguuuugggaaauuccccauuuacacgauaccagacaaacuugguccauggagucccaucgauauacaucaucucagcuguccgaacaaucugguuguggaagaugaaggaugcaccaaucugucuggauuuuccuacauggaacucaaagugggauauauuucagccauaaaagugaacggauucaccuguacagguguggugacagaagcagaaaccuacacgaacuuuguugguuaugucaccaccacguuuaagagaaagcacuuucgcccuacgccggaugcgugcagagcugcauacaacuggaagauggcuggugaccccagguaugaagagucucugcacaauccguacccugauuaucacuggcuccgaacugucaagaccuccaaggagucccuugucaucauaucuccgagcguugcagauuuggacccguacgauaaaucccuucacucgagaguuuuuccuggcggaaaaugcucaggaauaaccguguccuccacuugcugcucuacuaaccacgacuacaccaucuggaugccugaaaauccuagacugggaacuucgugugacauuuucaccaauaguagagggaagagggcaucaaaagggggcaagacuuguggauuuguggaugaaagaggcuuguacaagucucuaaagggagcaugcaagcugaagcuaugugggguucuaggacuuagacuuauggacggaacaugggucgcaauucagacaucagaugagaucaaauggugcucuccugaucagcuaguaaaucuacacgacuuucacucagaugagauugaacaucuuguuguggaggaguuggucaaaaagagggaagagugucuggacgcacuggagacuauuaugaccacaaaguccgugaguuucaggcgucuuagucauuugaggaagcuagucccuggguuuggaaaggcguauaccauauucaacaaaaccuugauggaggcugaugcucacuauaaaucaauccggacuuggaaugaaaucauccccucuaaaggguguuuaagaguuggggggagaugucauccucaugugaacgggguguucuucaacggcauuauacuggguccugacggacauguucuaaucccagagaugcaaucgucccuccuccaccagcauauggaauuguuggaguccucagucaucccuuugaugcaucccuuagcagacccgucaacaguuuuuaaagacggcgacgaggcagaggacuuuguugagguucaccuuccggaugugcacaagcagaucucggggguugaucuuggucucccaaacugggggaaguacgugcugguaagugcaggugcucugacugcauuaauguugaugauuuucuuaaugacguguugcagaaagacuaauagagcagagucaauacaacacaguccuggagagacagggaggaaagugucgguaacuucucacaacggaagggucauaucuucaugggaaucauauaaaaguggaggugagaccaagcuguga

SEQ ID NO: 63073 - RNA, 1575 nt, Artificial Sequence
  derived and/or modified CDS sequence (wt) from glycoprotein__RABV__GQ857455.1
augauuccucaaguucuuuuguuuguuccccuucuaguuuucucgucguguuuugggaaauuccccauuuacacgauaccagacaaacuugguccauggagucccaucgauauacaucaucucagcuguccgaacaaucugguuguggaagaugaaggaugcaccaaucugucuggauuuuccuacauggaacucaaagugggauauauuucagccauaaaagugaacggauucaccuguacagguguggugacagaagcagaaaccuacacgaacuuuguugguuaugucaccaccacguuuaagagaaagcacuuucgcccuacgccggaugcgugcagagccgcguacaacuggaagauggcuggugaccccagguaugaagagucucugcacaauccguacccugauuaucacuggcuccgaacugucaagaccuccaaggagucccuugucaucauaucuccgagcguugcagauuuggacccguacgauaaaucccuucacucgagaguuuuuccuggcggaaaaugcucaggaauaaccguguccuccacuugcugcucuacuaaccacgacuacaccauuuggaugccugaaaauccuagacugggaacuucgugugacauuuucaccaauaguagagggaagagggcaucaaaagggggcaagacuuguggauuuguggaugaaagaggcuuguacaagucucuaaagggagcaugcaagcugaagcuaugugggguucuaggacuuagacuuauggacggaacaugggucgcaauucagacaucagaugagaucaaauggugcucuccugaucagcuaguaaaucuacacgacuuucacucagaugagauugaacaucugguuguggaggaguuggucaaaaagagggaagagugucuggacgcacuggagacuauuaugaccacaaaguccgugaguuucaggcgucuuagucauuugaggaagcuagucccuggguuuggaaaggcguauaccauauuuaacaaaaccuugauggaggcugaugcucacuauaaaucaauccggacuuggaaugaaaucauccccucuaaaggguguuuaagaguuggggggagaugucauccucaugugaacgggguguucuucaacggcauuauacuggguccugacggacauguucuaaucccagagaugcaaucgucccuccuccaccagcauauggaauuguuggagucuucagucaucccuuugaugcaucccuuagcagacccgucaacaguuuuuaaagacggcgacgaggcagaggacuuuguugagguucaccuuccggaugugcacaagcagaucucggggguugaucuuggucucccaaacugggggaaguacgugcugguaagugcaggugcucugacugcauuaguguugaugauuuucuuaaugacguguugcagaaagacuaauagagcagagucaauacaacacaguccuggagagacagggaggaaagugucgguaacuucucacaacggaagggucauaucuucaugggaaucauauaaaaguggaggugagaccaagcuguga

SEQ ID NO: 63074 - RNA, 1575 nt, Artificial Sequence
  derived and/or modified CDS sequence (wt) from glycoprotein__RABV__GQ857459.1
augauuccucaaguucuuuuguuuguuccccuucuaguuuucucgucguguuuugggaaauuccccauuuacacgauaccagacaaacuugguccauggagucccaucgauauacaucaucucagcuguccgaacaaucugguuguggaagaugaaggaugcaccaaucugucuggauuuuccuacauggaacucaaagugggauauauuucagccauaaaagugaacggauucaccuguacagguguggugacagaagcagaaaccuacacgaacuuuguugguuaugucaccaccacguuuaagagaaagcacuuucgcccuacgccggaugcgugcagagccgcauacaacuggaagauggcuggugaccccagguaugaagagucucugcacaauccguacccugauuaccacuggcuccgaacugucaagaccuccaaagagucccuugucaucauaucuccgagcguugcagauuuggacccguacgauaaaucccuucacucgagaguuuuuccuggcggaaaaugcucaggaauaaccguguccuccacuugcugcucuacuaaccacgacuacaccaucuggaugccugaaaauccuagacugggaacuucgugugacauuuucaccaacaguagagggaagagggcaucaaaagggggcaagacuuguggauuuguggaugaaagaggcuuguacaagucccuaaagggagcaugcaagcugaagcugugugggguucuaggacuuagacuuauggacggaacaugggucgcaauucagacaucagaugagaucaaauggugcucuccugaucagcuaguaaaucuacacgacuuucacucagaugagauugaacaucuuguuguggaggaguuggucaaaaagagggaagagugucuggacgcacuggagacuauuaugaccacaaaguccgugaguuucaggcgucuuagucauuugaggaagcuagucccuggguuuggaaaggcguauaccauauucaacaaaaccuugauggaggcugaugcucacuauaaaucaauccggacuuggaaugaaaucauccccucuaaaggguguuuaagaguuggggggagaugucauccucaugugaacgggguguucuucaacggcauuauacuggguccugacggacauguucuaaucccagagaugcaaucgucccuccuccaccagcauauggaauuguuggaguccucagucaucccuuugaugcauccuuuagcagacccgucaacaguuuuuaaagacggcgacgaggcagaggacuuuguugagguucaccuuccggaugugcacaagcagaucucggggguugaucuuggucucccaaacugggggaaguacgugcugguaagugcaggugcucugacugcauuaauguugaugauuuucuuaaugacguguugcagaaagacuaauagagcagagucaauacaacacaguccuggagagacagggaggaaagugucgguaacuucucacaacggaagggucauaucuucaugggaaucauauaaaaguggaggugagaccaagcuguga

SEQ ID NO: 63075 - RNA, 1575 nt, Artificial Sequence
  derived and/or modified CDS sequence (wt) from glycoprotein__RABV__GQ857460.1
augauuccucaaguucuuuuguuuguuccccuucuaguuuucucgucguguuuugggaaauuccccauuuacacgauaccagacaaacuugguccauggagucccaucgauauacaucaucucagcuguccgaacaaucugguuguggaagaugaaggaugcaccaaucugucuggauuuuccuacauggaacucaaagugggauauauuucagccauaaaagugaacggauucaccuguacagguguggugacagaagcagaaaccuacacgaacuuuguugguuaugucaccaccacguuuaagagaaagcacuuucgcccuacgccggaugcgugcagagccgcauacaacuggaagauggcuggugaccccagguaugaagagucucugcacaauccguacccugauuaccacuggcuccgaacugucaagaccuccaaggagucccuugucauaauaucuccgagcguugcagauuuggacccguacgauaaaucccuucacucgagaguuuuuccuggcggaaaaugcucaggaauaaccguguccuccacuugcugcucuacuaaccacgacuacaccaucuggaugccugaaaauccuagacugggaacuucgugugacauuuucaccaacaguagagggaagagggcaucaaaagggggcaagacuuguggauuuguggaugaaagaggcuuguacaagucucuaaagggagcaugcaagcugaagcuaugugggguucuaggacuuagacuuauggacggaacaugggucgcaauucagacaucagaugagaucaaauggugcucuccugaucagcuaguaaaucuacacgacuuucacucagaugagauugaacaucuuguuguggaggaguuggucaaaaagagggaagagugucuggacgcacuggagacuauuaugaccacaaaguccgugaguuucaggcgucuuagucauuugaggaagcuagucccuggguuuggaaaggcguauaccauauucaacaaaaccuugauggaggcugaugcucacuauaaaucaauccggacuuggaaugaaaucauccccucuaaaggguguuuaagaguuggggggagaugucauccucaugugaacgggguguucuucaacggcauuauacuggguccugacggacauguucuaaucccagagaugcaaucaucccuccuccaccagcauauggaauuguuggaguccucagucaucccuuugaugcaucccuuagcagacccgucaacaguuuuuaaagacggcgacgaggcagaggacuuuguugagguucaccuuccggaugugcacaagcagaucucggggguugaucuuggucucccaaacugggggaaguacgugcugguaagugcaggugcucugacugcauuaauguugaugauuuucuuaaugacguguugcagaaagacuaauagagcagagucaauacaacacaguccuggagagacagggaggaaagugucgguaacuucucacaacggaagggucauaucuucaugggaaucauauaaaaguggaggugagaccaagcuguga

SEQ ID NO: 63076 - RNA, 1575 nt, Artificial Sequence
  derived and/or modified CDS sequence (wt) from glycoprotein__RABV__GQ857461.1
augauuccucaaguucuuuuguuuguuccccuucuaguguucucgucguguuuugggaaauuccccauuuacacgauaccagacaaacuugguccauggagucccaucgauauacaucaucucagcuguccgaacaaucugguuguggaagaugaaggaugcaccaaucugucuggauuuuccuacauggaacucaaagugggauauauuucagccauaaaagugaacggauucaccuguacagguguggugacagaagcagaaaccuacacgaacuuuguugguuaugucaccaccacguuuaagagaaagcacuuucgcccuacgccggaugcgugcagagccgcauacaacuggaagauggcuggugaccccagguaugaagagucucugcacaauccguacccugauuaucacuggcuccgaacugucaagaccuccaaggagucccuugucaucauaucuccgagcguugcagauuuggacccguacgauaaaucccuucacucgagaguuuuuccuggcggaaaaugcucaggaauaaccguguccuccacuugcugcucuacuaaccacgacuacaccaucuggaugccugaaaauccuagacugggaacuucgugugacauuuucaccaauaguagagggaagagggcaucaaaagggggcaagacuuguggauuuguggaugaaagaggcuuguacaagucucuaaagggagcaugcaagcugaagcuaugugggguucuaggacuuagacuuauggacggaacaugggucgcaauucagacaucagaugagaucaaauggugcucuccugaucagcuaguaaaucuacacgacuuucacucagaugagauugaacaucuuguuguggaggaguuggucaaaaagagggaagagugucuggacgcacuggaggcuauuaugaccacaaaguccgugaguuucaggcgucuuagucauuugaggaagcuagucccuggguuuggaaaggcguauaccauauucaacaaaaccuugauggaggcugaugcucacuauaaaucaauccggacuuggaaugaaaucauccccucuaaaggguguuuaagaguuggggggagaugucauccucaugugaacgggguguucuucaacggcauuauacuggguccugauggacauguucuaaucccagagaugcaaucgucccuccuccaccagcauauggaauuguuggaguccucagucaucccuuugaugcaucccuuagcagacccaucaacaguuuuuaaagacggcgacgaggcagaggacuuuguugagguucaccuuccggaugugcacaagcagaucucggggguugaucuuggucucccaaacugggggaaguacgugcugguaagugcaggugcucugacugcauuaauguugaugauuuucuugaugacguguugcagaaagacuaauagagcagagucaauacaacacaguccuggagagacagggaggaaagugucgguaacuucucauaacggaagggucauaucuucaugggaaucauauaaaaguggaggugagaccaagcuguga

SEQ ID NO: 63077 - RNA, 1575 nt, Artificial Sequence
  derived and/or modified CDS sequence (wt) from glycoprotein__RABV__GQ857463.1
augauuccucaaguucuuuuguuuguuccccuucuaguguucucgucguguuuugggaaauuccccauuuacacgauaccagacaaacuugguccauggagucccaucgauauacaucaucucagcuguccgaacaaucugguuguggaagaugaaggaugcaccaaucugucuggauuuuccuacauggaacucaaagugggauauauuucagccauaaaagugaacggauucaccuguacagguguggugacagaagcagaaaccuacacgaacuuuguugguuaugucaccaccacguuuaagagaaagcacuuucgcccuacgccggaugcgugcagagccgcauacaacuggaagauggcuggugaccccagguaugaagagucucugcacaauccguacccugauuaucacuggcuccgaacugucaagaccuccaaggagucccuugucaucauaucuccgagcguugcagauuuggacccguacgauaaaucccuucacucgagaguuuuuccuggcggaaaaugcucaggaauaaccguguccuccacuugcugcucuacuaaccacgacuacaccaucuggaugccugaaaauccuagacugggaacuucgugugacauuuucaccaauaguagagggaagagggcaucaaaagggggcaagacuuguggauuuguggaugaaagaggcuuguacaagucucuaaagggagcaugcaagcugaagcuaugugggguucuaggacuuagacuuauggacggaacaugggucgcaauucagacaucagaugagaucaaauggugcucuccugaucagcuaguaaaucuacacgacuuucacucagaugagauugaacaucuuguuguggaggaguuggucaaaaagagggaagagugucuggacgcacuggagacuauuaugaccacaaaguccgugaguuucaggcgucuuagucauuugaggaagcuagucccuggguuuggaaaggcguauaccauauucaacaaaaccuugauggaggcugaugcucacuauaaaucaauccggacuuggaaugaaaucauccccucuaaaggguguuuaagaguuggggggagaugucauccucaugugaacgggguguucuucaacggcauuauacuggguccugacggacauguucuaaucccagagaugcaaucgucccuccuccaccagcauauggaauuguuggaguccucagucaucccuuugaugcaucccuuagcagacccgucaacaguuuuuaaagacggcgacgaggcagaggacuuuguugagguucaccuuccggaugugcacaagcagaucucggggguugaucuuggucucccaaacugggggaaguacgugcugguaagugcaggugcucugacugcauuaauguugaugauuuucuuaaugacguguugcagaaagacuaauagagcagagucaauacaacacaguccuggagagacagggaggaaagugucgguaacuucucacaacggaagggucauaucuucaugggagucauauaaaaguggaggcgagaccaagcuguga

SEQ ID NO: 63078 - RNA, 1575 nt, Artificial Sequence
  derived and/or modified CDS sequence (wt) from glycoprotein__RABV__GQ857464.1
augauuccucaaguucuuuuguuuguuccccuucuaguuuucucgucguguuuugggaaauuccccauuuacacgauaccagacaaacuugguccauggagucccaucgauauacaucaucucagcuguccgaacaaucugguuguggaagaugaaggaugcaccaaucugucuggauuuuccuacauggaacucaaagugggauauauuucagccauaaaagugaacggauucaccuguacagguguggugacagaagcagaaaccuacacgaacuuuguugguuaugucaccaccacguuuaagagaaagcacuuucgcccuacgccggaugcgugcagagccgcguacaacuggaagauggcuggugaccccagguaugaagagucucugcacaauccguacccugauuaucacuggcuccgaacugucaagaccuccaaggagucccuugucaucauaucuccgagcguugcagauuuggacccguacgauaaaucccuucacucgagaguuuuuccuggcggaaaaugcucaggaauaaccguguccuccacuugcugcucuacuaaccacgacuacaccaucuggaugccugaaaauccuagacugggaacuucgugugacauuuucaccaauaguagagggaagagggcaucaaaagggggcaagacuuguggauuuguggaugaaagaggcuuguacaagucucuaaagggagcaugcaagcugaagcuaugugggguucuaggacuuagacuuauggacggaacaugggucgcaauucagacaucagaugagaucaaauggugcucuccugaucagcuaguaaaucuacacgacuuucacucagaugagauugaacaucuugucguggaggaguuggucaaaaagagggaagagugucuggacgcacuggagacuauuaugaccacaaaguccgugaguuucaggcgucuuagucauuugaggaagcuagucccuggguuuggaaaggcguauaccauauucaacaaaaccuugauggaggcugaugcucacuauaaaucaauccggacuuggaaugaaaucauccccucuaaaggguguuuaagaguuggggggagaugucauccucaugugaacgggguguucuucaacggcauuauacuggguccugacggacauguucuaaucccagagaugcaaucgucccuccuccaccagcauauggaauuguuggaguccucagucaucccuuugaugcaucccuuagcagacccgucaacaguuuuuaaagacggcgacgaggcagaggacuuuguugagguucaccuuccggaugugcacaagcagaucucggggguugaucuuggucucccaaacugggggaaguacgugcugguaagugcaggugcucugacugcauuaauguugaugauuuucuuaaugacguguugcagaaagacuaauagagcagagucaauacaacacaguccuggagagacagggaggaaagugucgguaacuucucacaacggaagggucauaucuucaugggaaucauauaaaaguggaggugagaccaagcuguga

SEQ ID NO: 63079 - RNA, 1575 nt, Artificial Sequence
  derived and/or modified CDS sequence (wt) from glycoprotein__RABV__GQ857465.1
augauuccucaaguucuuuuguuuguuccucuucuaguuuucucgucguguuucgggaaauuccccauuuacacgauaccagacaaacuugguccauggagucccaucgauauacaucaccucagcuguccgaacaaucugguuguggaagaugaaggaugcaccaaucugucuggauuuuccuacauggaacucaaagugggauauauuucagccauaaaagugaacggauucaccuguacagguguggugaccgaagcagaaaccuacacuaacuuuguugguuaugucaccaccacguuuaagagaaagcacuuucgcccuaugccggaugcgugcagagccgcauacaacuggaagauggcuggugaccccagguaugaagagucucugcacaauccguaccccgacuaccacuggcuucgaacugucaagaccaccaaggagucccuugucaucauaucuccgagcguugcagauuuggacccguacgauaaaucccuucacucgagaguuuuuccuggcggaaaaugcucaggaauaaccguguccuccacuugcugcucuacuaaccacgacuacaccaucuggaugccugaaaauccuagacugggaacuucaugugacauuuucaccaauaguagagggaagagggccucaaaagggggcaagacuuguggauuuguggaugaaagaggcuuguacaagucucugaggggagcaugcaagcugaagcuaugugggguucuaggacuuagacuuauggacggaacaugggucgcaauucagacaucagaugagaucaaauggugcucuccugaucagcuaguaaaucuacacgacuuucacucggaugagaucgaacaucuuguuguggaggaguuggucaaaaagagggaagagugucuggacgcacuggagacuauuaugaccacaaaguccgugaguuucagacgucuuagucauuugaggaagcuagucccuggguuuggaaaggcguauaccauauucaacaagaccuugauggaggcugaugcucacuacaaaucaauccggacuuggaaugaaaucauccccuccaaaggguguuuaagaguuggggggagaugucauccucaugugaacgggguguucuucaacggcauuauacuggguccugacggacauguucucaucccagagaugcagucgucccuccuccaccagcauauggaauuguuggaguccucagucaucccuuugaugcaucccuuagcagacccgucaacagucuuuaaagacggcgacgaggcagaggacuuuguugagguucaccuuccggaugugcacaagcagaucucggggguugaucuuggucucccaaacugggggaaguaugugcugauaagugcaggugcucugacugcauuaauguugacgauuuucuuaaugacguguugcagaaagacuaauagagcagagucaauacaacacaguccuggagagacagggaggaaagugucggugacuucucacaacggaagggucauaucuucaugggaaucauauaaaagcggaagugagaccaagcuguga

SEQ ID NO: 63080 - RNA, 1575 nt, Artificial Sequence
  derived and/or modified CDS sequence (wt) from glycoprotein__RABV__GQ857466.1
augauuccucaaguucuauuguuuguuccccuucuaguuuucucgucguguuuugggaaauuccccauuuacacgauaccagacaaacuugguccauggagucccaucgauauacaucaucucagcuguccgaacaaucugguuguggaagaugaaggaugcaccaaucugucuggauuuuccuacauggaacucaaagugggauauauuucagccauaaaagugaacggauucaccuguacagguguggugaccgaagcagaaaccuacacuaacuuuguugguuaugucaccaccacguuuaagagaaagcacuuucgcccuaugccggaugcgugcagagccgcauacaacuggaagauggcuggugaccccagguaugaagagucucugcacaauccguaccccgacuaccacuggcuccgaacugucaagaccaccaaggagucccuugucaucauaucuccgagcguugcagauuuggacccguacgauaaaucccuucacucgagaguuuuuccuggcggaaaaugcucaggaauaaccguguccuccacuugcugcucuacuaaccacgacuacaccaucuggaugccugaaaauccuagacugggaacuucaugugacauuuucaccaauaguagagggaagagggcaucaaacgggggcaagacuuguggauuuguggaugaaagaggcuuguacaagucucuaaagggagcaugcaagcugaagcuaugugggguucuaggacuuagacuuauggacggaacaugggucgcgauucagacaucagaugagaucaaauggugcucuccugaucagcuaguaaaucuacaugacuuucacucggaugagauugaacaucuuguuguggaggaguuggucaaaaagagggaagagugucuggacgcacuggagacuauuaugaccacaaaguccgugaguuucagacgucuuagucauuugaggaagcuagucccuggguuuggaaaggcguauaccauauucaacaaaaccuugauggaggcugaugcucacuacaaaucaauccggacuuggaaugaaaucauccccucaaaaggguguuuaagaguuggggggagaugucauccucaugugaacgggguguucuucaauggcauuauacuggguccugacggacauguucuaaucccagagaugcagucgucccuccuccaccagcauauggaauuguuggaguccucagucaucccuuugaugcaucccuuagcagacccgucaacagucuuuaaagacggcgacgaggcagaggacuuuguugagguucaccuuccggaugugcacaagcagaucucggggauugaucuuggucucccaaacugggggaaguaugugcugauaagugcaggugcucugacugcauuaauguugacgauuuucuuaaugacguguugcagaaagacuaauagagcagagucaauacaacacaguccuggagagacagggaggaaagugucggugacuucucacaacggaagggucauaucuucaugggaaucauauaaaagcggaagugagaccaagcuguga

SEQ ID NO: 63081 - RNA, 1575 nt, Artificial Sequence
  derived and/or modified CDS sequence (wt) from glycoprotein__RABV__GQ857467.1
augauuccucaaguucuauuguuuguuccccuucuaguuuucucgucguguuuugggaaauuccccauuuacacgauaccagacaaacuugguccauggagucccaucgauauacaucaucucagcuguccgaacaaucugguuguggaagaugaaggaugcaccaaucugucuggauuuuccuacauggaacucaaagugggauauauuucagccauaaaagugaacggauucaccuguacagguguggugaccgaagcagaaaccuacacuaacuuuguugguuaugucaccaccacguuuaagagaaagcacuuucgcccuaugccggaugcgugcagagccgcauacaacuggaagauggcuggugaccccagguaugaagagucucugcacaauccguaccccgacuaccacuggcuccgaacugucaagaccaccaaggagucccuugucaucauaucuccgagcguugcagauuuggacccguacgauaaaucccuucacucgagaguuuuuccuggcggaaaaugcucaggaauaaccguguccuccacuugcugcucuacuaaccacgacuacaccaucuggaugccugaaaauccuagacugggaacuucaugugacauuuucaccaauaguagagggaagagggcaucaaaauggggcaagacuuguggauuuguggaugaaagaggcuuguacaagucucuaaagggagcaugcaagcugaagcuaugugggguucuaggacuuagacuuauggacggaacaugggucgcgauucagacaucagaugagaucaaauggugcucuccugaucagcuaguaaaucuacaugacuuucacucggaugagauugaacaucuuguuguggaggaguuggucaaaaagagggaagagugucuggacgcacuggagacuauuaugaccacaaaguccgugaguuucagacgucuuagucauuugaggaagcuagucccuggguuuggaaaggcguauaccauauucaacaaaaccuugauggaggcugaugcucacuacaaaucaauccggacuuggaaugaaaucauccccucaaaaggguguuuaagaguuggggggagaugucauccucaugugaacgggguguucuucaauggcauuauacuggguccugacggacauguucuaaucccagagaugcagucgucccuccuccaccagcauauggaauuguuggaguccucagucaucccuuugaugcaucccuuagcagacccgucaacagucuuuaaagacggcgacgaggcagaggacuuuguugagguucaccuuccggaugugcacaagcagaucucggggguugaucuuggucucccaaacugggggaaguaugugcugauaagugcaggugcucugacugcauuaauguugacgauuuucuuaaugacguguugcagaaagacuaauagagcagagucaauacaacacaguccuggagagacagggaggaaagugucggugacuucucacaacggaagggucauaucuucaugggaaucauauaaaagcggaagugagaccaagcuguga

SEQ ID NO: 63082 - RNA, 1575 nt, Artificial Sequence
  derived and/or modified CDS sequence (wt) from glycoprotein__RABV__GQ857470.1
augauuccacaaguucuuuuguuuguuccccuucuaguuuucucgucguguuuugggaaauuccccauuuacacgauaccagacaaacuugguccauggagucccaucgauauacaucaucucagcuguccgaacaaucugguuguggaagaugaaggaugcaccaaucugucuggauuuuccuacauggaacucaaagugggauauauuucagccauaaaagugaacggauucaccuguacagguguggugaccgaagcagaaaccuacacuaacuuuguugguuaugucaccaccacguuuaaaagaaagcacuuucgcccuaugccggaugcgugcagagccgcauacaacuggaagauggcuggugaccccagguaugaagagucucugcacaauccguaccccgacuaccacuggcuccgaacugucaagaccaccaaggagucccuugucaucauaucuccgagcguugcagauuuggacccguacgauaaaucccuucacucgagaguuuuuccuggcggaaaaugcucaggaauaaccguguccuccacuugcugcucuacuaaccacgacuacaccaucuggaugccugaaaauccuagacugggaacuucaugugacauuuucaccaauaguagagggaagagggcaucaaaagggggcaagacuuguggguuuguggaugaaagaggcuuguacaagucucuaaagggagcaugcaaaaugaagcuaugugggguucuaggacuuagacuuauggacggaacaugggucgcgauucaaacaucagaugagaucaaauggugcucuccugaucagcuaguaaaucuacacgacuuucacucggaugagauugaacaucuuguuguggaggaguuggucaaaaagagggaagagugucuggacgcacuagagacuauuaugaccacaaaguccgugaguuucagacgucuuagucauuugaggaagcuagucccuggguuuggaaaggcguauaccauauucaacaaaaccuugauggaggcugaugcucacuacaaaucaauccggacuuggaaugaaaucauccccuccaaaggguguuuaagaguuggggggagaugucauccucaugugaacgggguguucuucaacggcaucauacuggguccugacggacauguucuaaucccagagaugcagucgucccuccuccaccagcauauggaauuguuggaguccucagucaucccuuugaugcaucccuuagcagacccgucaacagucuuuaaagacggcgacgaggcagaggacuuuguugagguucaccuuccggaugugcacaagcagaucucggggguugaucuuggucucccaaacugggggaaguaugugcugauaagugcaggugcucugacugcauuaauguugacgauuuucuuaaugacguguugcagaaagacuaauaaagcagagucaauacaacacaguccuggagagacagggaggaaagugucggugacuucucacaacggaagggucauaucgucaugggaaucauauaaaagcggaagugagaccaagcuguga

SEQ ID NO: 63083 - RNA, 1575 nt, Artificial Sequence
  derived and/or modified CDS sequence (wt) from glycoprotein__RABV__GQ857471.1
augauuccucaaguucuuuuguuuguuccccuucuaguuuucucgucguguuuugggaaauuccccauuuacacgauaccagacaaacuugguccauggagucccaucgauauacaucaucucagcuguccgaacaaucugguuguggaagaugaaggaugcaccaaucugucuggauuuuccuacauggaacucaaagugggauauauuucagccauaaaaguaaacggauucaccuguacagguguggugacagaagcagaaaccuacaccaacuuugucgguuaugucaccaccacguuuaagagaaagcacuuucgcccuaugccggaugcgugcagagccgcauacaacuggaagauggcuggugaccccagguaugaagagucucugcacaauccguacccugacuaccacuggcuccggacugucaagaccuccaaggagucccuugucaucauaucuccgagcguugcagauuuggacccguacgauaaaucccuucacucgagaguuuuuccuggcggaaaaugcucaggaauaaccguguccuccacuugcugcucuacuaaccacgacuacaccaucuggaugccugaaaauccuagacugggaacuucgugugauauuuucaccaauaguagagggaagagggcaucaaaagggggcaagacuuguggauuuguggaugaaagaggcuuguacaagucucuaaagggagcaugcaagcugaagcuaugugggguucuaggacuuagacuuauggacggaacaugggucgcaauucagacaucagaugagaucaaauggugcucuccugaucagcuaguaaaucuacacgacuuucacucggaugagauugaacaucucguuguggaggaguuggucaaaaagagggaagagugucuggacgcacuggagacuauuaugaccacaaaguccgugaguuucaggcgucuuagucauuugaggaagcuagucccuggguuuggaaaggcguauaccaucuucaacaaaaccuugauggaggcugaugcucacuauaaaucaauccggacuuggaaugaaaucauccccucuaaaggguguuuaagaguuggggggagaugucauccucaugugaacgggguguucuucaacggcauuauacuggguccugacggacauguucuaaucccagagaugcaaucgucccuccuccaccagcauauggaauuguuggaguccucagucaucccuuugaugcaucccuuagcagacccgucaacagucuuuaaagacggcgacgaggcagaggacuuuguugagguucaccuuccggaugugcacaagcagaucucggggguugaucuuggucucccaaacugggggaaguaugugcugauaagugcaggugcucugacugcauuaauguugaugauuuucuuaaugacguguugcagaaagacuaauagagcagagucaauacaacacaguccuggagagacagggaggaaagugucgguaacuucucacagcggaagggucauaucuucaugggaaucauauaaaagcggaggugagaccaagcuguga

SEQ ID NO: 63084 - RNA, 1575 nt, Artificial Sequence
  derived and/or modified CDS sequence (wt) from glycoprotein__RABV__GQ857472.1
augauuccucaaguucuuuuguuugucccccuucuaguuuucucgucguguuuugggaaauuccccauuuacacgauaccagacaaacuugguccauggagucccaucgauauacaucaucucagcuguccgaacaaucugguuguggaagaugaaggaugcaccaaucugucuggauuuuccuacauggaacucaaagugggauauauuucagccauaaaaguaaacggauucaccuguacagguguggugacagaagcagaaaccuacacuaacuuuguugguuaugucaccaccacguuuaagagaaagcacuuucgcccuaugccggaugcgugcagagccgcauacaacuggaagauggcuggugaccccagguaugaagagucucugcacaauccguacccugacuaccacuggcuccggacugucaagaccuccaaggagucccuugucaucauaucuccgagcguugcagauuuggacccguacgauaaaucccuucacucgagaguuuuuccuggcggaaaaugcucaggaauaaccguguccuccacuugcugcucuacuaaccacgacuacaccaucuggaugccugaaaauccuagacugggaacuucgugugacauuuucaccaauaguagagggaagagggcaucaaaagggggcaagacuuguggauuuguggaugaaagaggcuuguacaagucucuaaagggagcaugcaaaaugaagcuaugugggguucuaggacuuagacuuauggacggaacaugggucgcaauucagacaucagaugagaucaaauggugcucuccugaucagcuaguaaaucuacacgacuuucacucggaugagauugaacaucucguuguggaggaguuggucaaaaagagggaagagugucuggacgcacuggagacuauuaugaccacaaaguccgugaguuucaggcgucuuagucauuugaggaagcuagucccuggguuuggaaaggcguauaccaucuucaacaaaaccuugauggaggcugaugcucacuauaaaucaauccggacuuggaaugaaaucauccccucuaaaggguguuuaagaguuggggggagaugucauccucaugugaacgggguguucuucaacggcauuauacuggguccugacggacauguucuaaucccagagaugcaaucgucccuccuccaccagcauauggaauuguuggaguccucagucaucccuuugaugcaucccuuagcagacccgucaacagucuuuaaagacggcgacgaggcagaggacuuuguugagguucaccuuccggaugugcacaagcagaucucggggguugaucuuggucucccaaacugggggaaguaugugcugauaagugcaggugcucugacugcauuaauguugaugauuuucuuaaugacguguugcagaaagacuaauagagcagagucaauacaacacaguccuggagagacagggaggaaagugucgguaacuucucacaacggaagggucauaucuucaugggaaucauauaaaagcggaggugagaccaagcuguga

SEQ ID NO: 63085 - RNA, 1575 nt, Artificial Sequence
  derived and/or modified CDS sequence (wt) from glycoprotein__RABV__GQ918139.1
augguuccucagguucuuuuguuuguacuccuucuggguuuuucguuguguuucgggaaguuccccauuuacacgauaccagacgaacuuggucccuggagcccuauugacauacaccaucucagcuguccaaauaaccugguuguggaggaugaaggauguaccaaccuguccgaguucuccuacauggaacucaaagugggauacaucucagccaucaaagugaacggguucacuugcacagguguugugacagaggcagagaccuacaccaacuuuguugguuaugucacaaccacauucaagagaaagcauuuccgccccaccccagacgcauguagagccgcguauaacuggaagauggccggugaccccagauaugaagagucccuacacaauccauaccccgacuaccacuggcuucgaacuguaagaaccaccaaagagucccucauuaucauauccccaagugugacagauuuggacccauaugacaaaucccuucacucaagggucuucccuggcggaaagugcucaggaauaacgguguccucuaccuacugcucaacuaaccaugauuacaccauuuggaugcccgagaauccgagaccaaggacaccuugugacauuuuuaccaauagcagagggaagagagcauccaacgggaacaagacuugcggcuuuguggaugaaagaggccuguauaagucucuaaaaggagcaugcaggcucaaguuauguggaguucuuggacuuagacuuauggauggaacaugggucgcgaugcaaacaucagaugagaccaaauggugcccuccagaucaguuggugaauuugcacgacuuucgcucagacgagauugagcaucucguuguggaggaguuagucaagaaaagagaggaaugucuggaugcauuagaguccaucaugaccaccaagucaguaaguuucagacgucucagucaccugagaaaacuugucccaggguuuggaaaagcauauaccauauucaacaaaaccuugauggaggcugaugcucacuacaagucaguccggaccuggaaugagaucauccccucaaaaggguguuugaaaguuggaggaaggugccauccucaugugaacgggguguuuuucaaugguauaauauuagggccugacgaccauguccuaaucccagagaugcaaucaucccuccuccagcaacauauggaguuguugaaaucuucaguuaucccccugaugcacccccuggcagacccuucuacaguuuucaaagaaggugaugaggcugaggauuuuguugaaguucaccuccccgauguguacaaacagaucucagggguugaccugggucucccgaacuggggaaaguauguauugaugacugcaggggccaugauuggccugguguugauauuuucccuaaugacauggugcagaagagccaaucgaccagaaucgaaacaacgcaguuuuggagggacaggggggaaugugucagucacuucccaaagcggaaaagucauaccuucaugggaaucauauaggaguggaggugagaucagacuguga

SEQ ID NO: 63086 - RNA, 1575 nt, Artificial Sequence
  derived and/or modified CDS sequence (wt) from glycoprotein__RABV__GU186379.1
augguuccucaagcccuucuguuuguaccccuucuggccguuccauuguguuuugggaaauuccccauuuacacgauaccagacaaacucggucccuggagucccauugauauacaucaucucagcuguccgaauaauuugguuguggaggaugaaggauguaccaaucugucaggauuuucauacauggaacuuaaaguaggauacauuucagccauaaaggugaacggguucacuuguacggguguggugacggaagcagaaaccuacaccaacuuuguuggcuaugucaccaccacguuuaagagaaagcacuuucgaccaacaccggaugcgugcagauccgcauacaauuggaagauggcugguggccccagauacgaagagucucugcacaaucccuauccugauuaucauuggcuccggacuguaaaaaccaccaaagaguccuuugucaucauaucuccaaguauggcagaucuagauccguacgauaaaucccuucauucgagaguuuuuccuagaggaaaaugcucaggaauaacggugucuucuaccuacugcucuacuaaccaugacuacaccaucuggaugcuugaaaaucccagacuggggaccucuugugauauuuucaccaacagcagagggaagagagcauccaaagggagcaagaccuguggauuuguagaugagagaggcuuguacaaaucucuaaaaggagcaugcaaacugaagcugugugggguucuuggacuuagacuuauggauggaacaugggucgcgauucagacaucagacgagaccaaguggugcccuccugaccagcuagugaaucuacaugacuuucauucggaugagauugaacaucuuguuguggaggaguuggucaagaaaagggaagagugucuaggugcacuggaguccaucaugaccaccaaguccgugaguuuccgacgucucagucacuugaggaaacuugugccuggauucggaaaagcauacaccauauucaauaagaccuugauggaggcugaugcucacuacaaaucgguccggacuuggaacgagaucauccccucuaaaggguguuugagaguuggaggcaggugucauccccaugugaacgggguguuuuuuaaugguauuauccuaggcccugacggccaugucuugaucccggaaaugcagucaucucuccuucagcagcacauggaguuguuggaauccucggucauccccuuaaugcauccuuuggcagauccaucaacgguuuuuaaagauggugacgaggcggaggauuuuguugagguucaccuuccagaugugcauaagcaggucucaggggucgaucucggucucccaagcugggggaaguauguguugaugagcgcaggcauuuugacugcacugauguugaugauuuucuuaaugacguguugccgaaggaccaauagagcagaaucaauacaacacagucuuggagagacagggaggaaagucucgguaaccucucaaaacgggagggucauaucuucaugggagucauacaaaagcggaggugagaccaagcuguaa

SEQ ID NO: 63087 - RNA, 1575 nt, Artificial Sequence
  derived and/or modified CDS sequence (wt) from glycoprotein__RABV__GU186380.1
augguuccucaagcccuucuguuuguaccccuucuggccguuccauuguguuuugggaaauuccccauuuacacgauaccagacaaacucggucccuggagucccauugauauacaucaucucagcuguccuaauaauuugguuguggaggaugaaggauguaccaaucugucaggauuuucauacauggaacuuaaaguaggauacauuucagccauaaaggugaacggguucacuuguacggguguggugacggaagcagaaaccuacaccaacuuuguuggcuaugucaccaccacguuuaagagaaagcacuuucgaccaacaccggaugcgugcagauccgcauacaauuggaagauggcuggugaccccagguacgaagagucucugcacaaucccuauccugauuaucauuggcuccggacuguaaaaaccaccaaagaguccuuugucaucauaucuccaaguguggcagaucuagauccguacgaugaaucccuucauucgagaguuuuuccuagaggaaaaugcucaggaauaacggugucuucuaccuacugcucuacuaaccaugacuacaccaucuggaugccugaaaaucccagacuggggaccucuugugauauuuucaccaacagcagagggaagagagcauccaaagggagcaagaccuguggauuuguagaugagagaggcuuguacaaaucucuaaaaggagcaugcaaacugaagcugugugggguucuuggacuuagacuuauggauggaacaugggucgcgauucagacaucagacgagaccaaguggugcccuccugaccagcuagcgaaucuacaugacuuucauucggaugagauugaacaucuuguuguggaggaguuggucaggaaaagggaagagugucuagaugcgcuggaguccaucaugaccaccaaguccgugaguuuccgacgucucagucacuugaggaaacuugugccuggauucggaaaagcauacaccauauucaauaagaccuugauggaggcugaugcucacuacaaaucgguccggacuuggaacgagaucauccccucuaaaggguguuugagaguuggaggcagaugucauccccaugugaacgggguguuuuuuaaugguauuauccuaggcccugacggccaugucuugaucccggaaaugcagucaucucuccuucagcagcauauggaguuguuggaauccucggucauccccuuaaugcauccuuuggcagauccaucaacgguuuuuaaagauggugacgaggcggaggauuuuguugagguucaccuuccagaugugcauaagcaggucucaggggucgaucucggucucccaagcugggggagguauguguugaugagcgcaggcauuuugacugcacugauguugaugauuuucuuaaugacguguugccgaaggaccaauagagcaaaaucaauacaacacagucuuggagagacagggaggaaaguuucgguaaccucccaaaacgggagggucauaucuucaugggagucauacaaaagcggaggugagaccaagcuguaa

SEQ ID NO: 63088 - RNA, 1575 nt, Artificial Sequence
  derived and/or modified CDS sequence (wt) from glycoprotein__RABV__GU186381.1
augauuccucaaguucuuuuguuuguuccccuucuaguuuucucgucguguuuugggaaauuccccauuuacacgauaccagacaaacuugguccauggagucccaucgauauacaucaucucagcuguccgaacaaucugguuguggaagaugaaggaugcaccaaucugucuggauuuuccuacauggaacucaaagugggauauauuucagccauaaaagugaacggauucaccuguacagguguggugacagaagcagaaaccuacacuaacuuuguugguuaugucaccaccacguuuaagagaaagcacuuucgcccuaugccggaugcgugcagagccgcauacaacuggaagauggcuggugaccccagguaugaagagucucugcacaauccguacccugacuaccacuggcuccgaacugucaagaccaccaaggagucccuugucaucauaucuccgagcguugcagauuuggacccguacgauaaaucccuucacucgagaguuuuuccuggcggaaaaugcucaggaauaaccguguccuccacuugcugcucuacuaaccacgacuacacaaucuggaugccugaaaacccuagacugggaacuucgugugacauuuucaccaauaguagagggaagagggcaucaaaagggggcaagacuuguggauuuguggaugaaagaggcuuguacaagucucuaaagggagcaugcaagcugaagcuaugugggguucuaggacuuagacuuauggacggaacaugggucgcaauucagacaucagaugagaucaaauggugcucuccugaucagcuaguaaaucuacacgacuuucacucggaugagauugaacaucuuguuguggaggaguuggucaaaaagagagaagagugucuggacgcacuggagacuauuaugaccacaaaguccgugaguuucagacgucuuagucauuugaggaagcuagucccuggguuuggaaaggcguauaccauauucaacaaaaccuugauggaggcugaugcucacuauaaaucaauccggacuuggaaugaaaucauccccucuaaaggguguuuaagaguuggggggagaugucauccucauguaaacgggguguucuucaacggcauuauacuggguccugacggacauguucuaaucccagagaugcaaucgucccuccuccaccagcauauggaauuguuggaguccucagucaucccuuugaugcaucccuuagcagacccgucaacagucuuuaaagacggcgacgaggcagaggacuuuguugagguucaccuuccggaugugcacaaacagauuucggggguugaucuuggucucccaaacugggggaaguaugugcugauaagugcaggugcucugacugcauuaaugucgaugauuuucuuaaugacguguugcagaaagacuaauagagcagagucaauacaacacaguccuggagagacagggaggaaagugucgguaacuucucacaacggaagggucauaucuucaugggaaucauauaaaagcggaggugagaccaagcuguga

SEQ ID NO: 63089 - RNA, 1575 nt, Artificial Sequence
  derived and/or modified CDS sequence (wt) from glycoprotein__RABV__GU186382.1
augauuccucaaguucuuuuguuuguuccccuucuaguuuucucgucguguuuugggaaauuccccauuuacacgauaccagacaaacuugguccauggaguccuaucgauauacaucaucucagcuguccgaacaaucugguuguggaagaugaaggaugcaccaaucugucuggauuuuccuacauggaacucaaagugggauauauuucagccauaaaagugaacggauucaccuguacagguguggugacagaagcagaaaccuacacuaacuuuguugguuaugucaccaccacguuuaagagaaagcacuuucgcccuaugccggaugcgugcagagccgcauacaacuggaagauggcuggugaccccagguaugaagagucucugcacaauccguacccugacuaccacuggcuccgaacugucaagaccaccaaggagucccuugucaucauaucuccgagcguugcagauuuggacccguacgauaaaucccuucacucgagaguuuuuccuggcggaaaaugcucaggaauaaccguguccuccacuugcugcucuacuaaccacgacuacaccaucuggaugccugaaaacccuagacugggaacuucgugugacauuuccaccaauaguagagggaagagggcaucaaaagggggcaagacuuguggauuuguggaugaaagaggcuuguacaagucucuaaagggagcaugcaagcugaagcuaugugggguucuaggacuuagacuuauggacgggacaugggucgcaauucagacaucagaugagaucaaauggugcucuccugaucagcuaguaaaucuacacgacuuucacucggaugagauugaacaucuuguuguggaggaguuggucaaaaagagagaagagugucuggacgcacuggagacuauuaugaccacgaaguccgugaguuucagacgucuuagucauuugaggaagcuagucccuggguuuggaaaggcguauaccauauucaacaaaaccuugauggaggcugaugcucacuauaaaucaauccggacuuggaaugaaaucauccccucuaaaggguguuuaagaguuggggggagaugucauccucauguaaacgggguguucuucaacggcauuauacuggguccugacggacauguucuaaucccagagaugcaaucgucccuccuucaccagcauauggaauuguuggaguccucagucauccccuugaugcaucccuuagcagacccgucaacagucuuuaaagacggcgacgaggcagaggacuuuguugagguucaccuuccggaugugcacaagcagauuucggggguugaucuuggucccccaaacugggggaaguaugugcugauaagugcaggugcucugacugcauuaaugucgaugauuuucuuaaugacguguugcagaaagacuaauagagcagagucgauacaacacaguccuggagagacagggaggaaagugucgguaacuucucacaacggaagggucauaucuucaugggaaucauauaaaagcggaggugagaccaagcuguga

SEQ ID NO: 63090 - RNA, 1575 nt, Artificial Sequence
  derived and/or modified CDS sequence (wt) from glycoprotein__RABV__GU186383.1
augauuccucaaguucuuuuguuuguuccccuucuaguuuucucgucguguuuugggaaauuccccauuuacacgauaccagacaaacuugguccauggagucccaucgauauacaucaucucagcuguccgaacaaucugguuguggaagaugaaggaugcaccaaucugucuggauuuuccuacauggaacucaaagugggauauauuucagccauaaaagugaacggauucaccuguacagguguggugacagaagcagaaaccuacacuaacuuuguugguuaugucaccaccacguuuaagagaaagcacuuucgcccuaugccggaugcgugcagagccgcauacaacuggaagauggcuggugaccccagguaugaagagucucugcacaauccguacccugacuaccacuggcuccgaacugucaagaccaccaaggagucccuugucaucauaucuccgagcguugcagauuuggacccguacgauaaaucccuucacucgagaguuuuuccuggcggaaaaugcucaggaauaaccguguccuccacuugcugcucuacuaaccacgacuacaccaucuggaugccugaaaacccuagacugggaacuucgugugacauuuucaccaauaguagagggaagagggcaucaaaagggggcaagacuuguggauuuguggaugaaagaggcuuguacaagucucuaaagggagcaugcaagcugaagcuaugugggguucuaggacuuagacuuauggacggaacaugggucgcaauucagacaucagaugagaucaaauggugcucuccugaucagcuaguaaaucuacacgacuuucacucggaugagauugaacaucuuguuguagaggaguuggucaaaaagagagaagagugucuggacgcacuggagacuauuaugaccacaaaguccgugaguuucagacgucuuagucauuugagggagcuagucccuggguuuggaaaggcguauaccauauucaauaaaaccuugauggaggcugaugcucacuauaaaucaauccggacuuggaaugaaaucauccccucuaaaggguguuuaagaguuggggggagaugucauccucauguaaacgggguguucuucaacggcauuauacuggguccugacggacauguucuaaucccagagaugcaaucgucccuccuccaccagcauauggaauuguuggaguccucagucaucccuuugaugcaucccuuagcagacccgucaacagucuuuaaagacggcgacgaggcagaggacuuuguugagguucaccuuccggaugugcacaagcagauuucggggguugaucuuggucucccaaacugggggaaguaugugcugauaagugcaggugcucugacugcauuaauaucgaugauuuucuuaaugacguguugcagaaagacuaauagagcagagucaauacaacacaguccuggagagacagggaggaaagugucgguaacuucucacaacggaagggucauaucuucaugggaaucauauaaaagcggaggcgagaccaagcuguga

SEQ ID NO: 63091 - RNA, 1575 nt, Artificial Sequence
  derived and/or modified CDS sequence (wt) from glycoprotein__RABV__GU186384.1
augauuccucaaguucuuuuguuuguuccccuucuaguuuucucgucauguuucgggaaauuccccauuuacacgauaccagacaaacuugguccauggagucccaucgauauacaucaucucagcuguccgaacaaucuuguuguggaagaugaagggugcaccaaucugucuggauuuuccuacauggaacucaaagugggauauauuucagccauaaaagugaacggauucacauguacagguguggugacagaagcagaaaccuacacgaacuuuguugguuaugucaccaccacguuuaagagaaagcacuuucgcccuaugccggaugcgugcagagccgcauacaacuggaagauggcuggugaccccagguaugaagagucucugcacaauccguacccugacuaccacuggcuccgaacugucaagaccaccaaggagucccuugucaucauaucuccgagcguugcagauuuggacccguacgauaaaucccuucacucgagaguuuuuccuggcggaaaaugcucaggaauaaccguguccuccacuugcugcucuacuaaccacgacuacaccaucuggaugccugaaaauccuagacugggaacuucgugugacauuuucaccaauaguagagggaagagggcaucaaaagggggcaagacuuguggauuuguggaugaaagaggcuuguacaagucucuaaagggagcaugcaagcugaagcuaugugggguucuaggacuuagacuuauggacggaacauggguugcaauucagacaucugaugagaucaaauggugcucuccugaucagcuaguaaaucuacacgacuuucacucggaugagauugaacaucuuguuguggaggaguuggucaaaaagagggaagagugucuggacgcacuggagacuauuaugaccacaaaguccgugaguuucagacgucuuagucauuugaggaagcuagucccuggguuuggaaaggcguauaccauauucaacaaaaccuugauggaggcugaugcucacuauaaaucaauccggacuuggaaugaaaucauccccucuaaaggguguuuaagaguuggggggagaugucauccucaugugaacgggguguucuucaacggcauuauacuggguccugacggacauguucuaaucccagagaugcaaucgucccuccuccaccagcauauggaauuguuggaguccucagucaucccguugaugcaucccuuagcagacccgucaacagucuuuaaagacggcgacgaggcagaggacuuuguugauguucaccuuccggaugugcacaagcagaucucggggguugaucuuggucucccaaacugggggaaguaugugcugauaagugcaggugcucugacugcauuaauguugaugauuuucuuaaugacguguugcagaaaggcuaauagagcagagucaauacaacacaauccuggagggacagggaggaaagugucgguaacuucucacaacggaagggucauaucuucaugggaaucauauaaaagcggaggugagaccaagcuguga

SEQ ID NO: 63092 - RNA, 1575 nt, Artificial Sequence
  derived and/or modified CDS sequence (wt) from glycoprotein__RABV__GU186385.1
augauuccucagguucuuuuguuuguuccccuucuaguguucucgucguguuuugggaaauuccccauuuacacgauaccagacaaacuugguccauggagucccaucgauauacaucaucucagcuguccgaacaauaugguuguggaagaugaaggaugcaccaaucugucuggauuuuccuacauggaacucaaagugggauauauuucagccauaaaagugaacggguucaccuguacagguguggugacagaagcagaaaccuacacuaacuuuguugguuaugucaccaccacguucaagagaaagcacuuucgcccuaugccggaugcgugcagagccgcauacaacuggaagauggcuggugaccccagguaugaagagucucugcacaauccguacccugacuaccacuggcuccgaacugucaagaccaccaaggagucccuugucaucauaucuccgagcguugcagauuuggacccguacgauaaaucccuucacucgagaguuuuuccuggcggaaaaugcucaggaauaaccguguccuccacuugcugcucuacuaaccacgacuacaccaucuggaugccugaaaauccuagacugggaacuucgugugacauuuucaccaauaguagagggaagagggcaucaaaagggggcaagacuuguggauuuguggaugaaagaggcuuguacaagucucuaaagggagcaugcaagcugaagcugugugggguucuaggacuuagacuuauggacggaacaugggucgcaauucagacaucagaugagaucaaauggugcucuccugaucagcuaguaaaucuacaugacuuucacucggaugagauugaacaucuuguuguggaggaguuggucaaaaagagggaagagugucuggacgcacuggagacuauuaugaccacaaaguccgugaguuucagacgucuuagucauuugaggaagcuagucccuggguuuggaaaggcguauaccauauucaacaaaaccuugauggaggcugaugcucacuauaagucaauccggacuuggaaugaaaucauccccucuaaaggguguuuaagaguuggggggagaugucauccucaugugaacgggguguucuucaacggcauuauacuggguccugacggacauguucuaaucccggaaaugcaaucgucccuccuccaccagcauauggaauuguuggaguccucagucaucccuuugaugcaucccuuagcagacccgucaacagucuuuaaagacggcgacgaggcagaggacuuuguugagguucaccuuccggaugugcacaagcagaucucggggguugaucuuggucucccaaacugggggaaguaugugcugauaagugcaggugcucugacugcguuaauguugacgauuuucuuaaugacguguugcagaaagacuaguagagcagagucgauacaacacaguccuggagagacagggaggaaagugucgguaacuucucacaacggaagggucauaucuucaugggaaucauauaaaagcggaggugagaccaagcuguga

SEQ ID NO: 63093 - RNA, 1575 nt, Artificial Sequence
  derived and/or modified CDS sequence (wt) from glycoprotein__RABV__GU186386.1
augguuccucaagcccuucuguuuguaccccuucuggccguuccauuguguuuugggaaauuccccauuuacacgauaccagacaaacucggucccuggagucccauugauauacaucaucucagcuguccgaauaauuugguuguggaggaugaaggauguaccaaucugucaggauuuucauacauggaacuuaaaguaggauacauuucagccauaaaggugaacggguucacuuguacggguguggugacggaagcagaaaccuacaccaacuuuguuggcuaugucaccaccacguuuaagagaaagcacuuucgaccaacaccggaugcgugcagauccgcauacaauuggaagauggcuggugaccccagauacgaagagucucugcacaaucccuauccugauuaucauuggcuccggacuguaaaaaccaccaaagaguccuuugucaucauaucuccaaguguggcagaucuagauccguacgauaaaucccuucauucgagaguuuuuccuagaggaaaaugcucaggaauaacggugucuucuaccuacugcucuacuaaccaugacuacaccaucuggaugccugaaaaucccagacuggggaccucuugugauauuuucaccaacagcagagggaagagagcauccaaagggagcaagaccuguggauuuguagaugagagaggcuuguacaaaucucuaaaaggagcaugcaaacugaagcugugugggguucuuggacuuagacuuauggauggaacaugggucgcgauucagacaucagacgagaccaaguggugcccuccugaccagcuagugaaucuacaugacuuucauucggaugagauugaacaucuuguuguggaggaguuggucaagaaaagggaagagugucuagaugcacuggaguccaucaugaccaccaaguccgugaguuuccgacgucucagucacuugaggaaacuugugccuggauucggaaaagcauacaccauauucaauaagaccuugauggaggcugaugcucacuacaaaucgguccggacuuggaacgagaucauccccucuaaaggguguuugagaguuggaggcagaugucauccccaugugaacgggguguuuuuuaaugguauuauccuaggcccugacggccaugucuugaucccggaaaugcagucaucucuccuucagcagcauauggaguuguuggaaucaucggucauccccuuaaugcauccuuuggcagauccaucaacgguuuuuaaagauggugacgaggcggaggauuuuguugagguucaccuuccagaugugcauaagcaggucucaggggucgaucucggucucccaagcugggggaaguauguguugaugagcgcaggcauuuugacugcacugauguugaugauuuucuuaacgacguguugccgaaggaccaauagagcagaaucaauacaacacagucuuggagagacagggaggaaaguuucgguaaccucccaaaacgggagggucauaucuucaugggagucauacaaaagcggaggugagaccaagcuguaa

SEQ ID NO: 63094 - RNA, 1575 nt, Artificial Sequence
  derived and/or modified CDS sequence (wt) from glycoprotein__RABV__GU186387.1
augauuccccaagcucuucuguuugugccccuccuagucuucucguuguguuucgggaaauuccccgucuaugcgauacccgacaaacucgguccguggagucccauugacauacaucaucucagcuguccaaacaauuugguuguggaggaugaaggaugcaccaaucuaucuggauucuccuacauggaacucaaaguaggauacaucucagccauuaaagugaauggauucaccuguacagguguggugacggaagcagagaccuacacuaacuuuaucgguuacgucaccaccacguuuaagagaaagcacuuccgcccaacgccggaugcgugcagagccgcauacaacuggaagauggcuggugaccccagguaugaggagucucuacacaauccguacccugacuaccauuggcuucggacuguaaagaccaccaaggagucccuuguugucauaucuccaaguguggcagauuuagacccguacgauaaaucccuucacucgagagucuuuccuagcggaaaaugcucaggaauaacagugucuucuaccugcugcucuacuaaccacgacuacaccaucuggaugccggagaaucccagacuggggacuucuugugacauuuucgucaauaguagagggaagagagcaucaaaagggagcaagacuuguggguuuguggaugagagaggccuguacaagucucuaaaaggggcaugcaaacuaaaacuaugugggguucuugggcuuagacuuauggauggaacaugggucgcaauucagacgucagaugagaccaaauggugcccuccugaucaacuagugaaucuacaugacuuucgcucggaugagauugaacaucuuguuguggaggaguuggucaagaaaagggaagagugucuggaugcacuggaguccaucaugaccacaaaguccgugaguuuuagacgccuuagucacuugaggaagcuugucccuggguuuggaaaggcauauacuauauucaacaaaaccuugauggaagcugaugcucacuacaaaucaguccggacuuggaacgaaaucauccccucuaaagggugcuuaagaguuggggggagaugucauccucaugugaaugggguguucuucaaugguaucauacuggguccugacggacauguccugauuccagagaugcaaucaucccuccuccagcagcacauggaguuguuggaauccucagucaucccguugaugcaucccuuagcagacccaucaacgauuuuuaagaauggugacgaggcggaggacuuuguugagguucaccucccggaugugcacaagcaggucucgggggucgaucucggucucccaaacugggggaaguaugugcuaaugagcgcaggcgcucugauugcauugauguugaugauuuucuuaaugacguguugcaggaagacugauagaacaggaucaacacaccacaguccuggagagacggggaggaaagugucuguaacuucccaaaacggaagggucauagcuucaugggagucauauaagagcggaggugaaaccaagcuguga

SEQ ID NO: 63095 - RNA, 1575 nt, Artificial Sequence
  derived and/or modified CDS sequence (wt) from glycoprotein__RABV__GU186388.1
augauuccucaaguucuuuuguuuguuccccuucuaguuuucucgucguguuuugggaaauuccccauuuacacgauaccagacaaacuugguccauggagucccaucgauauacaucaucucagcuguccgaacaaucugguuguggaagaugaaggaugcaccaaucugucuggauuuuccuacauggaacucaaagugggauauauuucagccauaaaagugaacggauucaccuguacagguguggugacagaagcagaaaccuacacuaacuuuguugguuaugucaccaccacguuuaagagaaagcacuuucgcccuaugccggaugcgugcagagccgcauacaacuggaagauggcuggugaccccagguaugaagagucucugcacaauccguacccugacuaccacuggcuccgaacugucaagaccaccaaggagucccuugucaucauaucuccgagcguugcagauuuggacccguacgauaaaucccuucacucgagaguuuuuccuggcggaaaaugcucaggaauaaccguguccuccacuugcugcucuacuaaccacgacuacaccaucuggaugccugaaaacccuagacugggaacuucgugugacauuuucaccaauaguagagggaagagggcaucaaaagggggcaagacuuguggauuuguggaugaaagaggcuuguacaagucucuaaagggagcaugcaagcugaagcuaugugggguucuaggacuuagacuuauggacggaacaugggucgcaauucagacaucagaugagaucaaauggugcucuccugaucagcuagugaaucuacacgacuuucacucggaugagauugaacaucuuguuguggaggaguuggucaaaaagagagaggagugucuggacgcacuggagacuauuaugaccacaaaguccgugaguuucagacgucuuagucauuugaggaagcuagucccuggguuuggaaaggcguauaccauauucaacaaaaccuugauggaggcugaugcucacuauaaaucaauccggacuuggaaugaaaucauccccucuaaaggguguuuaagaguuggggggagaugucauccucauguaaacgggguguucuucaacggcauuauacuggguccugacggacauguucuaaucccagagaugcaaucgucccuccuccaccagcauauggaauuguuggaguccucagucaucccuuugaugcaucccuuagcagacccgucaacagucuuuaaagacggcgacgaggcagaggacuuuguugagguucaccuuccggaugugcacaaacagauuucggggguugaucuuggucucccgaacugggggaaguaugugcugauaagugcaggugcucugacugcauuaaugucgaugauuuucuuaaugacguguugcagaaagacuaauagagcagagucaauacaacacaguccuggagagacagggaggaaagugucgguaacuucucacaacggaagggucauaucuucaugggaaucauauaaaagcggaggugagaccaagcuguga

SEQ ID NO: 63096 - RNA, 1575 nt, Artificial Sequence
  derived and/or modified CDS sequence (wt) from glycoprotein__RABV__GU186389.1
augauuccucaaguucuuuuguuuguuccccuucuaguuuucucgucguguuucgggaaauuccccauuuacacgauaccagacaaacuugguccauggagucccaucgauauacaucaccucagcuguccgaacaaucugguuguggaagaugaaggaugcaccaaucugucuggauuuuccuacauggaacucaaagugggauauauuucagcuauaaaagugaacggauucaccuguacagguguagugaccgaagcagaaaccuacacuaacuuuguugguuaugucaccaccacguuuaagagaaagcacuuucgcccuaugccggaugcgugcagagccgcauacaacuggaagauggcuggugaccccagguaugaagagucucugcacaauccguaccccgacuaccacuggcuccgaacugucaagaccaccaaggagucccuugucaucauaucuccgagcguugcagauuuggacccguacgauaaaucccuucacucgagaguuuuuccuggcggaaaaugcucaggaauaaccguguccuccacuugcugcucuacuaaccacgacuacaccaucuggaugccugaaaauccuagacugggaacuucaugugacauuuucaccaauaguagagggaagagggccucaaaagggggcaagacuuguggauuuguggaugaaagaggcuuguacaagucucuaaggggagcaugcaagcugaagcuaugugggguucuaggacuuagacuuauggacggaacaugggucgcaauucagacaucagaugagaucaaauggugcucuccugaucagcuaguaaaucuacacgacuuucacucggaugagaucgaacaucuuguuguggaggaguuggucaaaaagagggaagagugucuggacgcacuggagacuauuaugaccacaaaguccgugaguuucagacgucuuagucauuugaggaagcuagucccuggguuuggaaaggcguauaccauauucaacaagaccuugauggaggcugaugcucacuacaaaucaauccggacuuggaaugaaaucauccccuccaaaggguguuuaagaguuggggggagaugucauccucaugugaacgggguguucuucaacggcauuauacuggguccugacggacauguucucaucccagagaugcagucgucccuccuccaccagcauauggaauuguuggaguccucagucaucccuuugaugcaucccuuagcagacccgucaacagucuuuaaagacggcgacgaggcagaggacuuuguugagguucaccuuccggaugugcacaagcagaucucggggguugaucuuggucucccaaacugggggaaguacgugcugauaagugcaggugcucugacugcauuaauguugaugauuuucuuaaugacguguugcagaaagacuaauagagcagagucaauacaacacaguccuggagagacagggaggaaagugucggugacuucucacaacggaagggucauaucuucaugggaaucauauaaaagcggaagugagaccaagcuguga

SEQ ID NO: 63097 - RNA, 1575 nt, Artificial Sequence
  derived and/or modified CDS sequence (wt) from glycoprotein__RABV__GU186390.1
augauuccucaaguucuuuuguuuguuccccuucuaguuuucucgucguguuuugggaaauuccccauuuacacgauaccagacaaacuugguccauggagucccaucgauauacaucaucucagcuguccgaacaaucugguuguggaagaugaaggaugcaccaaucugucuggauuuuccuacauggaacucaaagugggauauauuucagccauaaaagugaacggauucaccuguacagguguggugacagaagcagaaaccuacacgaacuuuguugguuaugucaccaccacguuuaagagaaagcacuuucgcccuacgccagaugcgugcagagccgcguacaacuggaagauggcuggugaccccagguaugaagagucucugcacaauccguacccugauuaucacuggcuccgaacugucaagaccuccaaggagucccuugucaucauaucuccgagcguugcagauuuggacccguacgauaaaucccuucacucgagaguuuuuccuggcggaaaaugcucuggaauaaccguguccuccacuugcugcucuacuaaccacgacuacaccaucuggaugccugaaaauccuagacugggaacuucgugugacauuuucaccaauaguagagggaagagggcaucaaaagggggcaagacuuguggauuuguggaugaaagaggcuuguacaagucucuaaagggagcaugcaagcugaagcuaugugggguucuaggacuuagacuuauggacggaacaugggucgcaauucagacaucagaugagaucaaauggugcucuccugaucagcuaguaaaucuacacgacuuucacucagaugagauugaacaucuuguuguggaggaguuggucaaaaagagggaagagugucuggacgcacuggagacuauuaugaccacaaaguccgugaguuucaggcgucuuagucauuugaggaagcuagucccuggguuuggaaaggcguauaccauauucaacaaaaccuugauggaggcugaugcucacuauaaaucaauccggacuuggaaugaaaucauccccucuaaaggguguuuaagaguuggggggagaugucauccucaugugaacgggguguucuucaacggcauuauacuggguccugacggacauguucuaaucccagagaugcaaucgucccuccuccaccagcauauggaauuguuggaguccucagucaucccuuugaugcaucccuuagcagacccgucaacaguuuuuaaagacggcgacgaggcagaggacuuuguugagguucaccuuccggaugugcacaagcagaucucggggguugaucuuggucucccaaacugggggaaguacgugcugguaagugcaggugcucugacugcauuaauguugaugauuuucuuaaugacguguugcagaaagacuaauagagcagagucaauacaacacaguccuggagagacagggaggaaagugucgguaacuucucacaacggaagggucauaucuucaugggaaucauauaaaaguggaggugagaccaagcuguga

SEQ ID NO: 63098 - RNA, 1575 nt, Artificial Sequence
  derived and/or modified CDS sequence (wt) from glycoprotein__RABV__GU186392.1
augauuccucaaguucuuuuguuuguuccccuucuaguuuucucgucguguuuugggaaauuccccauuuacacgauaccagacaaacuugguccauggagucccaucgauauacaucaucucagcuguccgaacaaucugguuguggaagaugaaggaugcaccaaucugucuggauuuuccuacauggaacucaaagugggauauauuucagccauaaaagugaacggauucaccuguacagguguggugacagaagcagaaaccuacacgaacuuuguugguuaugucaccaccacguuuaagagaaagcacuuucgcccuacgccagaugcgugcagagccgcguacaacuggaagauggcuggugaccccagguaugaagagucucugcacaauccguacccugauuaucacuggcuccgaacugucaagaccuccaaggagucccuugucaucauaucuccgagcguugcggauuuggacccguacgauaaaucccuucacucgagaguuuuuccuggcggaaaaugcucuggaauaaccguguccuccacuugcugcucuacuaaccacgacuacaccaucuggaugccugaaaauccuagacugggaacuucgugugacauuuucaccaauaguagagggaagagggcaucaaaagggggcaagacuuguggauuuguggaugaaagaggcuuguacaagucucuaaagggagcaugcaagcugaagcuaugugggguucuaggacuuagacuuauggacggaacaugggucgcaauucagacaucagaugagaucaaauggugcucuccugaucagcuaguaaaucuacacgacuuucacucagaugagauugaacaucuuguuguggaggaguuggucaaaaagagggaagagugucuggacgcacuggagacuauuaugaccacaaaguccgugaguuucaggcgucuuagucauuugaggaagcuagucccuggguuuggaaaggcguauaccauauucaacaaaaccuugauggaggcugaugcucacuauaaaucaauccggacuuggaaugaaaucauccccucuaaaggguguuuaagaguuggggggagaugucauccucaugugaacgggguguucuucaacggcauuauacuggguccugacggacauguucuaaucccagagaugcaaucgucccuccuccaccagcauauggaauuguuggaguccucagucaucccuuugaugcaucccuuagcagacccgucaacaguuuuuaaagacggcgacgaggcagaggacuuuguugagguucaccuuccggaugugcacaagcagaucucggagguugaucuuggucucccaaacugggggaaguacgugcugguaagugcaggugcucugacugcauuaauguugaugauuuucuuaaugacguguugcagaaagacuaauagagcagagucaauacaacacaguccuggagagacagggaggaaagugucgguaacuucucacaacggaagggucauaucuucaugggaaucauauaaaaguggaggugagaccaagcuguga

SEQ ID NO: 63099 - RNA, 1575 nt, Artificial Sequence
  derived and/or modified CDS sequence (wt) from glycoprotein__RABV__GU186396.1
augauuccccaagcucuucuguuugugccccuccuagucuucucguuguguuucgggaaauuccccaucuauacgauacccgacaaacucgguccauggagucccauugacauacaucaucucagcuguccaaacaauuugguuguggaggaugaaggaugcaccaaucuaucuggauucuccuacauggaacucaaaguaggauacaucucagccauuaaagugaauggauucaccuguacagguguggugacggaagcagagaccuacacuaacuuugucgguuacgucaccaccacguuuaagagaaagcacuuccgcccaacaccagaugcgugcagagccgcauacaacuggaagauggcuggugacccuagguaugaggagucucuaaacaauccguacccugacuaccauuggcuucggacuguaaagaccaccaaggagucccuuguugucauaucuccaaguguggcagauuuagacccguacgaugaaucccuucacucgagaguuuuuccuagcggaaaaugcucaggaauaacaguguccucuaccugcugcucuacuaaccacgacuacaccaucuggaugccugagaaucccagacuggggacuucuugugacauuuucgucaauagcagagggaagagagcaucaaaagggagcaagacuuguggguuuguggaugagagaggccuguacaagucucuaaaaggggcaugcaaacuaaaacuaugugggguucuugggcuuagacuuauggauggaacaugggucgcaauucagacgucagaugagaccaaauggugcccuccugaucaacuagugaaucuacacgacuuucgcucggaugagauugaacaucuuguuguagaggaguuggucaagaaaagggaagagugucuggaugcacuggaguccaucaugaccacaaaguccgugaguuuuagacgccuuagucacuugaggaagcuugucccuggguuuggaaaggcguauacuauauucaacaaaaccuugauggaagcugaugcucacuacaaaucaguccggacuuggaacgaaaucauccccucuaaagggugcuuaagaguuggggggagaugucauccucaugugaaugggguguucuucaaugguaucauacuggguccugacggacauguccugauuccagagaugcaaucaucccuccuccagcagcacauggaguuguuggaguccucagucaucccauugaugcaucccuuggcagacccgucaacgauuuuuaaggacggugacgaggcggaggacuucguugagguucaccucccggacgugcacaagcaggucucgggggucgaucucggucucccgaacugggggaaguaugugcuaaugagcgcaggcgcucugauugcauugauguugaugauuuucucaaugacguguugcaggaagacugauagaauaggaucaacacaccacgguccuggagagacggggaggaaagugucuguaacuucccaaaacggaagggucauagcuucaugggagucauauaagagcggaggugaaaccaagcuguga

SEQ ID NO: 63100 - RNA, 1575 nt, Artificial Sequence
  derived and/or modified CDS sequence (wt) from glycoprotein__RABV__GU186397.1
augauuccccaagcucuuuuguuugugccccuccuagucuucucguuguguuucgggaaguuucccauuuauacgauacccgacaaacuugguccauggagucccauugacauacaucaucuaagcugcccaaacaauuugguuguggaggaugaaggaugcaccaaccugucuggauuuuccuacauggaacucaaaguaggauacaucucagccauuaaggcgaauggauucaccuguacagguguggugacggaagcagagacuuacacuaacuuuguugguuacguuaccaccacguuuaagagaaagcacuuucgcccgacgccagaugcgugcagagccgcacacaacuggaagauggcuggugaacccagguaugaagagucucugcacaauccauacccugacuaccauuggcuucggacugugaagaccaccaaggagucacuuguuaucauaucuccaaguguggcagauuuagacccguacgauaaaucccuucacucgagagucuuuccuagcggaaaaugcucaggaauaacaguguccucuaccuacugcucuaccaaccacgacuacaccauccggaugccugagaaucccagacuggggacuucuugugacaucuucgucaauagcagagggaagagggcaucaaaagggagcaagacuuguggauuuguggaugaaagaggccuguacaagucucuaaaaggggcaugcaaacuaaaacuaugugggguucuuggacuuagacuuauggauggaaccuggguugcaauucagacaucagaugagaccaaauggugcccuccugaucagcuagugaaucuacaugacuuucgcucggacgagauugaacaucuuguuguggaggagcuggucaagaaaagggaagagugucuggaugcacuggaguccaucaugaccacaaagucugugaguuuuagacgccuuagucacuugaggaagcuugucccuggguuuggaaaggcguauacuauauucaacaaaaccuugauggaagcugacgcucacuacaaaucaguccggacuuggaaugaaaucauccccucuaaagggugcuuaagaguuggagggagaugucauccucauguaaaugggguguucuucaaugguaucauacugggcccugauggacauguucugauuccugagaugcaaucaucccuccuucagcagcauauggaguuguuggaguccucaguuaucccauugaugcaucccuuagcagacccaucaacgaucuuuaaggacggugacgaggcggaggacuuuguugagguucaccuuccggacgugcacaggcaggucucggggguugaucucggucucccaaacugggggaaguauguacuaaugagcgcaggcgcucuaguugcauugauguugaugauuuucuuaaugacguguugcgugaagaccgauagaacaggaucaacacaccacaguccuggagagacggggaggaaagugucuguaacuucccaaaacggaagagucauagcuucaugggaaucauacaaaagcggaggugaaaccaagcuguga

SEQ ID NO: 63101 - RNA, 1575 nt, Artificial Sequence
  derived and/or modified CDS sequence (wt) from glycoprotein__RABV__GU186398.1
augguuccucaagcccuucuguuuguaccccuucuggccauuccauuguguuuugggaaauuccccauuuacacgauaccagacaaacucggucccuggagucccauugauauacaucaccucagcuguccgaauaauuugguuguggaggaugaaggauguaccaaucugucaggauucucauacauggaacuuaaaguaggauacauuucagccauaaaggugaacggguucacuuguacggguguggugacggaagcagaaaccuacacuaacuuuguuggcuaugucaccaccacguuuaagagaaagcacuuucgaccaacaccggaugcaugcagauccgcauacaauuggaagauggcuggugaccccagauacgaagagucucugcacaaucccuauccugauuaucauuggcuucggacuguaaaaaccaccaaagaguccuuuguuaucauaucuccaaguguggcagaucuagauccguacgauaaaucccuccauucgagaguuuuuccuagaggaaaaugcucaggaauaacggugucuucuaccuacugcucuaccaaccaugacuacaccaucuggaugccugaaaaucccagacuagggaccucuugugauauuuucaccaauaguagagggaagagagcauccaaagggagcaagaccuguggauuuguagaugagagaggcuuguacaaaucucuaaaaggagcaugcaaacugaagcugugugggguucuuggacuuagacuuauggauggaacaugggucgcgauucagacaucagacgagaccaaguggugcccuccugaccagcuagugaaucuacaugacuuucauucggaugagauugaacaucuuguuguggaggaguuggucaagaaaagggaagagugccuagaugcacuggaguccaucaugaccaccaaguccgugaguuuccgacgucucagucacuugaggaaacuugugccuggguucggaaaagcauacaccauauucaauaagaccuugauggaggcugaugcucacuacaagucgguccggacuuggaacgagaucauccccucuaaaggguguuugagaguuggaggcagaugucauccccaugugaacgggguguuuuuuaaugguauuauccuaggcccugacggccaugucuuaaucccggaaaugcagucaucucuccuucagcagcauauggaguuguuggaauccucggucaucccccuaaugcauccuuuggcagauccaucaacgguuuuuaaagauggugacgaggcggaggauuuuguugagguucaccuuccagaugugcauaagcaggucucaggggucgaucucggucucccaagcugggggaaguauguguugaugagcgcaggcauuuugacugcacugaugcugaugaucuucuuaaugacguguugccgaaggacuaauagagcagagucaauacaacacagucuuggagagacagggaggaaagugucgguaaccucccaaagcgggagggucauaucuucaugggagucauacaaaagcggaggugagaccaaguuguaa

SEQ ID NO: 63102 - RNA, 1575 nt, Artificial Sequence
  derived and/or modified CDS sequence (wt) from glycoprotein__RABV__GU186400.1
augguuccucaagcccuucuguuuguaccccuucuggccguuccauuguguuuugggaaauuccccauuuacacgauaccagacaaacuuggucccuggagucccauugacauacaucaucucagcuguccgaauaauuugguuguggaagaugaaggauguaccaaucugucaggauuuucauacauggaacuuaaaguaggauacauuucagccauaaaggugaacggguucacuuguacggguguggugacggaagcagaaaccuacacuaacuuuguuggcuaugucaccaccacguuuaagagaaagcacuuucgaccaacuucggaugcaugcagauccgcauacaauuggaagauggcuggugaccccagauacgaagagucucugcacaaucccuauccugauuaucauuggcuccggacuguaaaaaccaccaaagaguccuuuguuaucauaucuccaaguguggcagaucuagauccguacgauaaauccccucauucgagaguuuuuccuagaggaaaaugcucaggaauaacggugucuucuaccuacugcucuacuaaccaugacuacaccaucuggaugccugaaaaucccagacuggggaccucuugugauauuuucaccaacagcagagggaagagagcauccaaagggagcaagaccuguggauuuguagaugagagaggcuuguacaaaucucuaaaaggagcaugcaaacugaagcugugugggguucuuggacuuagacuuauggauggaacaugggucgcgauucagacaucagacgagaccaaguggugcccuccugaccagcuagugaaucuacaugacuuucauucggaugagauugaacaucuuguuguggaggaguuggucaagaaaagggaagagugucuagaugcacuggaguccaucaugaccaccaaguccgugaguuuccgacgucucagucacuugaggaaacuugugcccggguucggaaaagcauacaccauauucaauaagaccuugauggaggcugaugcucacuacaaaucgguccggacuuggaacgagaucauccccucuaaaggguguuugagaguuggaggcagaugucauccccaugugaacgggguguuuuuuaaugguauuauccuaggcccugacggccaugucuugaucccggaaaugcagucaucucuccuucagcaacauauggaguuguuggaauccucggucauccccuuaaugcauccuuuggcagauccaucaacgguguuuaaagauggugacgaggcggaggauuuuguugagguucaccuuccagaugugcauaagcaggucucaggggucgaucucggucucccaagcugggggaaguauguguugaugagcgcaggcauuuugacugcacugauguugacgauuuucuuaaugacguguugccgaaggacuaauagagcaaaaucgauacaacacagucuuggagagacagggaggaaagugucgguaaccucccaaagcgggagggucauaucuucaugggagucauacaaaagcggaggugagaccaagcuguaa

SEQ ID NO: 63103 - RNA, 1575 nt, Artificial Sequence
  derived and/or modified CDS sequence (wt) from glycoprotein__RABV__GU186401.1
augguuccucaagcccuucuguuuguaccccuucuggccguuccauuguguuuugggaaauuccccauuuacacgauaccagacaaacuuggucccuggagucccauugacauacaucaucucagcuguccgaauaauuugguuguggaagaugaaggauguaccaaucugucaggauuuucauacauggaacuuaaaguaggauacacuucagccauaaaggugaacggguucacuuguacggguguggugacggaagcagaaaccuacacuaacuuuguuggcuaugucaccaccacguuuaagagaaagcacuuucgaccaacuucggaugcaugcagauccgcauacaauuggaagauggcuggugaccccagauacgaagagucucugcacaaucccuauccugauuaucauuggcuccggacuguaaaaaccaccaaagaguccuuuguuaucauaucuccaaguguggcagaucuagauccguacgauaaaucccuucauucgagaguuuuuccuagaggaaaaugcucaggaauaacggugucuucuaccuacugcucuacuaaccaugacuacaccaucuggaugccugaaaaucccagacuggggaccucuugugauauuuucaccaacagcagagggaagagagcauccaaagggagcaagaccuguggauuuguagaugagagaggcuuguacaaaucucuaaaaggagcaugcaaacugaagcugugugggguucuuggacuuagacuuauggauggaacaugggucgcgauucagacaucagacgagaccaaguggugcccuccugaccagcuagugaaucuacaugacuuucauucggaugagauugaacaucuuguuguggaggaguuggucaagaaaagggaagagugucuagaugcacuggaguccaucaugaccaccaaguccgugaguuuccgacgucucagucacuugaggaaacuugugcccggguucggaaaagcauacaccauauucaauaagaccuugauggaggcugaugcucacuacaaaucgguccggacuuggaacgagaucauccccucuaaaggguguuugagaguuggaggcagaugucauccccaugugaacgggguguuuuuuaaugguauuauccuaggcccugacggccaugucuugaucccggaaaugcagucaucucuccuucagcaacauauggaguuguuggaauccucggucauccccuuaaugcauccuuuggcagauccaucaacgguguuuaaagauggugacgaggcggaggauuuuguugagguucaccuuccagaugugcauaagcaggucucaggggucgaucucggucucccaagcugggggaaguauguguugaugagcgcaggcauuuugacugcacugauguugacgauuuucuuaaugacguguugccgaaggacuaauagagcaaaaucgauacaacacagucuuggagagacagggaggaaagugucgguaaccucccaaagcgggagggucauaucuucaugggagucauacaaaagcggaggugagaccaagcuguaa

SEQ ID NO: 63104 - RNA, 1575 nt, Artificial Sequence
  derived and/or modified CDS sequence (wt) from glycoprotein__RABV__GU186402.1
auggcuccucaagcccuucuguuuguaccccuucuggccguuccauuguguuuagggaaauuccccauuuacacgauaccagacaaacucggucccuggagucccauugacauacaucaucucagcuguccgaauaacuugguuguggaagaugaaggauguaccaaucugucaggauuuucauacauggaacuuaaaguaggauacauuucagccauaaaggugaacggguucacuuguacggguguggugacggaagcagaaaccuacacuaacuuuguuggcuaugucaccaccacguuuaagagaaagcacuuucgaccaacuccggaugcaugcagauccgcauacaauuggaagauggcuggugaccccagauacgaagagucucugcacaaucccuauccugauuaucauuggcuccggacuguaaaaaccaccaaagaguccuuuguuaucauaucuccaaguguggcagaucuagauccguacgauaaaucccuucauucgagaguuuuuccuagaggaaaaugcucgggaauaacggugucuucuaccuacugcucuacuaaccaugacuacaccaucuggaugccugaaaaucccagacuggggaccucuugugauauuuucaccaacagcagagggaagagagcauccaaagggagcaagaccuguggauuuguagaugagagaggcuuguacaaaucucuaaaaggagcaugcaaacugaagcugugugggguucuuggacuuagacuuauggauggaacaugggucgcgauucagacaucagacgagaccaaguggugcccuccugaccagcuagugaaucuacaugacuuucauucggaugagauugaacaucuuguuguggaggaguuggucaagaaaagggaagagugucuagaugcacuggaguccaucaugaccaccaaguccgugaguuuccgacgucucagucacuugaggaaacuugugccuggguucggaaaagcauacaccauauucaauaagaccuugauggaggcugaugcucacuacaaaucgguccggacuuggaacgagaucauccccucuaaaggguguuugagaguuggaggcagaugucauccccaugugaaugggguguuuuuuaaugguauuauccuaggcccugacggccaugucuugaucccagaaaugcagucaucucuccuucagcaacauauggaguuguuggaauccucggucauccccuuaaugcauccuuuggcagauccaucaacgguguuuaaagauggugacgaggcagaggauuuuguugagguucaccuuccagaugugcauaagcaugucucaggggucgaucucggucucccaagcugggggaaguauguguuggugagcgcaggcauuuugacugcacugauguugacgauuuucuuaaugacguguugccgaaggacuaauagagcagaaucaauacaacacagucuuggagagacagggaggaaagugucgguaaccucccaaagcgggagggucauaucuucaugggagucauacaaaagcggaggugagaccaagcuguaa

SEQ ID NO: 63105 - RNA, 1575 nt, Artificial Sequence
  derived and/or modified CDS sequence (wt) from glycoprotein__RABV__GU186403.1
augauuccucaaguucuuuuguuuguuccccuucuaguuuucucgucguguuuugggaaauuccccauuuacacgauaccagacaaacuugguccauggagucccaucgauauacaucaucucagcuguccgaacaaucugguuguggaagaugaaggaugcaccaauuugucuggauuuuccuacauggaacucaaagugggauauauuucagccauaaaagugaacggauucaccuguacagguguggugaccgaagcagaaaccuacacuaacuuuguugguuaugucaccaccacguuuaagagaaagcacuuucgcccuaugccggaugcgugcagagccgcauacaacuggaagauggcuggugaccccagguaugaagagucucugcacaauccguaccccgacuaccacuggcuccgaacugucaagaccaccaaggagucccuugucgucauaucuccgagcguugcagauuuggacccguacgauaaaucccuucacucgagaguuuuuccuggcggaaaaugcucaggaauaaccguguccuccacuugcugcucuacuaaccacgacuacaccaucuggaugccugaaaauccuagacugggaacuucaugugacauuuucaccaauaguagagggaagagggcaucaaaagggggcaagacuuguggauuuguggaugaaagaggcuuguacaagucucuaaagggagcaugcaagcugaagcuaugugggguucuaggacuuagacuuauggacggaacaugggucgcgauucagacaucagaugagaucaaauggugcucuccugaucagcuaguaaaucuacacgacuuucacucggaugagauugaacaucuuguuguggaggaguuggucaaaaagagggaagagugucuggacgcacuggagacuauuaugaccacaaaguccgugaguuucagacgucuuagucauuugagaaagcuagucccuggguuuggaaaggcguauaccauauucaacaaaaccuugauggaggcugaugcccacuacaaaucaauccggacuuggaaugaaaucauccccuccaaaggguguuuaagaguuggggggagaugucauccucaugugaacgggguguucuucaacggcauuauacuggguccugacggacauguucuaaucccagagaugcagucgucccuccuccaccagcauauggaauuguuggaguccucagucaucccuuugaugcaucccuuagcagacccgucaacagucuuuaaagacggcgacgaggcagaggacuuuguugagguucaccuuccggaugugcacaagcagaucucggggguugaucuuggucucccaaacugggggaaguaugugcugauaagugcaggugcuuugacugcauuaauguugacgauuuucuuaaugacguguugcagaaagacuaauagagcagggucaauacaacacaguccuggagagacagggaggaaagugucggugacuucucacaacggaagggucauaucuucaugggaaucauauaaaagcggaagugagaccaagcuguga

SEQ ID NO: 63106 - RNA, 1575 nt, Artificial Sequence
  derived and/or modified CDS sequence (wt) from glycoprotein__RABV__GU186404.1
augauuccucaaguucuuuuguuuguuccccuucuaguuuucucgucguguuuugggaaauuccccauuuacacgauaccagacaaacuugguccauggagucccaucgauauacaucaucucagcuguccgaacaaucugguuguggaagaugaaggaugcaccaaucugucuggauuuuccuacauggaacucaaagugggauauauuucagccauaaaagugaacggauucaccuguacagguguggugaccgaagcagaaaccuacacuaacuuuguugguuaugucaccaccacguuuaagagaaagcacuuucgcccuaugccggaugcgugcagagccgcauacaacuggaagauggcuggugaccccagguaugaagagucucugcacaauccguaccccgacuaccacuggcuccgaacugucaagaccaccaaggagucccuugucaucauaucuccgagcguugcagauuuggacccguacgauaaaucccuucacucgagaguuuuuccuggcggaaaaugcucaggaauaaccguguccuccacuugcugcucuacuaaccacgacuacaccauuuggaugccugaaaauccuagacugggaacuucaugugacauuuucaccaauaguagagggaagagggcaucaaaagggggcaagacuuguggauuuguggaugaaagaggcuuguacaagucucuaaagggagcaugcaagcugaagcuaugugggguucuaggacuuagacuuauggacggaacaugggucgcgauucagacaucagaugagaucaaauggugcucuccugaucagcuaguaaaucuacacgacuuucacucggaugagauugaacaucuuguuguggaggaguuggucaaaaagagggaagagugucuggacgcacuggagacuauuaugaccacaaaguccgugaguuucagacgucuuagucauuugaggaagcuagucccuggguuuggaaaggcguauaccauauucaacaaaaccuugauggaggcugaugcucacuacaaaucaauccggacuuggaaugaaaucauccccuccaaaggguguuuaagaguuggggggagaugucauccucaugugaacgggguguucuucaacggcauuauacuggguccugacggacauguucuaaucccagagaugcagucgucccuccuccaccagcauauggaauuguuggaguccucagucaucccuuugaugcaucccuuagcagacccgucaacagucuuuaaagacggcgacgaggcagaggacuuuguugagguucaccuuccggaugugcacaagcagaucucggggguugaucuuggucucccaaacugggggaaguaugugcugauaagugcaggugcucugacugcauuaauguugacgauuuucuuaaugacguguugcagaaagacuaauagagcagagucaauacaacacaguccuggagagacagggaggaaaguaucggugacuucucacaacggaagggucauaucuucaugggaaucauauaaaagcggaagugagaccaagcuguga

SEQ ID NO: 63107 - RNA, 1575 nt, Artificial Sequence
  derived and/or modified CDS sequence (wt) from glycoprotein__RABV__GU186406.1
augauuccucaaguucuuuuguuuguucccccucuaguuuucucgucguguuuugggaaauuccccauuuacacgauaccagacaaacuugguccauggagucccaucgauauacaucaucucagcuguccgaacaaucugguuguggaagaugaaggaugcaccaaucugucuggauuuuccuacauggaacucaaagugggauauauuucagccauaaaagugaacggauucaccuguacagguguggugacagaagcagaaaccuacaccaacuuuguugguuaugucaccaccacguuuaagagaaagcacuuucgcccuaugccggaugcgugcagagccgcauacaacuggaagauggcuggugacccuagguaugaagagucucugcacaauccguacccugacuaccacuggcuccggacugucaagaccaccaaggagucccuugucaucauaucuccgagcguugcagauuuggacccguacgauaaaucucuucacucaagaguuuuuccuggcggaaaaugcucaggaauaaccguguccuccacuugcugcucuacuaaccacgacuacaccaucuggaugccugaaaauccuagacugggaacuucgugugacauuuucaccaauaguagagggaagagggcaucaaaaggaggcaagacuuguggauuuguggaugaaagaggcuuguacaagucucuaaagggagcaugcaagcugaagcuaugugggguucuaggacuuagacuuauggacggaacaugggucgcaauucagacaucagaugagaucaaguggugcucuccugaucagcuaguaaaucuacacgacuuucacucggaugagauugaacaucuuguuguggaggaguuggucaaaaagagggaagagugucuggacgcacuggagacuauuaugaccacaaaguccgugaguuucagacgucuuagucauuugaggaagcuagucccuggguuuggaaaggcguauaccauauucaacaaaaccuugauggaggcugaugcucacuauaaaucaauccggacuuggaaugaaaucauccccucuaaaggguguuuaagaguuggggggagaugucauccucaugugaacgggguguucuuuaacggcauuauacuggguccugacggacauguucuaaucccagagaugcaaucgucccuccuccaccagcauauggaauuguuggaguccucagucaucccuuugaugcaucccuuagcagacccgucaacagucuuuaaagacggcgacgaggcagaggacuuuguugagguucaccuuccggaugugcacaagcagaucucggggguugaucuuggucucccaaacugggggaaguaugugcugauaagugcaggugcucugacugcauuaauguugaugacuuucuuaaugacguguugcagaaagacuaauagagcagagucaauacaacacaguccuggagagacagggaggaaagugucgguaacuucucacaacggaagggucauaucuucaugggaaucauauaaaagcggaggugagaccaagcuguga

SEQ ID NO: 63108 - RNA, 1575 nt, Artificial Sequence
  derived and/or modified CDS sequence (wt) from glycoprotein__RABV__GU186407.1
augauuccucaaguucuuuuguuuguuccccuucuaguuuucucgucguguuuugggaaauuccccauuuacacgauaccagacaaacuugguccauggagucccaucgauauacaucaucucagcuguccgaacaaucugguuguggaagaugaaggaugcaccaaucugucuggauuuuccuacauggaacucaaagugggauauauuucagccauaaaagugaacggauucaccuguacagguguggugacagaagcagaaaccuacaccaacuuuguugguuaugucaccaccacguuuaagagaaagcacuuucgcccuaugccggaugcgugcagagccgcauacaacuggaagauggcuggugacccuagguaugaagagucucugcacaauccguacccugacuaccacuggcuccggacugucaagaccaccaaggagucccuugucaucauaucuccgagcguugcagauuuggacccguacgauaaaucucuucacucaagaguuuuuccuggcggaaaaugcucaggaauaaccguguccuccacuugcugcucuacuaaccacgacuacaccaucuggaugccugaaaauccuagacugggaacuucgugugacauuuucaccaauaguagagggaagagggcaucaaaaggaggcaagacuuguggauuuguggaugaaagaggcuuguacaagucucuaaagggagcaugcaagcugaagcuaugugggguucuaggacuuagacuuauggacggaacaugggucgcaauucagacaucagaugagaucaaguggugcucuccugaucagcuaguaaaucuacacgacuuucacucggaugagauugaacaucuuguuguggaggaguuggucaaaaagagggaagagugucuggacgcacuggagacuauuaugaccacaaaguccgugaguuucagacgucuuagucauuugaggaagcuagucccuggguuuggaaaggcguauaccauauucaacaaaaccuugauggaggcugaugcucacuauaaaucaauccggacuuggaaugaaaucauccccucuaaaggguguuuaagaguuggggggagaugucauccucaugugaacgggguguucuuuaacggcauuauacuggguccugacggacauguucuaaucccagagaugcaaucgucccuccuccaccagcauauggaauuguuggaguccucagucaucccuuugaugcaucccuuagcagacccgucaacagucuuuaaagacggcgacgaggcagaggacuuuguugagguucaccuuccggaugugcacaagcagaucucggggguugaucuuggucucccaaacugggggaaguaugugcugauaagugcaggugcucugacugcauuaauguugaugacuuucuuaaugacguguugcagaaagacuaauagagcagagucaauacaacacaguccuggagagacagggaggaaagugucgguaacuucucacaacggaagggucauaucuucaugggaaucauauaaaagcggaggugagaccaagcuguga

SEQ ID NO: 63109 - RNA, 1575 nt, Artificial Sequence
  derived and/or modified CDS sequence (wt) from glycoprotein__RABV__GU186408.1
augauuccucaaguucuuuuguuuguuccccuucuaguuuucucgucguguuuugggaaauuccccauuuacacgauaccagacaaacuugguccauggagucccaucgauauacaucaucucagcuguccgaacaaucugguuguggaagaugaaggaugcaccaaucugucuggauuuuccuacauggaacucaaagugggauauauuucagccauaaaagugaacggauucaccuguacagguguggugacagaagcagaaaccuacaccaacuuuguugguuaugucaccaccacguuuaagagaaagcacuuucgcccuaugccggaugcgugcagagccgcauacaacuggaagauggcuggugacccuagguaugaagagucucugcacaauccguacccugacuaccacuggcuccggacugucaagaccaccaaggagucccuugucaucauaucuccgagcguugcagauuuggacccguacgauaaaucucuucacucaagaguuuuuccuggcggaaaaugcucaggaauaaccguguccuccacuugcugcucuacuaaccacgacuacaccaucuggaugccugaaaauccuagacugggaacuucgugugacauuuucaccaauaguagagggaagagggcaucaaaaggaggcaagacuuguggauuuguggaugaaagaggcuuguacaagucucuaaagggagcaugcaagcugaagcuaugugggguucuaggacuuagacuuauggacggaacaugggucgcaauucagacaucagaugagaucaaguggugcucuccugaucagcuaguaaaucuacacgacuuucacucggaugagauugaacaucuuguuguggaggaguuggucaaaaagagggaagagugucuggacgcacuggagacuauuaugaccacaaaguccgugaguuucagacgucuuagucauuugaggaagcuagucccuggguuuggaaaggcguauaccauauucaacaaaaccuugauggaggcugaugcucacuauaaaucaauccggacuuggaaugaaaucauccccucuaaaggguguuuaagaguuggggggagaugucauccucauguaaacgggguguucuuuaacggcauuauacuggguccugacggacauguucuaaucccagagaugcaaucgucccuccuccaccagcauauggaauuguuggaguccucagucaucccuuugaugcaucccuuagcagacccgucaacagucuuuaaagacggcgacgaggcagaggacuuuguugagguucaccuuccggaugugcacaagcagaucucggggguugaucuuggucucccaaacugggggaaguaugugcugauaagugcaggugcucugacugcauuaauguugaugacuuucuuaaugacguguugcagaaagacuaauagagcagagucaauacaacacaguccuggagagacagggaggaaagugucgguaacuucucacaacggaagggucauaucuucaugggaaucauauaaaagcggaggugagaccaagcuguga

SEQ ID NO: 63110 - RNA, 1575 nt, Artificial Sequence
  derived and/or modified CDS sequence (wt) from glycoprotein__RABV__GU186409.1
augauuccucaaguucuuuuguuuguuccccuucuaguuuucucgucguguuuugggaaauuccccauuuacacgauaccagacaaacuugguccauggagucccaucgauauacaucaucucagcuguccgaacaaucugguuguggaagaugaaggaugcaccaauuugucuggauuuuccuacauggaacucaaagugggauauauuucagccauaaaagugaacggauucaccuguacaggugcggugaccgaagcagaaaccuacacuaacuuuguugguuaugucaccaccacguuuaagagaaagcacuuucgcccuaugccggaugcgugcagagccgcauacaacuggaagauggcuggugaccccagguaugaagagucucugcacaauccguaccccgacuaccacuggcuccgaacugucaagaccaccaaggagucccuugucaucauaucuccgagcguugcagauuuggacccguacgauaaaucccuucacucgagaguuuuuccuggcggaaaaugcucaggaauaaccguguccuccacuugcugcucuacuaaccacgacuacaccaucuggaugccugaaaauccuagacugggaacuucaugugacauuuucaccaauaguagagggaagagggcaucaaaagggggcaagacuuguggauuuguggaugaaagaggcuuguacaagucucuaaagggagcaugcaagcugaagcuaugugggguucuaggacuuagacuuauggacggaacaugggucgcgauucagacaucagaugagaucaaauggugcccuccugaucagcuaguaaaucuacacgacuuucacucggaugagauugaacaucuuguuguggaggaguuggucaaaaagagggaagagugucuggacgcacuggagacuauuaugaccacaaaguccgugaguuucagacgucuuagucauuugaggaagcuagucccuggguuuggaaaggcguauaccauauucaacaaaaccuugauggaggcugaugcccacuacaaaucaauccggacuuggaaugaaaucauccccuccaaaggguguuuaagaguuggggggagaugucauccucaugugaacgggguguucuucaacggcauuauacuggguccugacggacauguucuaaucccagagaugcagucgucccuccuccaccagcauauggaauuguuggaguccucagucaucccuuugaugcaucccuuagcagacccgucaacagucuuuaaagacggcgacgaggcagaggacuuuguugagguucaccuuccggaugugcacaagcagaucucggggguugaucuuggucucccaaacugggggaaguaugugcugauaagugcaggugcuuugacugcauuaauguugacgauuuucuuaaugacguguugcagaaagacuaauagagcagggucaauacaacacaguccuggagagacagggaggaaagugucggugacuucucacaacggaagggucauaucuucaugggaaucauauaaaagcggaagugagaccaagcuguga

SEQ ID NO: 63111 - RNA, 1575 nt, Artificial Sequence
  derived and/or modified CDS sequence (wt) from glycoprotein__RABV__GU186410.1
augauuccucaaguucuuuuguuuguuccccuucuaguuuucucgucggguuuugggaaauuccccauuuacacgauaccagacaaacuugguccauggagucccaucgauauacaucaucucagcuguccgaacaaucugguuguggaagaugaaggaugcaccaauuugucuggauuuuccuacauggaacucaaagugggauauauuucagccauaaaagugaacggauucaccuguacagguguggugaccgaagcagaaaccuacacuaacuuuguugguuaugucaccaccacguuuaagagaaagcacuuucgcccuaugccggaugcgugcagagccgcauacaacuggaagauggcuggugaccccagguaugaagagucucugcacaauccguaccccgacuaccacuggcuccgaacugucaagaccaccaaggagucccuugucaucauaucuccgagcguugcagauuuggacccguacgauaaaucccuucacucgagaguuuuuccuggcggaaaaugcucaggaauaaccguguccuccacuugcugcucuacuaaccacgacuacaccaucuggaugccugaaaauccuagacugggaacuucaugugacauuuucaccaauaguagagggaagagggcaucaaaagggggcaagacuuguggauuuguggaugaaagaggcuuguacaagucucuaaagggagcaugcaagcugaagcuaugugggguucuaggacuuagacuuauggacggaacaugggucgcgauucagacaucagaugagaucaaauggugcucuccugaucagcuaguaaaucuacacgacuuucacucggaugagauugaacaucuuguuguggaggaguuggucaaaaagagggaagagugucuggacgcacuggagacuauuaugaccacaaaguccgugaguuucagacgucuuagucauuugaggaagcuagucccuggguuuggaaaggcguauaccauauucaacaaaaccuugauggaggcugaugcccacuacaaaucaauccggacuuggaaugaaaucauccccuccaaaggguguuuaagaguuggggggagaugucauccucaugugaacgggguguucuucaacggcauuauacuggguccugacggacauguucuaaucccagagaugcagucgucccuccuccaccagcauauggaauuguuggaguccucagucaucccuuugaugcaucccuuagcagacccgucaacagucuuuaaagacggcgacgaggcagaggacuuuguugagguucaccuuccggaugugcacaagcagaucucggggguugaucuuggucucccaaacugggggaaguaugugcugauaagugcaggugcuuugacugcauuaauguugacgauuuucuuaaugacguguugcagaaagacuaauagagcagggucaauacaacacaguccuggagagacagggaggaaagugucggugacuucucacaacggaagggucauaucuucaugggaaucauauaaaagcggaagugagaccaagcuguga

SEQ ID NO: 63112 - RNA, 1575 nt, Artificial Sequence
  derived and/or modified CDS sequence (wt) from glycoprotein__RABV__GU345746.1
augauuccccaagcucuucuguuugugccccuccuagucuucucguuguguuucgggaaauuccccaucuacacgauacccgacaaacucgguccauggagucccauugacauacaucaucucagcuguccaaacaauuugguuguggaggaugaaggaugcaccaaucugucuggauuuuccuacauggaacucaaaguaggauacaucucagccauuaaagugaauggauucaccuguacagguguggugacggaagcagagaccuacacuaacuuugucgguuacgucaccaccacguuuaagagaaagcacuuccgcccaacgccagaugcgugcagagccgcauacaacuggaagauggcuggugaccccagguaugaggagucucuacacaauccguacccugacuaccauuggcuucggacuguaaagaccaccaaggagucccuuguuaucauaucuccaaguguggcagauuuagacccguacgauaaaucccuucacucgagaguuuuuccuagcggaaaaugcucaggaauaacaguguccucuaccuacugcucuacuaaccacgacuacaccaucuggaugccugagaaucccagacuggggacuuccugugacauuuucgucaauagcagagggaagagagcaucaaaagggagcaagacuuguggguuuguggaugagagaggccuguacaagucucuaaaaggggcaugcaaacuaaaacuaugugggguucuugggcuuagacuuauggauggaacaugggucgcaauucagacgucagaugagaccaaauggugcccuccugaucaacuagugaaucuacaugacuuucgcucggaugagauugaacaucuuguuguggaggaguuggucaagaaaagggaagagugucuggaugcacuggaguccaucaugaccacaaaguccgugaguuuuagacgccuuagucacuugaggaagcuugucccuggguuuggaaaggcguauacuauauucaacaaaaccuugauggaagcugaugcucacuacaaaucaguccggacuuggaacgaaaucauccccucuaaagggugcuuaagaguuggggggagaugucauccucaugugaaugggguguucuucaaugguaucauacuggguccugacggacauguccugauuccagagaugcaaucaucccuccuccagcagcauauggaguuguuggaguccucagucaucccauugaugcaucccuuggcagacccaucaacgauuuuuaaggacggugacgaggcggaggacuuuguugagguucaccucccagacgugcacaagcaggucucgggggucgaucucggucucccaaacugggggaaguaugugcuaaugagcgcaggcgcucuaacugcauugauguugaugauuuucuuaaugacguguugcaggaagacugauagaacaggaucaacacaccacaguccuggagagacggggaggaaagugucuguaacuucccaaaacgggagggucauagcuucaugggagucauacaaaagcggaggugaaaccaagcuguga

SEQ ID NO: 63113 - RNA, 1575 nt, Artificial Sequence
  derived and/or modified CDS sequence (wt) from glycoprotein__RABV__GU345747.1
augauuccccaagcucuucuguuugugccccuccuagucuucucguuguguuucgggaaauuccccaucuacacgauaccagacaaacucgguccauggagucccauugacauacaucaucucagcuguccaaacaauuugguuguggaggaugaaggaugcaccaaucuaucuggauuuuccuacauggaacucaaaguaggauacaucucagccauuaaagugaauggauucaccuguacagguguggugacggaagcagagaccuacacuaacuuugucgguuacgucaccaccacguuuaagagaaagcacuuccgcccaacgccagaugcgugcagagccgcauacaacuggaagauggcuggugaccccagguaugaggagucucuacacaauccguacccugacuaccauuggcuucggacuguaaagaccaccaaggagucccuuguuaucauaucuccaaguguggcagauuuagacccguacgauaaaucccuucacucgagaguuuuuccuagcggaaaaugcucaggaauaacaguguccucuaccuacugcucuacuaaccacgacuacaccaucuggaugccugagaaucccagacuggggacuucuugugacauuuucgucaauagcagagggaagagagcaucaaaagggagcaagacuuguggguuuguggaugagagaggccuguacaagucucuaaaaggggcaugcaaacuaaaacuaugugggguucuugggcuuagacuuauggauggaacaugggucgcaauucagacgucagaugagaccaaauggugcccuccugaucaacuagugaaucuacaugacuuucgcucggaugagauugaacaucuuguuguggaggaguuggucaagaaaagggaagagugucuggaugcacuggaguccaucaugaccacaaaguccgugaguuuuagacgccugagucacuugaggaagcuugucccuggguuuggaaaggcauauacuauauucaacaaaaccuugauggaagcugaugcucacuacaaaucaguccggacuuggaacgaaaucauccccucuaaagggugcuuaagaguuggggggagaugucauccucaugugaaugggguguucuucaaugguaucauacuggguccugacggacauguccugauuccagagaugcaaucaucccuccuccagcagcacauggaauuguuggaguccucagucaucccauugaugcaucccuuagcagacccaucaacgauuuuuaaggacggugacgaggcggaggacuuuguugagguucaccucccggacgugcacaagcaggucucgggggucgaucucggucucccaaacugggggaaguaugugcuaaugagcgcaggugcucugauugcauugauguugaugauuuucuuaaugacguguugcaggaagacugauagaacaggaucaacacaccacaguccuggagagacggggaggaaagugucuguaacuucccaaaacggaagggucauagcuucaugggagucauacaagagcggaggugaaaccaggcuguga

SEQ ID NO: 63114 - RNA, 1575 nt, Artificial Sequence
  derived and/or modified CDS sequence (wt) from glycoprotein__RABV__GU565703.1
augguuccucagguucuuuuguuuguaccccuccuggguuuuucauuguguuucgggaaguuccccauuuacacgauaccagacaaacuuggucccuggagcccuauugacauacaccaucucagcuguccaaauaaccugguuguggaggacgaaggauguaccaaccuguccgaguucucuuacauggaacuuaaagugggauacaucucagccauaaaagugaacggguucacuugcacagguguugugacagaggcagaaaccuacaccaacuuuguugguuaugucacaaccacauucaagagaaagcauuuccgccccaccccagacgcauguagagccgcguauaacuggaagauggccggugaccccagauaugaagagucucuacacaauccguaccccgacuaccauuggcuucgaacuguaaaaaccaccaaagagucucucguuaucauauccccaagugugacagauuuggacccauaugacaaaucccuucacucaagggucuucccuggcggaaauugcucaggaauaacgguguccucgaccuacugcucaacuaaucaugauuacaccauuuggaugccugagaaucugagacuagggacaucuugugacauuuuuaccaauagcagagggaagagggcauccaaaggaggcaagacuugcggcuuuguggaugaaagaggccuguauaagucucuaaagggagcaugcaaacucaaguuauguggaguucucggacuuagacuuauggauggaacaugggucgcgaugcaaacaucagaugagaccaaauggugcccuccaggucaguuggugaauuugcacgacuuucgcucagacgagauugagcaucucguuguggaagaguuagucaagaaaagagaggagugucuggaugcacuagaguccaucaugaccaccaagucagugaguuucagacgucucagucacuugagaaaacuugucccuggguuuggaaaagcauauaccauauucaacaaaaccuugauggaggcugaugcucacuacaagucuguccggaccuggaaugagaucauccccucaaaaggguguuugagaguuggggggaggugucauccccaugugaacgggguguuuuucaaugguauaauauuagggucugacggccauguucuaaucccagagaugcagucaucccuccuccagcaacauauggaguuguuggaaucuucaguuaucccccugaugcaccccuuggcagacccuucuacaguuuucaaagacggugaugagguugaggauuuuguugaaguucaccuccccgaugugcaugaacaggucucaggaguugaacugggucucccgaacugggggaaguauguauugaugauugcaggggccuugauugcccugauguugauaauuuuccugaugacauguugcagaagagucaaucgaccagaaucuacgcaaagcagucuuggagagacagggagaaaugugucagucacuucccaaagcggaaaagucauaucuucaugggagucauauaagaguggaggcgagaccagacuguga

SEQ ID NO: 63115 - RNA, 1575 nt, Artificial Sequence
  derived and/or modified CDS sequence (wt) from glycoprotein__RABV__GU565704.1
augguuccucagguucuuuuguuugcaccccuccugguuuuuucauuguguuucgggaaguuccccauuuacacgauaccagacaaacuuggucccuggagcccuauugacuuacaccaucucagcuguccaaauaaccugguuguggaggacgaaggauguaccaaccuguccggguucucuuacauggaacuuaaagugggauacaucucagccauaaaagugaacggguucacuugcacagguguugugacagaggcagaaaccuacaccaacuuuguugguuaugucacaaccacauucaagagaaagcauuuccgccccaccccagacgcauguagagccgcguauaacuggaagauggccggugaccccagauaugaagagucucuacacaauccguaccccgacuaccauuggcuucgaacuguaaaaaccaccaaagagucucucguuaucauauccccaagugugacagauuuggacccauaugacaaaucccuucacucaagggucuucccuggcggaaauugcucaggaauaacgguguccucgaccuacugcucaacuaaucaugauuacaccaucuggaugccugagaaucugagacuagggacaucuugugacauuuuuacccauagcagagggaagagagcauccaaaggagacaagacuugcggcuuuguggaugaaagaggccuauauaagucuuuaaagggagcaugcaaacucaaguuauguggaguucucggacuuagacuuauggauggaacaugggucgcgaugcaaacaucagaugagaccaaauggugcccuccaggucaguuggugaauuugcacgacuuucgcucagacgagauugagcaucucguuguggaagaguuagucaagaaaagagaggagugucuggaugcacuagaguccaucaugaccaccaagucagugaguuucagacgucucagucacuugagaaaacuugucccuggguuuggaaaagcauacaccauauucaacaaaaccuugauggaggcugaugcucacuacaagucuguccagaccuggaaugagaucauccccucaaaaggguguuugagaguuggggagaggugucauccccaugugaacgggguguuuuucaaugguauaauauuagggucugacggccauguucuaaucccagagaugcagucaucccuccuccagcaacauauggaguuguuggaaucuucaguuaucccccugaugcaccccuuggcagacccuucuacaguuuucaaagacggugaugagguugaggauuuuguugaaguucaccuccccgaugugcauaaacaggucucaggaguugaccugggucucccgaaaugggggaaguauguauugaugauugcaggggccuugauugcccugauguugauaauuuuccugaugacauguugcagaagagucaaucgaccagaaucuacgcaaagcaaucuuggagggacagggagaaaugugucagucacuucccaaagcggaaaagucauaucuucaugggagucauauaagaguggaggcgagaccagacuguga

SEQ ID NO: 63116 - RNA, 1575 nt, Artificial Sequence
  derived and/or modified CDS sequence (wt) from glycoprotein__RABV__GU591789.1
augauuccucaaguucuuuuguuuguuccccuucuaguuuucucgucguguuucgggaaauuccccauuuacacaauaccagacaaacuugguccauggagucccaucgauauacaucaccucagcuguccgaacaaucugguuguggaagaugaaggaugcaccaaucugucuggauuuuccuacauggaacucaaaguaggauauauuucagccauaaaagugaacggauucaccuguacagguguagugaccgaagcagaaaccuacacuaacuuuguugguuaugucaccaccacguuuaagagaaagcacuuucgcccuaugccggaugcgugcagagccgcauacaacuggaagauggcuggugaccccagguaugaagagucucugcacaauccguaccccgacuaccacuggcuccgaacugucaagaccaccaaggagucccuugucaucauaucuccgagcguugcagauuuggacccguacgauaaaucccuucacucgagaguuuucccuggcggaaaaugcucaggaauaaccguguccuccacuugcugcucuacuaaccacgacuacaccaucuggaugccugaaaauccuagacugggaacuucaugugacauuuucaccaauaguagagggaagagggccucaaaagggggcaagacuuguggauuuguggaugaaagaggcuuguacaagucucuaaggggagcaugcaagcugaagcuaugugggguucuaggacuuagacuuauggacggaacaugggucgcaauucagacaucagaugagaucaaauggugcucuccugaucagcuaguaaaucuacacgacuuucacucggaugagaucgaacaucuuguuguggaggaguuggucaaaaagagggaagagugucuggacgcacuggagacuauuaugaccacaaaguccgugaguuucagacgucuuagucauuugaggaagcuagucccuggguuuggaaaggcguauaccauauucaacaagaccuugauggaggcugaugcucacuacaaaucaauccggacuuggaaugaaaucauccccuccaaaggguguuuaagaguuggggggagaugucauccucaugugaacgggguguucuucaacggcauuauacuggguccugacggacauguucucaucccagagaugcagucgucccuccuccaccagcauauggaauuguuggaguccucagucaucccuuugaugcaucccuuagcagacccgucaacagucuuuaaagacggcgacgaggcagaggacuuuguugagguucaccuuccggaugugcacaagcagaucucggggguugaucuuggucucccaaacugggggaaguaugugcugauaagugcaggugcucugacugcauuaauguugaugauuuucuuaaugacguguugcagaaagacuaauagagcagagucaauacaacacaguccuggagagacagggaggaaagugucggugacuucucacaacggaagggucauaucuucaugggaaucauauaaaagcggaagugagaccaagcuguga

SEQ ID NO: 63117 - RNA, 1575 nt, Artificial Sequence
  derived and/or modified CDS sequence (wt) from glycoprotein__RABV__GU591791.1
augauuccucaaguucuuuuguuuguuccccuucuagucuucucgucguguuucgggaaauuccccauuuacacgauaccagacaaacuugguccauggagucccaucgauauacaucaccucagcuguccgaacaaucugguuguggaagaugaaggaugcaccaaucugucuggauuuuccuacauggaacucaaagugggauauauuucagccauaaaagugaacggauucaccuguacagguguagugaccgaagcagaaaccuacacuaacuuuguugguuaugucaccaccacguuuaagagaaagcacuuucgcccuaugccggaugcgugcagagccgcauacaacuggaagauggcuggugaccccagguaugaagagucucugcacaauccguaccccgacuaccacuggcuccgaacugucaagaccaccaaggagucccuugucaucauaucuccgagcguugcagauuuggacccguacgauaaaucccuucacucgagaguuuuuccuggcggaaaaugcucaggaauaaccguguccuccacuugcugcucuacuaaccacgacuacaccaucuggaugccugaaaauccuagacugggaacuucaugugacauuuucaccaauaguagagggaagagggccucaaaagggggcaagacuuguggauuuguggaugaaagaggcuuguacaagucucuaaggggagcaugcaagcugaagcuaugugggguuuuaggacuuagacuuauggacggaacaugggucgcaauucagacaucagaugagaucaaauggugcucuccugaucagcuaguaaaucuacacgacuuucacucggaugagaucgaacaucuuguuguggaggaguuggucaaaaagagggaagagugucuggacgcacuggagacuauuaugaccacaaaguccgugaguuucagacgucuuagucauuugaggaagcuagucccuggguuuggaaaggcguauaccauauucaacaagaccuugauggaggcugaugcucacuacaaaucaauccggacuuggaaugaaaucauccccuccaaaggguguuuaagaguuggggggagaugucauccucaugugaacgggguguucuucaacggcauuauacuggguccugacggacauguucucaucccagagaugcagucgucccuccuccaccagcauauggaauuguuggaguccucagucaucccuuugaugcaucccuuagcagacccgucaacagucuuuaaagacggcgacgaggcagaggacuuuguugagguucaccuuccggaugugcacaagcagaucucggggguugaucuuggucucccaaacugggggaaguaugugcugauaagugcaggugcucugacugcauuaauguugaugauuuucuuaaugacguguugcagaaagacuaauagagcagagucaauacaacacaguccuggagagacagggaggaaagugucggugacuucucacaacggaagggucauaucuucaugggaaucauauaaaagcggaagugagaccaagcuguga

SEQ ID NO: 63118 - RNA, 1575 nt, Artificial Sequence
  derived and/or modified CDS sequence (wt) from glycoprotein__RABV__GU647092.1
augaucccucaggcucuucuguuuguaccccuucugguuguuccauuguguuuugggaaauuccccauuuacacgauaccagacaaacucggucccuggagucccauugauauacaucaucucagcuguccgaauaauuugguuauggaggaugaaggauguaccaaucugucaggguucucauacauggaacuuaaagugggauauauuucagccauaaaggugaauggguucacuuguacggguguggugacagaagcagaaaccuacacuaacuuuguuggcuaugucaccaccacguuuaagagaaagcacuuccgaccaacgccggaugcaugcagaucugcauacaauuggaagauggcuggugaccccagauaugaagagucucugcacaaucccuauccggauuaucauuggcuccgaacuguaaaaaccacaaaagagcccuuuguuaucauaucuccaaguguggcagaucuagacccguacgauaaaucccuucauucgagaguuuuuccuagagggaaaugcucaggaauaacgguguccucuaccuacugcccuaccaaccaugacuacaccaucuggaugccugagaaucccagaucggggaccucuugugauauuuucaccaauagccgagggaagagagcauucaaagggagcaagaccuguggauuuguagaugagagaggcuuguacaaaucucuaaaaggagcaugcaaacugaagcugugcggaguucuuggacucagacuuauggauggaacauggguugcgauucagacaucagacgagaccaaguggugcccuccugaccagcuaguaaaucuacaugacuuucauucggaugagauugaacaucuuguuguggaggaguuggucaagaaaagagaagagugucuagaugcacuggaguccaucaugaccaccaaguccgugaguuuccgacgucucagucacuugaggaaacuugugccuggguuuggaaaagcauacaccauauucaauaagaccuugauggaggcugaugcucacuacaagucgguccgaacuuggaacgagaucauccccucuaaaggguguuuaagaguugggggcagaugucacccccaugugaacggaguguuuuucaacgguaucauccugggcccugacggccauguccugaucccggaaaugcagucaucccuccuccagcagcauauggagcuguuggaauccucgguuauucccuugaugcauccuuuggcagauccaucaacgguuuuuaaaaauggugacgaggcggaggauuuuguugagguacaccuuccagaugugcauaagcaggucucagggguugaucucggucucccaagcugggggaaguauguguugaugagugcaggcauucugacugcucugauguugaugauuuucuuaaugacguguugccgaaggaccaauagaccagaaucaauacaacacagucuuggagagacggggaggaaagugucgguaaccucccaaagcgggagggucauaucuucaugggagucauauaaaaguggaggugagaccaagcuguaa

SEQ ID NO: 63119 - RNA, 1575 nt, Artificial Sequence
  derived and/or modified CDS sequence (wt) from glycoprotein__RABV__GU937024.1
augguuccucaggcucuccuguuuguaccucuucugguuuuuucaauguguuucgggaaauuccccaucuacacgauaccagacaaacuugguccuuggagcccaauugacauacaucaucucagcuguccaaacaacuugguuguagaggaugaaggaugcaccaacuugucaggauuuuccuacauggaacuuaaagugggauacauuucggccauaaaagugaacggguucacgugcacagguguggugacagaggcagaaacuuauacuaacuuuguugguuaugucaccacuacguucaaaagaaagcauuuccgcccgacaccggaugcaugucgagccgcuuacaacuggaaaauggccggugaccccagauaugaagaaucucugcacaauccuuacccugacuaccacuggcuucgaacugucaaaaccacgaaggaaucccuagucaucauauccccaaguguagcggaccuggacccauacgauaaaucccuucacucuagagucuuuccuaacggaaagugcucaggaauaacgauauccucuaccuacugcccuaccaaccaugauuacacuaucuggcucccugagaauccaagacuggggacaucuugugacaucuuuaccaauaguagagggaagagagcauccaaagggagcaagacuugcggguuuguugaugaaagagguuuguauaagucauugaaaggggcaugcaaacuuaaguugugugggguccuuggacuuagacuuauggauggaacgugggucgcaaugcaagcgucggacgagaccaaauggugccccccagaucagcugguaaaucuacacgacuuucgcucggacgagaucgaacaucucguuguggaggaguuggucaagaagagagaagagugucuggaugcacuagaguccaucaugacuacuaagucagugaguuucagacgucucagccacuugagaaagcuugucccuggguucggaaaagcauacaccauauucaacaaaaccuugauggaagcugaugcucacuacaagucaguccgaaccuggaaugagaucauccccucaaaaggguguuugagagucggggggaggugucauccucauguaaacgggguguuuuucaacgguauaauccuggguccugauggccauguucuaaucccagagaugcaaucgucccuccuucagcaacauauggaguuguuggaauccucaguuaucccccugaugcacccuuuagcagacccgucuacaguuuucaaggauggugaugaagcagagaauuuuguggagguucaccuuccggauguacacaaacagaucucgggaguugaccugggccucccuaacugggggaaguauguuuuaguaagugcagggguccugaucgccuugauguugauaauuuuucuaaugacauguugcggaagagucaaucgaccaaaguccacacaacacaaucuuggcgggacagggagggaggugucaguaacuccccaaagcggaaagguuauaucuucaugggagucauacaaaagcggaggugagaccagacuguga

SEQ ID NO: 63120 - RNA, 1575 nt, Artificial Sequence
  derived and/or modified CDS sequence (wt) from glycoprotein__RABV__GU937025.1
augguuccucaggcucuccuguuuguaccucuucugguuuuuucaauguguuucgggaaauuccccaucuacacgauaccagacaaacuugguccuuggagcccaauugacauacaucaucucagcuguccaaacaacuugguuguagaggaugaaggaugcaccaacuugucagguuuuuccuacauggaacuuaaagugggauacauuucggccauaaaagugaacggguucacgugcacagguguggugacagaggcagaaacuuauacuaacuuuguugguuaugucaccacuacguucaaaagaaagcauuuccgcccgacaccggaugcaugucgggccgcuuacaacuggaaaauggccggugaccccagauaugaagaaucucugcacaauccuuacccugacuaccacuggcuucgaacugucaagaccacgaaggaaucccuggucaucauauccccaaguguagcggaccuggacccauacgauaaaucccuucacucuagagucuuuccuaacggaaagugcucaggaauaacgauauccucuaccuacugcccuaccaaccauuauuacacuaucuggcucccugagaauccaagacaggagacaucuugugacaucuuuaccaauaguagagggaagagagcauccaaagggagcaagacuugcggguuuguugaugaaagagguuuguauaagucauugaaaggggcaugcaaacuuaaguugugugggguccuuggacuuagacuuauggauggaacgugggucgcaaugcaagcgucggacgagaccaaauggugccccccagaucagcugguaaaucuacacgacuuucgcucggacgagaucgaacaucucguuguggaggaguuggucaagaagagagaagagugucuggaugcacuagaguccaucaugacuacuaagucaguggguuucagacgucucagccacuugagaaagcuugucccuggguucagaaaagcauacaccauauucaacaaaaccuugauggaagcugaugcucacuacaagucaguccgaaccuggaaugagaucauccccucaaaaggguguuugagagucggggggaggugucauccucauguaaacgggguguuuuucaacgguauaauccuggguccugauggccauguucuaaucccagagaugcaaucgucccuccuucagcaacauaugggguuguuggaguccucaguuaucccccugaugcacccuuuagcagacccgucuacaguuuucaaggauggugaugaagcagagaauuuuguggagguucaccuuccugauguacacaaacagaucucgggaguugaccugggucucccuaacugggggaaguauguuuuaguaagugcagggguccugaucgccuugauguugauaauuuuucuaaugacauguugcggaagagucaaucgaccaaaguccacacaacacaaucuuggcgggacagggagggaggugucaguaacuccccaaagcggaaaggugauaucuucaugggagucauacaaaagcggaggugagaccagacuguga

SEQ ID NO: 63121 - RNA, 1575 nt, Artificial Sequence
  derived and/or modified CDS sequence (wt) from glycoprotein__RABV__GU937026.1
augguuccucaggcucuccuguuuguaccucuucugguuuuuucaauguguuucgggaaauuccccaucuacacgauaccagacaaacuugguccuuggagcccaauugacauacaucaucucagcuguccaaacaacuugguuguagaggaugaaggaugcaccaacuugucagguuuuuccuacauggaacuuaaagugggauacauuucggccauaaaagugaacggguucacgugcacagguguggugacagaggcagaaacuuauacuaacuuuguugguuaugucaccacuacguucaaaagaaagcauuuccgcccgacaccggaugcaugucgagccgcuuacaacuggaaaauggccggugaccccagauaugaagaaucucugcacaauccuuacccugacuaccacuggcuucgaacugucaaaaccacgaaggaaucccuagucaucauauccccaaguguagcggaccuggacccauacgauaaaucccuucacucuagagucuuuccuaacggaaagugcucaggaauaacgauauccucuaccuacugcccuaccaaccaugauuacacuaucuggcucccugagaauccaagacuggggacaucuugugacaucuuuaccaauaguagagggaagagagcuuccaaagggagcaagacuugcggguuuguugaugaaagagguuuguauaagucauugaaaggggcaugcaaacuuaaguugugugggguccuuggacuuagacuuauggauggaacgugggucgcaaugcaagcgucggacgagaccaaauggugccccccagaucagcugguaaaucuacacgacuuucgcucggacgagaucgaacaucucguuguggaggaguuggucaagaagagagaagagugucuggaugcacuagaguccaucaugacuacuaagucagugaguuucagacgucucagccacuugagaaagcuugucccuggguucggaaaagcauacaccauauucaacaaaaccuugauggaagcugaugcucacuacaagucaguccgaaccuggaaugagaucauccccucaaaaggguguuugagagucggggggaggugucauccucauguaaacgggguguuuuucaacgguauaauccuggguccugauggccauguucuaaucccagagaugcaaucgucccuccuucagcaacauauggaguuguuggaauccucaguugucccccugaugcacccuuuagcagacccgucuacaguucucaaggauggugaugaagcagagaauuuuguggagguucaccuuccugauguacacaaacagaucucgggaguugaccugggucucccuaacugggggaaguauguuuugguaagugcagggguccugaucgccuugauguugauaauuuuucuaaugacauguugcggaagagucaaucgaccaaaguccacacaacacaaucuuggcgggacagggaggaaggugucaguaacuccccaaagcggaaagguuauaucuucaugggagucauacaaaagcggaggugagaccagacuguga

SEQ ID NO: 63122 - RNA, 1575 nt, Artificial Sequence
  derived and/or modified CDS sequence (wt) from glycoprotein__RABV__GU937027.1
augguuccucaggcucuccuguuuguaccucuucugguuuuuucaauguguuucgggaaauuccccaucuacacgauaccagacaaacuugguccuuggagcccaauugacauacaucaucucagcuguccaaacaacuugguuguagaggaugaaggaugcaccaacuugucagguuuuuccuacauggaacuuaaagugggauacauuucggccauaaaagugaacggguucacgugcacagguguggugacagaggcagaaacuuauacuaacuuuguugguuaugucaccacuacguucaaaagaaagcauuuccgcccgacaccggaugcaugucgggccgcuuacaacuggaaaauggccggugaccccagauaugaagaaucucugcacaauccuuacccugacuaccacuggcuucgaacugucaaaaccacgaaggaaucccuggucaucauauccccaaguguagcggaccuggacccauacgauaaaucccuucacucuagagucuuuccuaacggaaagugcucaggaauaacgauauccucuaccuacugcccuaccaaccauuauuacacuaucuggcucccugagaauccaagacuggggacaucuugugacaucuuuaccaauaguagagggaagagagcauccaaagggagcaagacuugcggguuuguugaugaaagagguuuguauaagucauugaaaggggcaugcaaacuuaaguugugugggguccuuggacuuagacuuauggauggaacgugggucgcaaugcaagcgucggacgagaccaaauggugccccccagaucagcugguaaaucuacacgacuuucgcucggacgagaucgaacaucucguuguggaggaguuggucaagaagagagaagagugucuggaugcacuagaguccaucaugacuacuaagucagugaguuucagacgucucagccacuugagaaagcuugucccuggguucggaaaagcauacaccauauucaacaaaaccuugauggaagcugaugcucacuacaagucaguccgaaccuggaaugagaucauccccucaaaaggguguuugagagucggggggaggugucauccucauguaaacgggguguuuuucaacgguauaauccuggguccugauggccguguucuaaucccagagaugcaaucgucccuccuucagcaacauauggaguuguuggaauccucaguuaucccccugaugcacccuuuagcagacccgucuacaguuuucaaggauggugaugaagcagagaauuuuguggagguucaccuuccugauguacacaaacagaucucgggaguugaccugggucucccuaacugggggaaguauguuuuaguaagugcagggguccugaucgccuugauguugauaauuuuucuaaugacauguugcggaagagucaaucgaccaaaguccacacaacacaaucuuggcgggacagggagggaggugucaguaacuccccaaagcggaaaggugauaucuucaugggagucauacaaaagcggaggugagaccagacuguga

SEQ ID NO: 63123 - RNA, 1575 nt, Artificial Sequence
  derived and/or modified CDS sequence (wt) from glycoprotein__RABV__GU937028.1
augguuccucaggcucuccuguuuguaccucuucugguuuuuucaauguguuucgggaaauuccccaucuacacgauaccagacaaacuugguccuuggagcccaauugacauacaucaucucagcuguccaaacaacuugguuguagaggaugaaggaugcaccaacuugucaggauuuuccuacauggaacuuaaagugggauacauuucggccauaaaagugaacggguucacgugcacagguguggugacagaggcagaaacuuauacuaaccuuguugguuaugucaccacuacguucaaaagaaagcauuuccgcccgacaccggaugcaugucgagccgcuuacaacuggaaaauggccggugaccccagauaugaagaaucucugcacaauccuuacccugacuaccacuggcuucgaacugucaaaaccacgaaggaaucccuagucaucauauccccaaguguagcggaccuggacccauacgauaaaucccuucacucuagagucuuuccuaacggaaagugcucaggaauaacgauauccucuaccuacugcccuaccaaccaugauuacacuaucuggcucccugagaauccaagacuggggacaucuugugacaucuuuaccaauaguagagggaagagagcauccaaagggagcaagacuugcggguuuguugaugaaagagguuuguauaagucauugaaaggggcaugcaaacuuaaguugugugggguccuuggacucagacuuauggauggaacgugggucgcaaugcaagcgucggacgagaccaaauggugccccccagaucagcugguaaaucuacacgacuuucgcucggacgagaucgaacaucucguuguggaggaguuggucaagaagagagaagagugucuggaugcacuagaguccaucaugacuacuaagucagugaguuucagacgucucagccacuugagaaagcuugucccuggguucggaaaagcauacaccauauucaacaaaaccuugauggaagcugaugcucacuacaagucaguccgaaccuggaaugagaucauccccucaaaaggguguuugagagucggggggaggugucauccucauguaaacgggguguuuuucaacgguauaauccuggguccugauggccauguucuaaucccagagaugcaaucgucccuccuucagcaacauauggaguuguuggaauccucaguuaucccccugaugcacccuuuagcagacccgucuacaguuuucaaggauggugaugaagcagagaauuuuguggagguucaccuuccugauguacacaaacagaucucgggaguugaccugggucucccuaacugggggaaguauguuuuaguaagugcagggguccugaucgccuugaugcugauaauuuuucuaaugacauguugcggaagagucaaucgaccaaaguccacacaacacaaucuuggcgggacagggagggaggugucaguaacuccccaaagcggaaagguuauaucuucacgggagucauacaaaagcggaggugagaccagacuguga

SEQ ID NO: 63124 - RNA, 1575 nt, Artificial Sequence
  derived and/or modified CDS sequence (wt) from glycoprotein__RABV__GU937029.1
augguuccucaggcucuccuguuuguaccucuucugguuuuuucaauguguuucgggaaauuccccaucuacacgauaccagacaaacuugguccuuggagcccaauugacauacaucaucucagcuguccaaacaacuugguuguagaggaugaaggaugcaccaacuugucaggauuuuccuacauggaacuuaaagugggauacauuucggccauaaaagugaacggguucacgugcacagguguggugacagaggcagaaacuuauacuaaccuuguugguuaugucaccacuacguucaaaagaaagcauuuccgcccgacaccggaugcaugucgagccgcuuacaacuggaaaauggccggugaccccagauaugaagaaucucugcacaauccuuacccugacuaccacuggcuucgaacugucaaaaccacgaaggaaucccuagucaucauauccccaaguguagcggaccuggacccauacgauaaaucccuucacucuagagucuuuccuaacggaaagugcucaggaauaacgauauccucuaccuacugcccuaccaaccaugauuacacuaucuggcucccugagaauccaagacuggggacaucuugugacaucuuuaccaauaguagagggaagagagcauccaaagggagcaagacuugcggguuuguugaugaaagagguuuguauaagucauugaaaggggcaugcaaacuuaaguugugugggguccuuggacucagacuuauggauggaacgugggucgcaaugcaagcgucggacgagaccaaauggugccccccagaucagcugguaaaucuacacgacuuucgcucggacgagaucgaacaucucguuguggaggaguuggucaagaagagagaagagugucuggaugcacuagaguccaucaugacuacuaagucagugaguuucagacgucucagccacuugagaaagcuugucccuggguucggaaaagcauacaccauauucaacaaaaccuugauggaagcugaugcucacuacaagucaguccgaaccugggaugagaucauccccucaaaaggguguuugagagucggggggaggugucauccucacguaaacgggguguuuuucaacgguauaauccuggguccugauggccauguucuaaucccagagaugcaaucgucccuccuucagcaacauauggaguuguuggaauccucaguuaucccccugaugcacccuuuagcagacccgucuacaguuuucaaggauggugaugaagcagagaauuuuguggagguucaccuuccugauguacacaaacagaucucgggaguugaccugggucucccuaacugggggaaguauguuuuaguaagugcagggguccugaucgccuugauguugauaauucuucuaaugacauguugcggaagagucaaucgaccaaaguccacacaacacaaucuuggcgggacagggagggaggugucaguaacuccccaaagcggaaaggugauaucuucaugggagucauacaaaagcggaggugagaccagacuguga

SEQ ID NO: 63125 - RNA, 1575 nt, Artificial Sequence
  derived and/or modified CDS sequence (wt) from glycoprotein__RABV__GU937030.1
augguuccucaggcucuccuguuuguaccucuucugguuuuuucaauguguuucgggaaauuccccauuuacacgauaccagacaaacuugguccuuggagcccaauugacauacaucaucucagcuguccaaacaacuugguuguagaggaugaaggaugcaccaacuugucagguuuuuccuacauggaacuuaaagugggauacauuucggccauaaaagugaacggguucacgugcacagguguggugacagaggcagaaacuuauacuaacuuuguugguuaugucaccacuacguucaaaagaaagcauuuccgcccgacaccggaugcaugucgggccgcuuacaacuggaaaauggccggugaccccagauaugaagaaucucugcacaauccuuacccugacuaccacuggcuucgaacugucaaaaccacgaaggaaucccuagucaucauauccccaaguguagcggaccuggacccauacgauaaaucccuucacucuagagucuuuccuaacggaaagugcucaggaauaacgauauccucuaccuacugcccuaccaaccaugauuacacuaucuggcucccugagaauccaagacuggggacaucuugugacaucuuuaccaauaguagagggaagagagcauccaaagggagcaagacuugcggguuuguugaugaaagagguuuguauaagucauugaaaggggcaugcaaacuuaaguugugugggguccuuggacuuagacuuauggauggaacgugggucgcaaugcaagcgucggacgagaccaaauggugccccccagaucagcugguaaaucuacacgacuuucgcucggacgagaucgaacaucucguuguggaggaguuggucaagaagagagaagagugucuggaugcacuagaguccaucaugacuacuaagucagugaguuucagacgucucagccacuugagaaagccugucccuggguucggaaaagcauacaccauauucaacaaaaccuugauggaagcugaugcucacuacaagucaguccgaaccuggaaugagaucauccccucaaaaggguguuugagagucggggggaggugucauccucauguaaacgggguguuuuucaacgguauaauccuggguccugauggccauguucuaaucccagagaugcaaucgucccuccuucagcaacauauggaguuguuggaauccucaguuaucccccugaugcacccuuuagcagacccgucuacaguuuucaaggauggugaugaagcagagaauuuuguggagguucaccuuccugauguacacaaacagaucucgggaguugaccugggucucccuaacuggggggaguauguuuuaguaagugcagggguccugaucgccuugauguugauaauuuuucuaaugacauguugcggaagagucaaucgaccaaaguccacacaacacaaucuuggcgggacagggagggaggugucaguaacuccccaaagcggaaaggugauaucuucaugggagucauacaaaagcggaggugagaccagacuguga

SEQ ID NO: 63126 - RNA, 1575 nt, Artificial Sequence
  derived and/or modified CDS sequence (wt) from glycoprotein__RABV__GU937031.1
augguuccucaggcucuccuguuuguaccucuucugguuuuuucaauguguuucgggaaauuccccaucuacacgauaccagacaaacuugguccuuggagcccaauugacauacaucaucucagcuguccaaacaacuugguuguagaggaugaaggaugcaccaacuugucagguuuuuccuacauggaacuuaaagugggauacauuucagccauaaaagugaacggguucacgugcacagguguggugacagaggcagaaacuuauacuaacuuuguugguuaugucaccacuacguucaaaagaaagcauuuccgcccgacaccggaugcaugucgggccgcuuacaacuggaaaauggccggugaccccagauaugaagaaucucugcacaauccuuacccugacuaccacuggcuucgaacugucaaaaccacgaaggaaucccuagucaucauauccccaaguguagcggaccuggacccauacgauaaaucccuucacucuagagucuuuccuaacggaaggugcucaggaauaacgauauccucuaccuacugcccuaccaaccaugauuacacuaucuggcucccugagaauccaagacuggggacaucuugugacaucuuuaccaauaguagagggaagagagcauccaaagggagcaagacuugcggguuuguugaugaaagagguuuguauaagucauugaaaggggcaugcaaacuuaaguugugugggguccuuggacuuagacuuauggauggaacgugggucgcaaugcaagcgucggacgagaccaaauggugccccccagaucagcugguaaaucuacacgacuuucgcucggacgagaucgaacaucucguuguggaggaguuggucaagaagagagaagagugucuggaugcacuagaguccaucaugacuacuaagucagugaguuucagacgucucagccacuugagaaagcuugucccuggguucggaaaagcauacaccauauucaacaaaaccuugauggaagcugaugcucacuacaagucaguccgaaccuggaaugagaucauccccucaaaaggguguuugagagucggggggaggugucauccucauguaaacgggguguuuuucaacgguauaauccuggguccugauggccauguucuaaucccagagaugcaaucgucccuccuucagcaacauauggaguuguuggaauccucaguuaucccccugaugcacccuuuagcagacccgucuacaguuuucaaggauggugaugaagcagagaauuuuguggagguucaccuuccugauguacacaaacagaucucgggaguugaccugggucucccuaacugggggaaguauguuuuaguaagugcagggguccugaucgccuugauguugauaauuuuucuaaugacauguugcggaagagucaaucgaccaaaguccacacaacacaaucuuggcgggacagggagggaggugucaguaacuccccaaagcggaaaggugauaucuucaugggagucauacaaaagcggaggugagaccagacuguga

SEQ ID NO: 63127 - RNA, 1575 nt, Artificial Sequence
  derived and/or modified CDS sequence (wt) from glycoprotein__RABV__GU937032.1
augguuccucaggcucuccuguuuguaccucuucuggcuuuuucaauguguuucgggaaauuccccaucuacacgauaccagacaaacuugguccuuggagcccaauugacauacaucaucucagcuguccaaacaacuugguuguagaggaugaaggaugcaccaacuugucaggauuuuccuacauggaacuuaaagugggauacauuucggccauaaaagugaacggguucacgugcacagguguggugacagaggcagaaacuuauacuaacuuuguugguuaugucaccacuacguucaaaagaaagcauuuccgcccgacaccggaugcaugucgagccgcuuacaacuggaaaauggccggugaccccagauaugaagaaucucugcacaauccuuacccugacuaccacuggcuucgaacugucaaaaccacgaaggaaucccuagucaucauauccccaaguguagcggaccuggacccauacgauaaaucccuucacucuagagucuuuccuaacggaaagugcucaggaauaacgauauccucuaccuacugcccuaccaaccaugauuacacuaucuggcucccugagaauccaagacuggggacaucuugugacaucuuuaccaauaguagagggaagagagcauccaaagggagcaagacuugcggguuuguugaugaaagagguuuguauaagucauugaaaggggcaugcaaacuuaaguugugugggguccuuggacuuagacuuauggaugaaacgugggucgcaaugcaagcgucggacgagaccaaauggugccccccagaucagcugguaaaucuacacgacuuucgcucggacgagaucgaacaucucguuguggaggaguuggucaagaagagagaagagugucuggaugcacuagaguccaucaugacuacuaagucagugaguuucagacgucucagccacuugagaaagcuugucccuggguucggaaaagcauacaccauauucaacaaaaccuugauggaagcugaugcucacuacaagucaguccgaaccuggaaugagaucauccccucaaaaggguguuugagagucggggggaggugucauccucauguaaacgggguguuuuucaacgguauaauccuggguccugauggccauguucuaaucccagagaugcaaucgucccuccuucagcaacauauggaguuguuggaauccucaguuaucccccugaugcacccuuuagcagacccgucuacaguuuucaaggauggugaugaagcagagaauuuuguggagguucaccuuccugauguacacaaacagaucucgggaguugaccugggucucccuaacugggggaaguauguuuuaguaagugcagggguccugaucgccuugauguugauaauuuuucuaaugacauguugcggaagagucaaucgaccaaaguccacacaacacaaucuuggcgggacagggagggaggugucaguaacuccccaaagcggaaagguuauaucuucaugggagucauacaaaagcggaggugagaccagacuguga

SEQ ID NO: 63128 - RNA, 1575 nt, Artificial Sequence
  derived and/or modified CDS sequence (wt) from glycoprotein__RABV__GU937033.1
augguuccucaggcucuccuguuuguaccucuucugguuuuuucaauguguuucgggaaauuccccaucuacacgauaccagacaaacuugguccuuggagcccaauugacauacaucaucucagcuguccaaacaacuugguuguagaggaugaaggaugcaccaacuugucagguuuuuccuacauggaacuuaaagugggauacauuucggccauaaaggugaacggguucacgugcacagguguggugacagaggcagaaacuuauacuaacuuuguugguuaugucaccacuacguucaaaagaaagcauuuccgcccgacaccggaugcaugucgagccgcuuacaacuggaaaauggccggugaccccagauaugaagaaucucugcacaauccuuacccugacuaccacuggcuucgaacugucaaaaccacgaaggaaucccuagucaucauauccccaaguguagcggaccuggacccauacgauaaaucccuucacucuagagucuuuccuaacggaaagugcucaggaauaacgauauccucuaccuacugcccuaccaaccaugauuacacuaucuggcucccugagaauccaagacuggggacaucuugugacaucuuuaccaauaguagagggaagagagcuuccaaagggagcaagacuugcggguuuguugaugaaagagguuuguauaagucauugaaaggggcaugcaaacuuaaguugugugggguccuuggacuuagacuuauggauggaacgugggucgcaaugcaagcgucggacgagaccaaauggugccccccagaucagcugguaaaucuacacgacuuucgcucggacgagaucgaacaucucguuguggaggaguuggucaagaagagagaagagugucuggaugcacuagaguccaucaugacuacuaagucagugaguuucagacgucucagccacuugagaaagcuugucccuggguucggaaaagcauacaccauauucaacaaaaccuugauggaagcugaugcucaccacaagucaguccgaaccuggaaugagaucauccccucaaaaggguguuugagagucggggggaggugucauccucauguaaacgggguguuuuucaacgguauaauccuggguccugauggccauguucuaaucccagagaugcaaucgucccuccuucagcaacauauggaguuguuggaauccucaguugucccccugaugcacccuuuagcagacccgucuacaguucucaaggauggugaugaagcagagaauuuuguggagguucaccuuccugacguacacaaacagaucucgggaguugaccugggucucccuaacugggggaaguauguuuugguaagugcagggguccugaucgccuugauguugauaauuuuucuaaugacauguugcggaagagucaaucgaccaaaguccacacaacacaaucuuggcgggacagggaggaaggugucaguaacuccccaaagcggaaagguuauaucuucaugggagucauacaaaagcggaggugagaccagacuguga

SEQ ID NO: 63129 - RNA, 1575 nt, Artificial Sequence
  derived and/or modified CDS sequence (wt) from glycoprotein__RABV__GU937034.1
augguuccucaggcucuccuguuuguaccucuucugguuuuuucaauguguuucgggaaauuccccaucuacacgauaccagacaaacuugguccuuggagcccaauugacauacaucaucucagcuguccaaacaacuugguuguagaggaugaaggaugcaccaacuugucagguuuuuccuacauggaacuuaaagugggauacauuucagccauaaaagugaacggguucacgugcacagguguggugacagaggcagaaacuuauacuaacuuuguugguuaugucaccacuacguucaaaagaaagcauuuccgcccgacaccggauguaugucgggccgcuuacaacuggaaaauggccggugaccccagauaugaagaaucucugcacaauccuuacccugacuaccacuggcuucgaacugucaaaaccacgaaggaaucccuagucaucauauccccaaguguagcggaccuggacccauacgauaaaucccuucacucuagagucuuuccuaacggaaagugcucaggaauaacgauauccucuaccuacugcccuaccaaccaugauuacacuaucuggcucccugagaauccaagacuggggacaccuugugacaucuuuaccaauaguagagggaagagagcauccaaagggagcaagacuugcggguuuguugaugaaagagguuuguauaagucauugaaaggggcaugcaaacuuaaguugugugggguccuuggacuuagacuuauggauggaacgugggucgcaaugcaagcgucggacgagaccaaauggugccccccagaucagcugguaaaucuacacgacuuucgcucggacgagaucgaacaucucguuguggaggaguuggucaagaagagagaagagugucuggaugcacuagaguccaucaugacuacuaagucagugaguuucagacgucucagccacuugagaaagcuugucccuggguucggaaaagcauacaccauauucaacaaaaccuugauggaagcugaugcucacuacaagucaguccgaaccuggaaugagaucauccccucaaaaggguguuugagagucggggggaggugucauccucauguaaacgggguguuuuucaacgguauaauccuggguccugauggccauguucuaaucccagagaugcaaucgucccuccuucagcaacauauggaguuguuggaauccucaguuaucccccugaugcacccuuuagcagacccgucuacaguuuucaaggauggugaugaagcagagaauuuuguggagguucaccuuccugauguacacaaacagaucucgggaguugaccugggucucccuaacugggggaaguauguuuuaguaagugcagggguccugaucgccuugauguugauaauuuuucuaaugacauguugcggaagagucaaucaaccaaaguccacacaacacaaucuuggcgggacagggagggaggugucaguaacuccccaaagcggaaaggugauaucuucaugggagucauacaaaagcggaggugagaccagacuguga

SEQ ID NO: 63130 - RNA, 1575 nt, Artificial Sequence
  derived and/or modified CDS sequence (wt) from glycoprotein__RABV__HE801606.1
augguuccucagguucuuuuguuuguaccccuucuuguuuucucaauguguuucgggaaauucccuaucuauacaauaccagacaagcuuggucccuggagcccgaucgacauacaucaucucagcuguccaaacaaccugguuguggaagaugaaggauguaccaacuugucggguuucuccuacauggaacuuaaggugggauacaucucggccauaaaaguaaacggauuuacgugcacagguguggugacagaggcagaaacuuacacuaacuuugucgguuaugucaccaccacguucaaaagaaagcauuuccgcccaacaccagaugcaugucgagcugcuuacaacuggaagcuggccggugaccccagauaugaagaaucucugcacaauccguacccugacuaccacuggcuucgaaccgucaaaaccacaaaggagucccucgucaucauauccccaaguguagcggaccuggacccauacgacaaaucccuucauucgagggucuuuccuagcgggaagugcuugggaauaacaauaucaucuacuuacugcucuacuaaccaugauuacacaaucuggaugcccgagaauccgagacuggggacaucuugugacaucuuuaccaacaguagagggaagagagcauccaaagggagcaaaacuugcggauuuguugaugaaaggggcuuguauaagucuuugaaaggggcaugcaaacucaaguuauguggaguucuuggccuuagacuuauggauggaacguggguugcgaugcaaacaucggacgaaaccaagugguguccuccugaucaguuaguaaaucuacacgacuuucgcucagacgagauugaacaucuugucguggaggaguuggucaagaaaagagaggagugucuggaugcacuagaguccaucaugacuaccaagucggugaguuucagacguuucagccaucugaggaaacuugucccuggguucggaaaagcauaccccauauucaacaaaaccuugauggaagcagaugcucauuacaagucaguccgaaccuggaaugagaucauccccuccaaaggguguuugagagugggagggaggugucauccucacgugaaugggguguuuuuuaacgguauaauacuggguccugacggccauguucuaaucccagagaugcaaucaucccuccuucagcagcauauggaguuguuggaauccucaguuaucccccugaugcacccuuuagcagacccaucuacaguuuuuaaggacggugaugaagcagaggauuuuguugagguucaccuucccgacguacacaaacaaauuucagguguugaccugggucuccccagcuggggaaaguauguuuuggugagugcaggggucuugguuguccugauguugacaauuuucacaaugacauguugcggaagaguccaucgacccaagucuacgcaacacagucucggagggaccgggaggaaggugucggucacuucccaaagcgggaaggucauaucuucaugggagucauauaagaguggaggugagaccagacuguga

SEQ ID NO: 63131 - RNA, 1575 nt, Artificial Sequence
  derived and/or modified CDS sequence (wt) from glycoprotein__RABV__HE801607.1
auggugccucagguucauauguuuguaccccuacugguuuacgcaauguguuucgggaaauucccuaucuauacaauaccagacaaacuuggucccuggagcccgaucgacauacaucaccucagcuguccaaacaaucugguuguggaagaugaaggauguaccaacuugucugguuucuccuacauggaacuuaaggugggauacaucucggccauaaaaguaaguggauucacgugcacagguguggugacagaggcagagacuuacacuaacuuugucgguuaugucaccaccacguucaaaagaaagcauuuccgcccaacacccgaugcaugucgagcugcuuacaacuggaagcuggccggugaccccagauaugaagaaucucugcacaauccguacccugacuaccacuggcuucgaaccgucaaaaccacaaaggagucccucgucaucauauccccaaguguagcggaccuggacccauacgacaaaucccuucauucgagggucuuuccuagcgggaagugcuugggaauaacuauaucaucuacuuacugcucuacuaaccaugauuacacaaucuggaugcccgagaauccgagacuggggacaucuugugacaucuuuaccaacaguagagggaagagagcauccaaagggagcaaaacuugcggauuuguugaugaaagaggcuuguacaagucuuugaaaggagcaugcaaacucaaguuauguggaguucuuggccuuagacuuauggauggaacguggguugcgaugcaaacaucggacgaaaccaagugguguccuccugaucaguugguaaaucuacacgacuuucgcucggacgagauugaacaucuuguuguggaggaguuggucaagaaaagagaggagugucuggaugcacuagaguccaucaugacuaccaagucggugaguuucagacgucucagccaucugagaaaacuugucccuggguucggaaaagcauauaccauauucaacaaaaccuugauggaagcagaugcucauuacaagucaguccgaaccuggaaugagaucauccccuccaaaggguguuugagagugggagggaggugucauccucacgugaaugggguguuuuuuaacgguauaauacuggguccugacggccauguucugaucccagagaugcaaucaucccuccuucagcagcauauggaguuguuggaauccucaguuaucccccugaugcacccuuuagcagacccaucuacaguuuuuaaggacggugaugaagcagaggauuuuguugagguucaccuucccgacgugcacaaacaaauuucagguguugaccugggucuccccagcuggggaaaguauguuuuggugagugcaggggucuugguuguccugauguuggcaauuuucauaaugacauguugcggaagaguccaucgacccaagucuacgcaacacagucucggagggaccgggaggaaggcgucggucacuucccaaagcgggaaggucauaucuucaugggagucauauaagaguggaggugagaccagacuguga

SEQ ID NO: 63132 - RNA, 1575 nt, Artificial Sequence
  derived and/or modified CDS sequence (wt) from glycoprotein__RABV__HE801608.1
augguuccucagguucuuuuguuuguaccccuucuuguuuucucaauguguuucgggaaauucccuaucuauacaauaccagacaaacuuggucccuggagcccgaucgacauacaucaucucagcuguccaaacaaucugguuguggaagaugaaggauguaccaacuugucggguuucuccuacauggaacuuaaggugggauacaucucggccauaaaaguaaacggauucacgugcacagguguggugacagaggcagagacuuacacuaacuuugucgguuaugucaccaccacguucaaaagaaagcauuuccgcccaacaccagaugcaugucgaacugcuuacaacuggaagcuggccggugaccccagauaugaagaaucucugcacaauccguacccugacuaccacuggcuucgaaccgucaaaaccacaaaggagucccucgucaucauuuccccaaguguagcggaccuggacccauacgacaaaucccuucauucgagggucuuuccuagcgggaagugcuugggaaucacaauaucaucuacuuacugcucuacuaaccaugauuacacaaucuggaugcccgagaauccgagacuggggacaucuugugacaucuuuaccaacaguagagggaagagagcauccaaagggagcaaaacuugcggauuuguugaugaaagaggcuuguacaagucuuugaaaggggcaugcaaacucaaguuauguggaguucuuggccuuagacucauggauggaacguggguugcgaugcaaacaucggacgaaaccaagugguguccuccugaucaguugguaaaucuacacgacuuucgcucggacgagauugaacaucuuguuguggaggaguuggucaagaaaagagaggagugucuggaugcacuagaguccaucaugacuaccaagucggugaguuucagacgucuuagccaucuaagaaaacuugucccuggguucggaaaagcauauacuauauucaacaaaaccuugauggaagcagaugcucauuacaagucaguccgaaccuggaaugagaucauccccuccaaaggguguuugagagugggagggaggugucauccucacgugaaugggguguuuuuuaacgguauaauacuggguccugacggccauguucuaaucccagagaugcaaucaucccuccuucagcagcauauggaguuguuggaauccucaguuaucccccugaugcacccuuuagcagacccaucuacaguuuuuaaggacggugaugaagcagaggauuuuguugagguucaccuucccgacgugcacaaacaaauuucagguguugaccugggucuccccagcuggggaaaguauguuuuggugagugcaggggucuugguuguccugauguugacaauuuucauaaugacauguugcggaagaguccaucgacccaagucuacgcaacacagucucggagggaccgggaggaaggugucggucacuucccaaagcgggaaggucauaucuucaugggagucauauaagaguggaggugagaccagacuguga

SEQ ID NO: 63133 - RNA, 1575 nt, Artificial Sequence
  derived and/or modified CDS sequence (wt) from glycoprotein__RABV__HE801609.1
augguuccucagguucuuuuguuuguaccccuccuuguuuucucaauguguuucgggaaauucccuaucuauacaauaccagacaagcuuggucccuggagcccgaucgacauacaucaucucagcuguccaaacaaccugguuguggaagaugaaggauguaccaacuugucggguuucuccuacauggaacuuaaggugggauacaucucggccauaaaaguaaacggacuuacgugcacagguguggugacagaggcagaaacuuacacuaacuuugucgguuaugucaccaccacguucaaaagaaagcauuuccgcccaacaccagaugcaugucgagcugcuuacaacuggaagcuggccggugaccccagauaugaagaaucucugcacaauccguacccugacuaccacuggcuucgaaccgucaaaaccacaaaggagucccucgucaucauauccccaaguguagcggaccuggacccauacgacaaaucccuucauucgagggucuuuccuagcgggaagugcuugggaauaacaauaucaucuacuuacugcucuacuaaccaugauuacacaaucuggaugcccgagaauccgagacuggggacaucuugugacaucuuuaccaacaguagagggaagagagcauccaaagggagcaaaacuugcggauuuguugaugaaagaggcuuguauaagucuuugaaaggggcaugcaaacucaaguuauguggaguucuuggcccuagacuuauggauggaacguggguugcgaugcaaacaucggacgaaaccaagugguguccuccugaucaguuaguaaaucuacacgacuuucgcucagacgagauugaacaucuugucguggaggaguuggucaagaaaagagaggagugucuggaugcacuagaguccaucaugacuaccaagucguugaguuucagacgucucagccacuugagaaaacuugucccuggguucggaaaagcauacaccauauucaacaaaaccuugauggaagcagaugcucauuacaagucaguccgaaccuggaaugagaucauccccuccaaaggguguuugagagugggagggaggugccauccucacgugaaugggguguuuuuuaacgguauaauacuggguccugauggccauguucuaaucccagagaugcaaucaucccuccuucagcagcauauggaguuguuggaauccucaguuaucccccugaugcacccuuuagcagacccaucuacaguuuuuaaggacggugaugaagcagaggauuuuguugagguucaccuucccgacguacacaaacaaauuucagguguugaccugggucuccccagcuggggaaaguauguuuuggugagugcaggggucuugguuguccugauguugacaauuuucauaaugacauguugcggaagaguccaucgacccaagucuacgcaacacagucucggagggaucgggaggaaggugucggucacuucccaaagcgggaaggucauaucuucaugggagucauauaagaguggaggugagaccagacuguga

SEQ ID NO: 63134 - RNA, 1575 nt, Artificial Sequence
  derived and/or modified CDS sequence (wt) from glycoprotein__RABV__HE801610.1
augguuccucagguucuuuuguuuguaccccuucuuguuuucucaauguguuucgggaaauucccuaucuauacaauaccagacaaacuuggucccuggagcccgaucgacauacaucaccucagcuguccaaacaaucugguuguggaagaugaaggauguaccaacuugucggguuucuccuacauggaacuuaaggugggauacaucucggccauaaaaguaaauggauucacgugcacagguguggugacagaggcagagacuuacacuaacuuugucgguuaugucaccaccacguucaaaagaaagcauuuccgcccaacaccagaugcaugucgagcugcuuacaacuggaagcuggccggugaccccagauaugaagaaucucugcucaauccguacccugacuaccacuggcuucgaaccgucaaaaccacaaaggagucccucgucaucauauccccaaguguagcggaccuggacccauacgacaaaucccuucauucgaaggucuuuccuagcgggaagugcuugggaauaacuauaucaucuacuuacugcucuacuaaccaugauuacacaaucuggaugcccgagaauccgagacuggggacaucuugugacaucuuuaccaacaguagagggaagagagcauccaaagggagcaaaacuugcggauuuguugaugaaagaggcuuguacaagucuuugaaaggagcaugcaaacucaaguuauguggaguucuuggccuuagacuuauggauggaacguggguugcgaugcaaacaucggacgaaaccaagugguguccuccugaucaguugguaaaucuacacgacuuucgcucggacgagauugaacaucuuguuguagaggaguuggucaagaaaagagaggagugucuggaugcacuagaguccaucaugacuaccaagucggugaguuucagacgucucagccaucugagaaaacuugucccuggguucggaaaggcauauaccauauucaacaaaaccuugauggaagcagaugcucauuacaagucaguccgaaccuggaaugagaucauccccuccaaaggguguuugagagugggagggaggugucauccucacgugaaugggguguuuuuuaacgguauaauacuggguccugacggccauguucugaucccagagaugcaaucaucccuccuucagcagcauauggaguuguuggaauccucaguuaucccccugaugcacccuuuagcagacccaucuacaguuuuuaaggacggugaugaagcagaggauuuuguugagguucaccuucccgacgugcacaaacaaauuucagguguugaccugggucuccccagcuggggaaaguauguuuuggugagugcaggggucuugguuguccugauguuggcaauuuucauaaugacauguugcggaagaguccaucaacccaagucuacgcaacacagucucggagggaccgggaggaaggugucggucacuucccaaagcgggaaggucauaucuucaugggagucauauaagaguggaggugagaccagacuguga

SEQ ID NO: 63135 - RNA, 1575 nt, Artificial Sequence
  derived and/or modified CDS sequence (wt) from glycoprotein__RABV__HE801611.1
augguuccucagguucuuuuguuuguaccccuucuuguuuucucaauguguuucgggaaauucccuaucuauacaauaccagacaaacuuggucccuggagcccgaucgacauacaucaucucagcuguccaaacaaccugguuguggaagaugaaggauguaccaacuugucggguuucuccuacauggaacuuaaggugggauacaucucggccauaaaaguaaacggauucacgugcacagguguggugacagaggcagagacuuacacuaacuuugucgguuaugucaccaccacguucaaaagaaagcauuuccgcccaacaccagaugcaugucgagcugcuuacaacuggaagcuggccggugaccccagauaugaagaaucucugcacaauccguacccugacuaccacuggcuucgaacagucaaaaccacaaaggagucccucgucaucauauccccaaguguagcggaccuggacccauacgacaaaucccuucauucgagggucuuuccuagcgggaagugcuugggaauaacaauaucaucuacuuacugcucuacuaaccaugauuacacaaucuggaugcccgagaauccgagacuggggacaucuugugacaucuuuaccaacaguagagggaagagagcauccaaagggagcaaaacuugcggauuuguugaugaaagaggcuuguauaagucuuugaaaggggcaugcaaacucaaguuauguggaguucuuggccucagacuuauggauggaacguggguugcgaugcaaacaucggacgaaaccaagugguguccuccugaucaguugguaaaucuacacgacuuucgcucggacgagauugagcaucuuguuguggaggaguuggucaagaaaagagaggagugucuggaugcacuagaguccaucaugacuaccaagucggugaguuucagacgucucagccaucugagaaaacuugucccuggguucggaaaagcauacaccauauucaacaaaaccuugauggaagcagaugcucauuacaagucaauccgaaccuggaaugagaucauccccuccaaaggguguuugagagugggagggaggugucauccucacgugaaugggguguuuuuuaacgguauaauacuggguccugacggccauguucuaaucccagagaugcaaucaucccuccuucagcagcauauggaguuguuggaauccucaguuaucccccugaugcacccuuuggcagacccaucuacaguuuuuaaggacggugaugaagcagaggauuuuguugagguucaccuucccgacgugcacaaacaaauuucagguguugaccugggucuccccagcuggggaaaguauguuuuggugagugcaggggucuuggucguccugauguugacaauuuucauaaugacauguugcggaagaguccaucgacccaagucuaugcaacacagucucggagggaccgggaggaaggugucggucacuucccaaagcgggaaggucauaucuucaugggagucauauaagaguggaggugagaccagacuguga

SEQ ID NO: 63136 - RNA, 1575 nt, Artificial Sequence
  derived and/or modified CDS sequence (wt) from glycoprotein__RABV__HE801612.1
augguuccucagguucuuuuguuuguaccccuucuuguuuucucaauguguuucgggaaauucccuaucuauacaauaccagacaagcuuggucccuggagcccgaucgacauacaucaucucagcuguccaaacaaccugguuguugaagaugaaggauguaccaacuugucggguuucuccuacauggaacuuaaggugggauacaucucggccauaaaaguaaacggauuuacgugcacagguguggugacagaggcagaaacuuacacuaacuuugucgguuaugucaccaccacguucaaaagaaagcauuuccgcccaacaccagaugcaugucgagcugcuuacaacuggaagcuggccggugaccccagauaugaagagucucugcacaauccguacccugacuaccacuggcuucgaaccgucaaaaccacaaaggagucccucgucaucauauccccaaguguagcggaccuggacccauacgacaaaucccuucauucgagggucuuuccuagcgggaagugcuugggaauaacaauaucaucuacuuacugcucuacuaaccaugauuacacaaucuggaugcccgagaauccgagacuggggacaucuugugacaucuuuaccaacaguagagggaagagagcauccaaagggagcaaaacuugcggauuuguugaugaaagaggcuuguauaagucuuugaaaggggcaugcaaacucaaguuauguggaguucuuggccuuagacuuauggauggaacguggguugcgaugcaaacaucggacgagaccaagugguguccuccugaucaguuaguaaaucuacacgacuuucgcucagacgagauugaacaucuugucguggaggaguuggucaagaaaagagaggagugucuggaugcacuagaguccaucaugacuaccaagucggugaguuucagacgucucagccaucugagaaaacuugucccuggguucggaaaagcauacaccauauucaacaaaaccuugauggaagcagaugcucauuacaagucaguccgaaccuggaaugagaucauccccuccaaaggguguuugagagugggagggaggugucauccucacgugaaugggguguuuuuuaacgguauaauacuggguccugacggccauguucuaaucccagagaugcaaucaucccuccuucagcagcauauggaguuguuggaauccucaguuaucccccugaugcacccuuuagcagacccaucuacaguuuuuaaggacggugaugaagcagaggauuuuguugagguucaccuucccgacguacacaaacaaauuucagguguugaccugggucuccccagcuggggaaaguauguuuuggugagugcaggggucuugguuguccugauguugacaauuuucauaaugacauguugcggaagaguccaucgacccaagucuacgcaacacagucucggagggaccgggaggaaggugucggucacuucccaaagcgggaaggucauaucuucaugggagucauauaagaguggaggugagaccagacuguga

SEQ ID NO: 63137 - RNA, 1575 nt, Artificial Sequence
  derived and/or modified CDS sequence (wt) from glycoprotein__RABV__HE801613.1
augguuccucagguucuuuuguuuguaccccuucuuguuuucucaauguguuucgggaaauucccuaucuauacaauaccagacaaacuuggucccuggagcccgaucgacauacaucaccucagcuguccaaacaaucugguuguggaagaugaaggauguaccaacuugucggguuucuccuacauggaacuuaaggugggauacaucucggccauaaaaguaaauggauucacgugcacagguguggugacagaggcagagacuuacacuaacuuugucgguuaugucaccaccacguucaaaagaaagcauuuccgcccaacaccagaugcaugucgagcugcuuacaacuggaagcuggccggugaccccagauaugaagaaucucugcacaauccguacccugacuaccacuggcuucgaaccgucaaaaccacaaaggagucccucgucaucauauccccaaguguagcggaccuggacccauacgacaaaucccuucauucgaaggucuuuccuagcgggaagugcuugggaauaacuauaucaucuacuuacugcucuacuaaccaugauuacacaaucuggaugcccgagaauccgagacuggggacaucuugugacaucuuuaccaacaguagagggaagagagcauccaaagggagcaaaacuugcggauuuguugaugaaagaggcuuguacaagucuuugaaaggagcaugcaaacucaaguuauguggaguucuuggccuuagacuuauggauggaacguggguugcgaugcaaacaucggacgaaaccaagugguguccuccugaucaguugguaaaucuacacgacuuucgcucggacgagauugaacaucuuguuguagaggaguuggucaagaaaagagaggagugucuggaugcacuagaguccaucaugacuaccaagucggugaguuucagacgucucagccaucugagaaaacuugucccuggguucggaaaggcauauaccauauucaacaaaaccuugauggaagcagaugcucauuacaagucaguccgaaccuggaaugagaucauccccuccaaaggguguuugagagugggagggaggugucauccucacgugaaugggguguuuuuuaacgguauaauacuggguccugacggccauguucugaucccagagaugcaaucaucccuccuucagcagcauauggaguuguuggaauccucaguuaucccccugaugcacccuuuagcagacccaucuacaguuuuuaaggacggugaugaagcagaggauuuuguugagguucaccuucccgacgugcacaaacaaauuucagguguugaccugggucuccccagcuggggaaaguauguuuuggugagugcaggggucuugguuguccugauguuggcaauuuucauaaugacauguugcggaagaguccaucaacccaagucuacgcaacacagucucggagggaccgggaggaaggugucggucacuucccaaagcgggaaggucauaucuucaugggagucauauaagaguggaggugagaccagacuguga

SEQ ID NO: 63138 - RNA, 1575 nt, Artificial Sequence
  derived and/or modified CDS sequence (wt) from glycoprotein__RABV__HE801614.1
augguuccucagguucuuuuguuuguaccccuucugguuuucucaauguguuucgggaaauucccuaucuauacaauaccagacaaacuugguccuuggagcccgaucgacauacaucaucucagcuguccaaacaaccuaguuguggaagaugaaggaugcaccaacuugucagguuucuccuacauggaacuuaaggugggauacaucucggccauaaaaguaaacggauucacgugcacagguguggugacagaggcagagacuuacacuaacuuugucgguuauguuaccaccacguucaaaagaaagcauuuccgcccaacaccagaugcaugucgagcugcuuacaacuggaagauggccggugaccccagauaugaagaaucucugcacaauccguacccggacuaccacuggcucagaaccgucaaaaccacaaaggagucccucgucauuauauccccaaguguagcggaucuggacccauaugacaaaucccuucauucgagggucuuccccagcgggaagugcuugggaauaacaauaucaucuacuuacugcuccacuaaccaugauuacacaaucuggaugcccgagaauccgagacuggggacaucuugugacaucuuuaccaacaguagagggaagagagcauccaaagggagcaaaacuugcggauuuguugaugaaagaggcuuguauaagucuuugaaaggggcgugcaaacucaaguuauguggaguucuuggccuuagacuuauggauggaacguggguugcgaugcaaacaucagacgaaaccaagugguguccuccugaucaguuggugaaucuacacgauuuucgcucggacgagauugaacaucuugucguggaggaguuggucaagaaaagagaggagugucuggaugcacuagaguccaucaugaccaccaagucggugaguuucagacgucucagccacuugagaaagcuugucccuggguucggaaaagcauacaccauauucaacaaaaccuugauggaagcagaugcucauuacaagucaguccgaaccuggaaugagaucauccccuccaaaggguguuugagaguuggagggaggugucauccucacgugaaugggguguuuuuuaacgguauaauacuggguccugacggccauguucuaaucccagagaugcaaucgucccuccuucagcagcauauggaguuguuggaguccucaguuaucccccugaugcacccuuuagcagacccguccacaguuuucaaagacggugaugaagcagaggauuuuguugagguucaccuucccgacgugcacaaacaaauuucaggugucgaccugggucuccccagcuggggaaaguauguuuuggugagugcagggguccugguuguccugauguugacaauuuucauaaugacauguugcgggagaguccgucgacccaagucuacacaacacagucucggagggaccgggaggaaggugucggucacuucucaaagcgggaaggucauaucuuccugggagucauauaagaguggaggugagaccagacuguga

SEQ ID NO: 63139 - RNA, 1575 nt, Artificial Sequence
  derived and/or modified CDS sequence (wt) from glycoprotein__RABV__HE801615.1
augguuccucagguucuuuuguuuguaccccuucuuguuuucucaauguguuucgggaaauucccuaucuauacaauaccagacaaacuuggucccuggagcccgaucgacauacaucaucucagcuguccaaacaaucugguuguggaagaugaaggauguaccaacuugucggguuucuccuacauggaacuuaaggugggauacaucucggccauaaaaguaaacggauucacgugcacagguguggugacagaggcagagacuuacacuaacuuugucgguuaugucaccaccacguucaagagaaagcauuuccgcccaacaccagaugcaugucgaacugcuuacaacuggaagcuggccggugaccccagauaugaagaaucucugcacaauccguacccugacuaccacuggcuucgaaccgucaaaaccacaaaggagucccucgucaucauuuccccaaguguagcggaccuggacccauacgacaaaucccuucauucgagggucuuuccuagcgggaagugcuugggaaucacaauaucaucuacuuacugcucuacuaaccaugauuacacaaucuggaugcccgagaauccgagacuggggacaucuugugacaucuuuaccaacaguagagggaagagagcauccaaagggagcaaaacuugcggauuuguugaugaaagaggcuuguacaagucuuugaaaggggcaugcaaacucaaguuauguggaguucuuggccuuagacucauggauggaacguggguugcgaugcaaacaucagacgaaaccaagugguguccuccugaucaguugguaaaucuacacgacuuucgcucggacgagauugaacaucuuguuguggaggaguuggucaagaaaagagaggagugucuggaugcacuagaguccaucaugacuaccaagucggugaguuucagacgucuuagccaucuaagaaaacuugucccuggguucggaaaagcauauaccauauucaacaaaaccuugauggaagcagaugcucauuacaagucaguccgaaccuggaaugagaucauccccuccaaaggguguuugagagugggagggaggugucaucaucacgugaaugggguguuuuuuaacgguauaauacuggguccugacggccauguucuaaucccagagaugcaaucaucccuccuucagcagcauauggaguuguuggaauccucaguuaucccccugaugcacccuuuagcagacccaucuacaguuuuuaaggacggugaugaagcagaggauuuuguugagguucaccuucccgacgugcacaaacaaauuucagguguugaccugggucuccccagcuggggaaaguauguuuuggugagugcaggagucuugguuguccugauguugacaauuuucauaaugacauguugcggaagaguccaucgacccaagucuacgcaacacagucucggagggaccgggaggaaggugucggucacuucccaaagcgggaaggucauaucuucaugggagucauacaagaguggaggugagaccagacuguga

SEQ ID NO: 63140 - RNA, 1575 nt, Artificial Sequence
  derived and/or modified CDS sequence (wt) from glycoprotein__RABV__HE801616.1
augguuccucagguucuuuuguuuguaccccuucugguuuucucaauguguuucgggaaauucccuaucuauacaauaccagacaaacuugguccuuggagcccgaucgacauacaucaucucagcuguccaaacaaccuaguuguggaagaugaaggaugcaccaacuugucagguuucuccuacauggaacuuaaggugggauacaucucggccauaaaaguaaacggauucacgugcacagguguggugacagaggcagagacuuacacuaacuuugucgguuauguuaccaccacguucaaaagaaagcauuuccgcccaacaccagaugcaugucgagcugcuuacaacuggaagauggccggugaccccagauaugaagaaucucugcacaauccguacccggacuaccacuggcucagaaccgucaaaaccacaaaggagucccucgucauuauauccccaaguguagcggaucuggacccauaugacaaaucccuucauucgagggucuuccccagcgggaagugcuugggaauaacaauaucaucuacuuacugcuccacuaaccaugauuacacaaucuggaugcccgagaauccgagacuggggacaucuugugacaucuuuaccaacaguagagggaagagagcauccaaagggagcaaaacuugcggauuuguugaugaaagaggcuuguauaagucuuugaaaggggcgugcaaacucaaguuauguggaguucuuggccuuagacuuauggauggaacguggguugcgaugcaaacaucagacgaaaccaagugguguccuccugaucaguuggugaaucuacacgauuuucgcucggacgagauugaacaucuugucguggaggaguuggucaagaaaagagaggagugucuggaugcacuagagcccaucaugaccaccaagucggugaguuucagacgucucagccacuugagaaagcuugucccuggguucggaaaagcauacaccauauucaacaaaaccuugauggaagcagaugcucauuacaagucaguccgaaccuggaaugagaucauccccuccaaaggguguuugagagucggagggaggugucauccucacgugaaugggguguuuuuuaacgguauaauacuggguccugacggccauguucuaaucccagagaugcaaucgucccuccuucagcagcauauggaguuguuggaguccucaguuaucccccugaugcacccuuuagcagacccguccacaguuuucaaagacggugaugaagcagaggauuuuguugagguucaccuucccgacgugcacaaacaaauuucaggugucgaccugggucuccccagcuggggaaaguauguuuuggugagugcagggguccugguuguccugauguugacaauuuucauaaugacauguugcgggagaguccgucgacccaagucuacacaacacagucucggagggaccgggaggaaggugucggucacuucucaaagcgggaaggucauaucuuccugggagucauauaagaguggaggugagaccagacuguga

SEQ ID NO: 63141 - RNA, 1575 nt, Artificial Sequence
  derived and/or modified CDS sequence (wt) from glycoprotein__RABV__HE801617.1
augguuccucagguucuuuuguuuguaccccuucugguuuucucaauguguuuugggaaauuccccaucuauacaauaccagacaaacuuggucccuggagcccgaucgacauacaucaucucagcuguccaaacaaucugguuguggaagaugaaggaugcaccaacuugucggguuucuccuacauggaacuuaagguaggauacaucucugccauaaaaguaaacggauucacgugcacagguguggugacagaggcagagacuuacacuaacuuugucgguuauguuaccaccacguucaaaagaaagcauuuccgcccaacaccagaugcauguagagcugcuuacaacuggaagauggccggugaccccagauaugaagaaucucugcacaauccguacccugacuaccacuggcuucgaaccgucaaaaccacaaaggagucccucgucaucauauccccaaguguagcggaccuggacccauacgacaagucccuucacucgagggucuuuccuagcgggaagugcuugggaauaacgauaucaucuacuuacugcucuacuaaccaugauuacacaaucuggaugcccgagaauccgagacuggggacaucuugugacaucuuugcuaacaguagagggaagagagcauccaaagggagcaaaacuugcggauuuguugaugaaagaggcuuguauaaguccuugaaaggggcaugcaaacucaaguuauguggaguucuuggccuuagacuuauggauggaacauggguugcgaugcaaacaucggacgaaaccaagugguguccuccugaucagcugguaaaucuacacgacuuucgcucagacgagauugaacaucuuguuguggaggaguuggucaagaaaagagaggagugucuggaugcacuagaguccaucaugacuaccaagucggugaguuucagacgucucagccauuugagaaaacuugucccuggguucggaaaagcauacaccauauucaacaaaaccuugauggaagcagaugcucauuacaagucaguccgaaccuggaaugagaucauccccuccaaagggugucugagaguuggagggaggugucauccucacgugaaugggguguuuuuuaacgguauaauacuggguccugacggccauguucuaaucccagagaugcaaucaucccuccuucagcagcauauggaguuguuggaauccucagugaucccccugaugcauccucuagcagacccgucuacaguuuucaaggacggugaugaagcagaggauuuuguugagguucaccuucccgacgugcacaaacaaauuucagguguugaccugggucuccccagcuggggaaaguauguuuuggugagugcaggggucuugguuguccugauguugacaauuuucauaauaacauguugcggaagaguccaucgacccaagucuauacaacacagucucggagggaccgggaggaaggugucggucacuucccaaagcgggaaggucauaucuucaugggagucauauaagaguggaggugagaccagacuguga

SEQ ID NO: 63142 - RNA, 1575 nt, Artificial Sequence
  derived and/or modified CDS sequence (wt) from glycoprotein__RABV__HE802675.1
augguuccucagguucuuuuguuuguaccccuucugguuuucucaauguguuucgggaaauuuccuaucuauacgauaccagacaaacuuggucccuggagcccgauugacauacaucaucucagcuguccaaacaaccugguuguggaggaugaaggaugcacuaacuugucggguuucuccuacauggagcuuaaggugggauacaucucggccauaaagguaaacggguucacuugcacagguguggugacagaggcagagacuuacacuaacuuugucgguuauguuaccaccacguucaaaagaaagcauuuccguccaacaccagaugcaugucgagcugcuuacaacuggaagauggccggugaccccagauaugaagaaucgcugcacaauccguacccugacuaccacuggcuucgaaccguuaaaaccacaaaggagucccucgucaucauauccccaaguguagcggaccuggacccauacgacaaaucccuucauucgagggucuuuccuagcgggaagugcucgggaauaacaauaucaucuacuuacugcucuacuaaccaugauuacacaaucuggaugcccgagaauccaagacuggggacaucuugugacaucuuuaccaacaguagagggaagagagcauccaaggggggcaaaacuugcggauuuguugaugaaagaggcuuguauaagucuuugaagggggcaugcaaacucaaguuguguggaguucuuggccuuagacuuauggauggaacguggguugcgaugcaaacaucggacgaaaccaagugguguccuccugaucaguugguaaaucuacacgacuuucgcucggacgagaucgaacaucuuguuguggaggaguuggucaagaaaagagaggagugucuggaugcacuagaguccaucaugacuaccaagucggugaguuucagacgucucagccacuugagaaaacuugucccuggguucggaaaagcauacaccauauucaacaaaaccuugauggaagcagaugcccauuacaagucaguccgaaccuggaaugaaaucauccccuccaaaggguguuugagaguuggagggaggugucauccucaugugaaggggguguuuuuuaacgguauaauacuggguccugacggccauguucuaaucccagagaugcaaucaucccuccuucagcagcauauggaguuguuggaauccucaguuaucccccugaugcacccuuuagcagacccgucuacaguuuucaaggacggugaugaagcagaggauuuuguugagguucaccuucccgacgugcacaaacaaaucucagguguugaccugggucuccccagcuggggaaaguauguuuuggugagugcaggggucuugguuguucugauguugacaauuuucauaauaacauguugcggaagaauccaucgacccaagucuacacaacacggucucggggggacagggaggaaggugucggucacuucccaaagcgggaaggucauaucuucaugggagucauauaagagugggggugaaaccagacuguga

SEQ ID NO: 63143 - RNA, 1575 nt, Artificial Sequence
  derived and/or modified CDS sequence (wt) from glycoprotein__RABV__HM535790.1
augguuccucagguucuuuuguuuguacuccuucuggguuuuucguuguguuucgggaaguuccccauuuacacgauaccagacgaacuuggucccuggagcccuauugacauacaccaucucagcuguccaaauaaccugguuguggaggaugaaggauguaccaaccuguccgaguucuccuacauggaacucaaagugggauacaucucagccaucaaagugaacggguucacuugcacagguguugugacagaggcagagaccuacaccaacuuuguugguuaugucacaaccacauucaagagaaagcauuuccgccccaccccagacgcauguagagccgcguauaacuggaagauggccggugaccccagauaugaagagucccuacacaauccauaccccgacuaccacuggcuucgaacuguaagaaccaccaaagagucccucauuaucauauccccaagugugacagauuuggacccauaugacaaaucccuucacucaagggucuucccuggcggaaagugcucaggaauaacgguguccucuaccuacugcucaacuaaccaugauuacaccauuuggaugcccgagaauccgagaccaaggacaccuugugacauuuuuaccaauagcagagggaagagagcauccaacgggaacaagacuugcggcuuuguggaugaaagaggccuguauaagucucuaaaaggagcaugcaggcucaaguuauguggaguucuuggacuuagacuuauggauggaacaugggucgcgaugcaaacaucagaugagaccaaauggugcccuccagaucaguuggugaauuugcacgacuuucgcucagacgagauugagcaucucguuguggaggaguuagucaagaaaagagaggaaugucuggaugcauuagaguccaucaugaccaccaagucaguaaguuucagacgucucagucaccugagaaaacuugucccaggguuuggaaaagcauauaccauauucaacaaaaccuugauggaggcugaugcucacuacaagucaguccggaccuggaaugagaucauccccucaaaaggguguuugaaaguuggaggaaggugccauccucaugugaacgggguguuuuucaaugguauaauauuagggccugacgaccauguccuaaucccagagaugcaaucaucccuccuccagcaacauauggaguuguuggaaucuucaguuaucccccugaugcacccccuggcagacccuucuacaguuuucaaagaaggugaugaggcugaggauuuuguugaaguucaccuccccgauguguacaaacagaucucagggguugaccugggucucccgaacuggggaaaguauguauugaugacugcaggggccaugauuggccugguguugauauuuucccuaaugacauggugcagaagagccaaucgaccagaaucgaaacaacgcaguuuuggagggacaggggggaaugugucagucacuucccaaagcggaaaagucauaccuucaugggaaucauauaagaguggaggugagaucagacuguga

SEQ ID NO: 63144 - RNA, 1575 nt, Artificial Sequence
  derived and/or modified CDS sequence (wt) from glycoprotein__RABV__HQ166186.1
augauuccucaggcucuuuuguuuguaccccuuuugguuuucucaucgugcuucgggaaauuccccaucuacacgauaccagacaaacucggcccuuggaguccuauugacauacaucaucucaguugcccuaacaauuuaguuguggaggaugaggggugcaccaaccugucaggauucuccuacauggaacucaaagugggguacauuucagccauaaaagugaacggguucacuugcacggguguggugacagaagcagagaccuacacaaacuuugucggcuacgucaccaccacauuuaagagaaagcacuuccgcccgacaccugacgccugcagagcagcauauaacuggaagauggcaggugaccccagauaugaggaaucucugcauaauccguaucccgauuaucacuggcuccggacuguaaaaaccaccaaggagucucuuguuaucauaucuccgagugugucggacuuagacccguacgauaaaucucuucauuccagaguuuuucccagcgguaaaugcucaggaauaacaguaucuucuaccuauugucccacuaaccaugacuauacuaucuggaugccggaaaauccgagacuagggaccucuugugacauuuucaccaauagcagagggaagagagcauccaaagggggcaagaccuguggauuuguggacgaaagaggcuuguacaagucucuaaaaggggcaugcaaauugaaacuauguggaguucuuggacuuagacuuauggacggaacauggguugcgauucaaacaucugaugaggccaaauggugcccuccugaucaguuagugaauauacaugauuuucgcucggaugagauugaacaucuuguuguggaagaguuaguaaagaaaagagaagagugucuagaugcacuggagucuaucaugaccaccaaguccguaaguuucagacgccucagucacuugaggaagcucguccccggguuugggaaagcauauaccauauucaacaaaaccuugauggaggcugaugcucacuacaaaucaguccguacauggaaugagaucauccccucuaagggauguuuaagaguuggggggagaugucacccccaugugaacgggguguuuuucaaugguaucauccuggguccugauggacauguucuaaucccagagaugcagucaucucuccuucaacagcauauggaguuguuggaauccucgguaaucccgcuaaugcaucccuuggcagaucccucaacgguuuuuaaggacggugacgaggcggaagauuuugucgagguucaccuuccggauguccacaagcaggucucgggaguugaucucggucucccaagcugggggaaguaugugcugaugaguguaggcgcuaugauugcacugauguugaugauuuuccugaugacguguugcagaaaagcuaacggagcagaaacaauacaacaccgucucggagagacgggaaggaaagugucugucaccucccaaagcgggagggucauaucuuccugggagucguauaagagcgggggugagaccaagcuguag

SEQ ID NO: 63145 - RNA, 1575 nt, Artificial Sequence
  derived and/or modified CDS sequence (wt) from glycoprotein__RABV__HQ232301.1
augauuccucaggcucuuuuguuuguacccuuuuugguuuucccauuguguuucgggaaguuccccaucuacacaauaccagacaaacuuggcccuuggaguccuauugauauacaucaucucaguugcccuaacaaucuaguuguggaggaugaggggugcaccaaccugucaggauucuccuacauggaacucaaaguaggguacauuucagccauaaaagugaacggguucacuugcacggguguggugacagaagcagagaccuacacaaacuuuguuggcuaugucaccaccacguuuaagagaaagcacuuccgcccgacaccagaugcaugcagagcagcauauaacuggaagauggcaggugaccccagauaugaggaaucucuccauaauccguaucccgauuaucacuggcuccggacuguaaagaccaccaaggagucucuuguuaucauaucuccaagugugucggacuuagacccguacgauaaaucucuucacuccagaguuuuucccagcgguaaaugcucgggaauaacagugucuucuaccuauugucccacuagccaugauuauaccaucuggaugccugaaaauccgagacuagggaccucuugugacauuuucaucaauagcagagggaagagagcauccaaagggagcaagaccuguggauuuguggacgaaagaggcuuguacaagucucuaaaaggagcaugcaaauugaagcuauguggaguucuuggacuuagacucauggacggaacaugggcugcgauucaaacaucugaugaggccaaauggugcccuccugaucaguuagugaauauacaugauuuucacucggaugagaucgaacaucuuguuguggaggaguuaguaaagaaaagggaagagugucuagaugcacuggagucuaucaugaccaccaaguccguaaguuucagacgccucagucacuugagaaaacucguccccggguuuggaaaagcauauaccauauucaacaaaaccuugauggaggcugaugcucacuacaaaucaguccggacauggaaugagaucauccccucuaaaggguguuuaagaguuggggggagaugucacccccaugugaacgggguguuuuucaaugguaucaucuuggguccugauggacauguucuaaucccagagaugcagucgucucuucuucagcagcauauggaguuguuggaauccucgguaaucccgcuaaugcaucccuuggcggaucccucaacaguuuuuaaggacggugacgaggcggaagauuuuguugagguucaccuuccggauguccacaagcaggucucgggaguugaucucggucucccaagcugggggaaguaugugcugaugaguguaggcgcucugauugcacugauguugaugauuuucuugaugacguguugcagaaaagcuaauggaguagaaucaaugcaacaccgucucggagagacgggaaggaaagugucugucaccucccaaagcgggagggucauaucuuccugggagucauacaaaagcgggggugagaccaagcuguaa

SEQ ID NO: 63146 - RNA, 1575 nt, Artificial Sequence
  derived and/or modified CDS sequence (wt) from glycoprotein__RABV__HQ266618.1
augguuccucaggcucuuuuguuuguaccccuuuugguuuuuucauuguguuucgggaaauucccuaucuacacgauaccagacaaacuuggacccuggagcccgauugacauacaucaucucagcugcccaaacaauuugguuguggaggacgaaggaugcaccaaccugucaggguucuccuacauggaacuuaaagucggauacaucucagccauaaaggugaacggguucacuugcacaggcguugugacagaggcugaaaccuacacuaacuuuguagguuaugucaccaccacguucaaaagaaagcauuuccgcccacuaccagaugcauguagagccgcauacaacuggaagauggccggugaccccagauaugaagagucucuacacaauccguacccugauuaccacuggcuucgaaccguaaaaaccaccaaggagucucucguuaucauauccccaaguguggcggauuuggacccauaugacaaaucccuucacucaagggucuucccuagcgggaagugcucaggaauaacggugucuucuaccuucugcucaacuaaccaugauuacaccauuuggaugccugaaaauccgagacuggggacgucuugcgacauuuucgccaauaguagagggaagagagcaucuaaaggggguaagaccugcggcuuuguagaugaaagaggccuguauaagucucuaaagggagcaugcaaacucaaguuauguggaguucuuggacuuagacucauggauggaacaugggucgcgaugcaaacaucagaugagaccaaaugguguccuccugaucaguuggugaauaugcacgacuuucgcucggaugaaauugagcaucuuguuguagaggaguuaguuaagaaaagagaggagugucuggaugcacuagaguccaucaugaccaccaagucagugaguuucagacgucucagucauuuaagaaaacuugucccuggguucggaaaagcauacaccauauucaacaagaccuugauggaggcugaugcucacuacaagucaguccggacuuggaaugagaucauccccucaaaaggguguuuaagaguuggagggaggugucauccccauguaaacgggguguuuuucaaugguauaauauuagggccugacggccauguucugauccccgagaugcaaucaucccuccuucagcaacauauggaguuguuggaauccucaguuauuccccugaugcacccucuggcagacccguccacaguuuucaaggauggugaugaggcugaggauuuuguagagguucaccuuccugaugugcacaaacaagucucagggguugaccugggucucccgaacugggggaaauauguauuauugagugcagggacccugauugccuugauguugauaauuuuucuaaugacauguuguaaaagagucaaucaaccagagucuacgaaacgcagucucggagggacagggaggaaggugucggucacuucccaaagcgggaaggucauaucuucaugggagucuuauaaaagugggggugagacuagacuguaa

SEQ ID NO: 63147 - RNA, 1575 nt, Artificial Sequence
  derived and/or modified CDS sequence (wt) from glycoprotein__RABV__HQ266620.1
augguuccucaggcucuuuuguuuuuaccccuucugguuuuuccauuguguuucgggagauucccuaucuacacgauaccagacaaacuuggacccuggagcccgauugacauacaucaucucagcugcccaaacaauuugguuguggaggacgaaggaugcaccaaccugucaggguucuccuacauggaacucaaaguuggauacaucucagccauaaaggugaacggauucacuugcacaggcguugugacugaggcugaaaccuacacuaacuuuguagguuaugucaccaccacguucaaaagaaagcauuuccgcccaauaccagacgcauguagagccgcauacaauuggaagauggccggugaccccagauaugaagagucucuacacaauccguacccugacuaccacuggcuucgaacuguaaaaaccaccaaggagucucucguuaucauauccccaaguguggcggauuuggacccauaugacaaaucucuucacucgagggucuuccccagcgggaagugcucaggaauaacggugucuucuaccuucugcucaacuaaccacgauuacaccauuuggaugccugaaaauccgagacuggggacgucuugcgacauuuucgccaauaguagagggaagagagcaucuaaaggggguaagaccugcggcuuuguagaugaaagaggccuguauaagucucuaaagggagcaugcaaacucaaguuauguggaguucucggacuuagacucauggauggaacaugggucgcgaugcaaacaucagaugagaccaaauggugucccccugaccaguugguaaauauacacgacuuucgcucggaugaaauugagcaucuuguuguggaggaguuaguuaagaaaagagaggagugucuggaugcacuagaguccaucaugaccaccaagucagugaguuucagacgucucagucacuugagaaaacuugucccuggguucggaaaagcauacaccauauucaacaagaccuugauggaggcugaugcucacuacaagucgguccggacuuggaaugagaucauccccucaaaaggguguuuaagaguuggagggaggugucauccccauguaaacgggguguucuucaaugguauaauauuagggcccgacggccauguucugauccccgagaugcaaucaucccuccuucagcaacauauggaguuauuggaauccucaguuauuccccugaugcacccucuggcagacccguccacaguuuucaaggacggugaugaggcugaggauuuuguagagguucaccuuccugaugugcacaaacaggucucggggguugaccuaggucucccgaacugggggaaauauauauuacugagugcagggacccugauugccuugauguugauaauuuuucuaaugacauguuguagaagagucaaucgaccagagucuacugaacgcagucucggagggacagggaggaaggugucggucacuucccaaagcggaaaggucauaucuucaugggagucauauaaaaguggaggugagacuagauuguaa

SEQ ID NO: 63148 - RNA, 1575 nt, Artificial Sequence
  derived and/or modified CDS sequence (wt) from glycoprotein__RABV__HQ266621.1
augguuccucaggcucuucuguuuguaccccuuuuggguuuuucauuguguuucgggaaauucccuaucuacacgauaccagacaaacuuggacccuggagcccgauugacauacaucaucucagcugcccaaacaauuugguuguggaggacgaaggaugcaccaaccugucaggguucuccuacauggagcuuaaaguuggauacaucucagccauaaaggugaacggguucacuugcacaggcguugugacagaggcugaaaccuacacuaacuuuguagguuaugucaccaccacguucaaaagaaagcauuuccgcccaauaccagaugcauguagagccgcauacaacuggaaaguggccggugaccccagauaugaagagucucuacacaauccguacccugacuaccauuggcuucgaacuguaaaaaccaccaaggagucucucguuaucauauccccaaguguggcggauuuggacccauaugacaaaucccuucacucgagggucuucccuagcgggaagugcuccggaauaacggugucuucuaccuacugcucaacuaaccacgauuacacaauuuggaugccugagaauccgagacuagggacgucuugcgacauuuucgccaauaguagagggaagagagcuuccaaaggggguaagaccugcggcuuuguagaugaaagaggccuguauaagucucuaaagggagcaugcaaacucaaguuauguggaguucuuggacuuagacucauggauggaacaugggucgcuaugcaaacaucagaugagaccaaaugguguccuccugaucaguuggugaauaugcacgacuuucgcucggaugaaauugagcaucuuguuguagaggaguuggucaagaaaagagaggagugucuggaugcacuagaguccaucaugaccaccaagucagugaguuucagacgucucagucauuuaagaaaacuugucccuggguuuggaaaagcauacaccaucuucaacaagaccuuaauggaggcugaugcucacuacaagucaguccggacuuggaaugagaucauccccucaaaaggguguuugagaguuggagggaggugucauccccauguaaacgggguguuuuucaaugguauaauauuagggcccgacggccauguucuaauccccgagaugcaaucaucccuccuucagcaacauauggaguuacuggaauccucaguuauuccccugaugcacccccuggcagacccguccacaguuuucaaggauggugaugaggcugaggauuuuguagagguucaucuuccugaugugcacaaacaggucucagggguugaccugggucucccgaacugggggaaauauguauuacugagugcagggacccugauugccuugauguugauaauuuuucuaaugacauguuguagaagagucaaucgaccagaaucuacgcaacgcagucucggagggacagggaggaaggugucggucacuucccaaagcgggaaggucauaucuucaugggagucauauaaaagugggggugagacuagacuguaa

SEQ ID NO: 63149 - RNA, 1575 nt, Artificial Sequence
  derived and/or modified CDS sequence (wt) from glycoprotein__RABV__HQ266622.1
augguuccucaggcucuuuuguuuauaccccuucuggguuuuucauugugcuucgggaaauucccuaucuacacgauaccagacaaacuuggacccuggagcccgauugacauacaucaucucagcugcccaaacaauuugguuguggaggacgaaggaugcaccaaccugucaggguucuccuacauggaacuuaaaguuggauacaucucugccauaagggugaccggguucacuugcacaggcguugugacagaggcugaaaccuacacuaacuuuguagguuaugucaccaccacguucaaaagaaagcauuuccgcccaacaccagaugcauguagagccgcauacaacuggaagauggccggugaccccagauaugaagagucucuacacaauccguaccccgacuaccacuggcuucggacuguaaaaaccaccaaggagucucucguuaucauauccccaaguguggcggauuuggacccauaugacaaaucccuucacucgagggucuucccuagcgggaagugcucaggaauaacggugucuucuaccuacugcucaacuaaccacgauuacaccauuuggaugccugagaauccgagacuagggacgucuugcgacauuuucgccaauaguagagggaagagagcaucuaaaggggguaagaccugcggcuuuguagaugaaagaggccuguacaagucucuaaagggagcaugcaaacucaaguuauguggaguucuuggacuuagacucauggauggaacauggguugcgaugcaaacuucagaugagaccaaauggugcccuccugaucaguuggugaauaugcacgacuuucgcucggaugaaauugagcaucuuguuguagaggaguuggucaagaaaagagaggagugucuggaugcacuagaguccaucaugaccaccaagucagugaguuucagacgccucagucauuuaagaaaacuugucccuggguucggaaaagcauacaccauauucaacaagaccuugauggaggcugaugcucacuacaagucaguccggacuuggaaugagaucauccccucaaaaggguguuugagaguuggagggaggugucauccccauguaaacgggguguuuuucaaugguauaauauuagggccugacggccauguucugauccccgagaugcaaucaucccuccuucagcaacauauggaguuauuggaauccucaguuauuccccugaugcacccccuggcagacccguccgcaguuuucaaggauggugaugaggcugaggauuuuguagagguucaccuucccgaugugcacaaacaggucucagggguugaccugggucucccgaacugggggaaauauguauuacugagugcagggacucugguugccuugauguugauaauuuuucuaaugacauguuguagaagagucaaucgaccagaaucuacgcaaugcagucucggagggacagggaggaaggggucggucacuucccaaagcgggaaggucauaucuucaugggagucauauaaaagugggggugagacuagauuguag

SEQ ID NO: 63150 - RNA, 1575 nt, Artificial Sequence
  derived and/or modified CDS sequence (wt) from glycoprotein__RABV__HQ317918.1
augauuccucaagcucuguuguuuguaccucuucugguuuuuccauuguguuucgggaaauuccccauuuacacgauaccagacaaacucggccccuggagucccaucgauauacaucaccucagcuguccgaacaaucugguuguggaggacgaaggauguaccaaucugucaggauucucauacauggagcuuaaaguaggauauauuucggccauaaaggugaacggguucacuuguacgggugugguaacggaagcagaaaccuacacuaacuuugucgguuaugucaccaccacguuuaagagaaagcacuuccgaccaacaccggaugcaugcagaucagcauacaauuggaagauggcaggugaccccagauaugaagagucucugcacaaucccuauccugauuaucauuggcuccggacuguaaaaaccaccaaagagucuguuguuaucauaucuccaaguguggcagacuuagacccguacgauaaaucacuucauucgagaguuuuuccuagaggaaaaugcucaggaauaacggugucuucugccuacugcucuaccaaccaugauuauaccaucuggaugccugaaaauccuagacuggggaccucuugugauauuuucaccaacagcagagggaagagagcauccaaagggagcaagaccuguggauuuguggaugagagaggcuuguacaaaucucuaaaaggagcaugcaaacugaagcuguguggaguucuuggacuuaggcuuauggacggaacaugggucgcgauucagacaucaaacgagaccaaguggugcccuccugaucaacuagugaaucuacaugacuuucauucagaugagauugaacaucuuguuguggaggaguugguuaagaagagggaggagugucuagaugcacuggaguccaucaugaccaccaaguccgugaguuucagacgucucagucacuugaggaagcuugugccuggauuuggaaaagcauacaccauauucaacaagaccuuaauggaggcugaugcucacuacaaaucgguccgaacuuggaaugagaucauccccucgaaaggguguuuaagagucggggggagaugucauccucaugugaacggaguauuuuucaaugguaucauccuaggcccugacggccaugucuuaaucccggaaaugcagucaucccuccuccagcagcauauggaguuguuggaauccucggucauccccuuaaugcaucccuuggcagauccaucaacgguuuuuaaagauggugacgagguggaggauuuuguugagguucaccuuccagaugugcauaagcaggucucagggguugaucucggucucccaaacugggggaaggauguguugaugggcgcaggcguuuugacggcacugauguugaugauuuuccuaaugacguguugccgaaggacuaauagagcagaaucaauacaacacagucuuggagagacagggaggaaagugucggugaccucccaaagcgggagggucauaucuucaugggagucauauaaaagcggaggugagaccaagcuguaa

SEQ ID NO: 63151 - RNA, 1575 nt, Artificial Sequence
  derived and/or modified CDS sequence (wt) from glycoprotein__RABV__JN234411.1
augguuccucaagcucuuuugcuuguaccccuucuggguuuuucuuuguguuucgggaaauucccuauuuacacgauaccagacacacuuggucccuggagcccgaucgauauacaucaucucaguugcccaaacaauuugguuguggaggaugaaggaugcaccaaccugucaggguucuccuacauggaacuuaaaguuggacacaucucagccauaaaggugaacggguucacuugcacaggcguugugacagaggcagaaaccuacacuaacuuuguugguuaugucaccaccacguucaaaagaaagcauuuccgcccaacaccagaugcauguagagccgcguacaacuggaagauggccggugaccccagauaugaagagucucuacacaguccguacccugacuaccauuggcuucgaacuguaaaaaccacaaaggagucucucguuaucauaucuccaaguguggcaaauuuggacccauaugacaacucccuucacucgagggucuucccuagcggaaagugcucaggaauaacggugccuucugucuacugcucaacuaaccacgauuacaccguuuggaugccugaaauucugagacuagggacaucuugugauauuuuuaccaauaguagagggaagagagcauccaaggggagcaagaccuguggcuuuguagaugaaaggggccuauauaagucucuaaaaggcgcaugcaaacucaaguuauguggaguuccuggacuuagacuuauggacggaacaugggucgcgaugcagacaucaaaugagaccaaaugguguccucccggucaguugguuaaucugcacgaccuucacucagacgaaauugagcaucuuguuguagaggaguuggucaagaaaagagaggagugucuggaugcacuagaguccgucauaaccaccaagucagugaguuucagacgucucagucauuuaagaaaacuuguccccggguucggaaaagcauauaccauauucaacaagaccuugauggaggcugaagcucacuacaagucagucaggacuuggaaugagaucauccccucaaaaggguguuugagaguuggagggagguguuauccucauguaaacgggguauuuuucaaugguauaauauuagggccugacggccauguuuuaaucccagagaugcaaucaucccuccuccagcaacauauagaguuauuggaauccucaguuauuccccugaugcacccccuugcagacccguucacaguuuucaaggacggcgaugagauugaggauuuuguggaaguucaccuucccgaugugcacgaacaggucucagggguugaccugggucucccgaacuggggggaguauguauuacugagugcagggaccuuaauugccuugauguugauaauuuuccuaauaacauguuguaaaagagucgaucggccagaaucuacgcaacgcagucuuagagggacagggaggaaugugucagucaccucccaaagcgggaaauucauaccuucaugggagucguauaaaagugggggugagacuggacuguga

SEQ ID NO: 63152 - RNA, 1575 nt, Artificial Sequence
  derived and/or modified CDS sequence (wt) from glycoprotein__RABV__JN234412.1
augguuccucaagcucuuuugcuuguaccccuucuggguuuuucuuuguguuucgggaaauucccuauuuacacgauaccagacacacuuggucccuggagcccgaucgauauacaucaucucaguugcccaaacaauuugguuguggaggaugaaggaugcaccaaccugucaggguucuccuacauggaacuuaaaguuggacacaucucagccauaaaggugaacggguucacuugcacaggcguugugacagaggcagaaaccuacacuaacuuuguugguuaugucaccaccacguucaaaagaaagcauuuccgcccaacaccagaugcauguagagccgcguacaacuggaagauggccggugaccccagauaugaagagucucuacacaguccguacccugacuaccauuggcuucgaacuguaaaaaccacaaaggagucucucguuaucauaucuccaaguguggcaaauuuggacccauaugacaacucccuucacucgagggucuucccuagcggaaagugcucaggaauaacggugccuucugucuacugcucaacuaaccacgauuacaccguuuggaugccugaaauucugagacuagggacaucuugugauauuuuuaccaauaguagagggaagagagcauccaaggggagcaagaccuguggcuuuguagaugaaaggggccuauauaagucucuaaaaggcgcaugcaaacucaaguuauguggaguuccuggacuuagacuuauggacggaacaugggucgcgaugcagacaucaaaugagaccaaaugguguccucccggucaguugguuaaucugcacgaccuucacucagacgaaauugagcaucuuguuguagaggaguuggucaagaaaagagaggagugucuggaugcacuagaguccaucauaaccaccaagucagugaguuucagacgucucagucauuuaagaaaacuuguccccggguucggaaaagcauauaccauauucaacaagaccuugauggaggcugaagcucacuacaagucagucaggacuuggaaugagaucauccccucaaaaggguguuugagaguuggagggagguguuauccucauguaaacgggguauuuuucaaugguauaauauuagggccugacggccauguuuuaaucccagagaugcaaucaucccuccuccagcaacauauagaguuauuggaauccucaguuauuccccugaugcacccccuugcagacccguucacaguuuucaaggacggcgaugagauugaggauuuuguggaaguucaccuucccgaugugcacgaacaggucucagggguugaccugggucucccgaacuggggggaguauguauuacugagugcagggaccuuaauugccuugauguugauaauuuuccuaauaacauguuguaaaagagucgaucggccagaaucuacgcaacgcagucuuagagggacagggaggaaugugucagucaccucccaaagcgggaaauucauaccuucaugggagucguauaaaagugggggugagacuggacuguga

SEQ ID NO: 63153 - RNA, 1575 nt, Artificial Sequence
  derived and/or modified CDS sequence (wt) from glycoprotein__RABV__JN234413.1
augguuccucaagcucuuuugcuuguaccccuucuggguuuuucuuuguguuucgggaaauucccuauuuacacgauaccagacacacuuggucccuggagcccgaucgauauacaucaucucaguugcccaaacaauuugguuguggaggaugaaggaugcaccaaccugucaggguucuccuacauggaacuuaaaguuggacacaucucagccauaaaggugaacggguucacuugcacaggcguugugacagaggcagaaaccuacacuaacuuuguugguuaugucaccaccacguucaaaagaaagcauuuccgcccaacaccagaugcauguagagccgcguacaacuggaagauggccggugaccccagauaugaagagucucuacacaguccguacccugacuaccauuggcuucgaacuguaaaaaccacaaaggagucucucguuaucauaucuccaaguguggcaaauuuggacccauaugacaacucccuucacucgagggucuucccuagcggaaagugcucaggaauaacggugccuucugucuacugcucaacuaaccacgauuacaccguuuggaugccugaaauucugagacuagggacaucuugugauauuuuuaccaauaguagagggaagagagcauccaaggggagcaagaccuguggcuuuguagaugaaaggggccuauauaagucucuaaaaggcgcaugcaaacucaaguuauguggaguuccuggacuuagacuuauggacggaacaugggucgcgaugcagacaucaaaugagaccaaaugguguccucccggucaguugguuaaucugcacgaccuucacucagacgaaauugagcaucuuguuguagaggaguuggucaagaaaagagaggagugucuggaugcacuagaguccaucauaaccaccaagucagugaguuucagacgucucagucauuuaagaaaacuuguccccggguucggaaaagcauauaccauauucaacaagaccuugauggaggcugaagcucacuacaagucagucaggacuuggaaugagaucauccccucaaaaggguguuugagaguuggagggaggugucauccucauguaaacgggguauuuuucaaugguauaauauuagggccugacggccauguuuuaaucccagagaugcaaucaucccuccuccagcaacauauagaguuauuggaauccucaguuauuccccugaugcacccccuugcagacccguucacaguuuucaaggacggcgaugagauugaggauuuuguggaaguucaccuucccgaugugcacgaacaggucucagggguugaccugggucucccgaacuggggggaguauguauuacugagugcagggaccuuaauugccuugauguugauaauuuuccuaauaacauguuguaaaagagucgaucggccagaaucuacgcaacgcagucuuagagggacagggaggaaugugucagucaccucccaaagcgggaaauucauaccuucaugggagucguauaaaagugggggugagacuggacuguga

SEQ ID NO: 63154 - RNA, 1575 nt, Artificial Sequence
  derived and/or modified CDS sequence (wt) from glycoprotein__RABV__JN234420.1
augauuccucaagcucuguuguuuguaccucuucugguuuuuccauuguguuucgggaaauuccccauuuacacgauaccagacaaacucggccccuggagucccaucgauauacaucaccucagcuguccgaacaaucugguuguggaggacgaaggauguaccaaucugucaggauucucauacauggagcuuaaaguaggauauauuucggccauaaaggugaacggguucacuuguacgggugugguaacggaagcagaaaccuacacuaacuuugucgguuaugucaccaccacguuuaagagaaagcacuuccgaccaacaccggaugcaugcagaucagcauacaauuggaagauggcaggugaccccagauaugaagagucucugcacaaucccuauccugauuaucauuggcuccggacuguaaaaaccaccaaagagucuguuguuaucauaucuccaaguguggcagacuuagacccguacgauaaaucacuucauucgagaguuuuuccuagaggaaaaugcucaggaauaacggugucuucugccuacugcucuaccaaccaugauuauaccaucuggaugccugaaaauccuagacuggggaccucuugugauauuuucaccaacagcagagggaagagagcauccaaagggagcaagaccuguggauuuguggaugagagaggcuuguacaaaucucuaaaaggagcaugcaaacugaagcuguguggaguucuuggacuuaggcuuauggacggaaccugggucgcgauucagacaucaaacgagaccaaguggugcccuccugaucaacuagugaaucuacaugacuuucauucagaugagauugaacaucuuguuguggaggaguugguuaagaagagggaggagugucuagaugcacuggaguccaucaugaccaccaaguccgugaguuucagacgucucagucacuugaggaagcuugugccuggauuuggaaaagcauacaccauauucaacaagaccuuaauggaggcugaugcucacuacaaaucgguccgaacuuggaaugagaucauccccucgaaaggguguuuaagagucggggggagaugucauccucaugugaacggaguauuuuucaaugguaucauccuaggcccugacggccaugucuuaaucccggaaaugcagucaucccuccuccagcagcauauggaguuguugaaauccucggucauccccuuaaugcaucccuuggcagauccaucaacgguuuuuaaagauggugacgagguggaggauuuuguugagguucaccuuccagaugugcauaagcaggucucagggguugaucucggucucccaaacugggggaaggauguguugaugggcgcaggcguuuugacggcacugauguugaugauuuuccuaaugacguguugccgaaggacuaauagagcagaaucaauacaacacagucuuggagagacagggaggaaagugucggugaccucccaaagcgggagggucauaucuucaugggagucauauaaaagcggaggugagaccaagcuguaa

SEQ ID NO: 63155 - RNA, 1575 nt, Artificial Sequence
  derived and/or modified CDS sequence (wt) from glycoprotein__RABV__JN234423.1
augauuccucaagcucuguuguuuguaccucuucugguuuuuccauuguguuucgggaaauuccccauuuacacgauaccagacaaacucggccccuggagucccaucgauauacaucaccucagcuguccgaacaaucugguuguggaggacgaaggauguaccaaucugucaggauucucauacauggagcuuaaaguaggauauauuucggccauaaaggugaacggguucacuuguacgggugugguaacggaagcagaaaccuacacuaacuuugucgguuaugucaccaccacguuuaagagaaagcacuuccgaccaacaccggaugcaugcagaucagcauacaauuggaagauggcaggugaccccagauaugaagagucucugcacaaucccuauccugauuaucauuggcuccggacuguaaaaaccaccaaagagucuguuguuaucauaucuccaaguguggcagacuuagacccguacgauaaaucacuucauucgagaguuuuuccuagaggaaaaugcucaggaauaacggugucuucugccuacugcucuaccaaccaugauuauaccaucuggaugccugaaaauccuagacuggggaccucuugugauauuuucaccaacagcagagggaagagagcauccaaagggagcaagaccuguggauuuguggaugagagaggcuuguacaaaucucuaaaaggagcaugcaaacugaagcuguguggaguucuuggacuuaggcuuauggacggaaccugggucgcgauucagacaucaaacgagaccaaguggugcccuccugaucaacuagugaaucuacaugacuuucauucagaugagauugaacaucuuguuguggaggaguugguuaagaagagggaggagugucuagaugcacuggaguccaucaugaccaccaaguccgugaguuucagacgucucagucacuugaggaagcuugugccuggauuuggaaaagcauacaccauauucaacaagaccuuaauggaggcugaugcucacuacaaaucgguccgaacuuggaaugagaucauccccucgaaaggguguuuaagagucggggggagaugucauccucaugugaacggaguauuuuucaaugguaucauccuaggcccugacggccaugucuuaaucccggaaaugcagucaucccuccuccagcagcauauggaguuguugaaauccucggucauccccuuaaugcaucccuuggcagauccaucaacgguuuuuaaagauggugacgagguggaggauuuuguugagguucaccuuccggaugugcauaagcaggucucagggguugaucucggucucccaaacugggggaaggauguguugaugggcgcaggcguuuugacggcacugauguugaugauuuuccuaaugacguguugccgaaggacuaauagagcagaaucaauacaacacagucuuggagagacagggaggaaagugucggugaccucccaaagcgggagggucauaucuucaugggagucauauaaaagcggaggugagaccaagcuguaa

SEQ ID NO: 63156 - RNA, 1575 nt, Artificial Sequence
  derived and/or modified CDS sequence (wt) from glycoprotein__RABV__JN234424.1
augguuccucaggcucuccuguuuguaccccuucugguuuuuccauuguguuuugggaaauucccuauuuacacgauaccagacaagcuuggucccuggagcccgauugacauacaucaccucagcugcccaaacaauuugguaguggaggacgaaggaugcaccaaccugucaggguucuccuacauggaacuuaaaguuggauacaucucagccauaaaaacgaacggguucacuugcacaggcguugugacggaggcugaaaccuacacuaacuucguugguuaugucacaaccacguucaaaagaaagcauuuccgcccaacaccagaugcauguagagccgcguacaacuggaagauggccggugaccccagauaugaagagucucuacacaauccguacccugacuaccacuggcuucgaacuguaaaaaccaccaaggagucucucguuaucauaucuccaaguguggcagauuuggacccauaugacagaucccuucacucgagggucuucccuggcgggaauugcucaggaguagcggugucuucuaccuacugcuccacuaaccacgauuacaccauuuggaugcccgagaauccgagacuagggaugucuugugacauuuuuaccaauaguagagggaagagagcauccaaagggagugagacuugcggcuuuguagaugaaagaggccuauauaagucuuuaaaaggagcaugcaaacucaaguuauguggaguucucggacuuagacuuauggauggaacaugggucgcgaugcaaacaucaaaugaaaccaaauggugcccucccggucaguuggugaauuugcacgacuuucgcucagacgaaauugagcaccuuguuguagaggaguuggucaagaagagagaggagugucuggaugcacuagaguccaucaugaccaccaagucagugaguuucagacgucucagucauuuaagaaaacuugucccuggguuuggaaaagcauauaccauauucaacaagaccuugauggaagccgaugcucacuacaagucagucagaacuuggaaugagaucaucccuucaaaaggguguuuaagaguuggggggaggugucauccucauguaaacgggguauuuuucaaugguauaauauuaggaccugacggcaaugucuuaaucccagagaugcaaucaucccuccuccagcaacauauggaguuguugguauccucgguuaucccccuuaugcaccccauggcagacccgucuaccguuuucaagaacggugacgaggcugaggauuuuguugaaguucaccuucccgaugugcacgaacggaucucaggaguugacuugggucucccgaacugggggaaguauguauuacugagugcaggggcccugacugccuugauguugauaauuuuccugaugacaugcuggagaagagucaaucgaucggaaccuacacaacacaaucucagagggacagggagggaggugucagucacuccccaaagcgggaagaucauaucuucaugggaaucauacaagagcgggggugagaccggacuguga

SEQ ID NO: 63157 - RNA, 1575 nt, Artificial Sequence
  derived and/or modified CDS sequence (wt) from glycoprotein__RABV__JN786877.1
augauuccucaggcucuuuuguuuguaccccuuuugguuuucucaucgugcuucgggaaauuccccaucuacacgauaccagacaaacucggcccuuggaguccuauugacauacaucaucucaguugcccuaacaauuuaguuguggaggaugaggggugcaccaaccugucaggauucuccuacauggaacucaaagugggguacauuucagccauaaaagugaacggguucacuugcacggguguggugacagaagcagagaccuacacaaacuuugucggcuacgucaccaccacauuuaagagaaagcacuuccgcccgacaccugaugccugcagagcagcauauaacuggaagauggcaggugaccccagauaugaggaaucucugcauaauccguaucccgauuaucacuggcuccggacuguaaaaaccaccaaggagucucuuguuaucauaucuccgagugugucggacuuagacccguacgauaaaucucuucauuccagaguuuuucccagcgguaaauguucaggaauaacaguaucuucuaccuauugucccacuaaccaugacuauacuaucuggaugccggaaaauccgagacuagggaccucuugugacauuuucaccaauagcagagggaagagagcauccaaagggggcaagaccuguggauuuguggacgaaagaggcuuguacaagucucuaaaaggggcaugcaaauugaaacuauguggaguucuuggacuuagacuuauggacggaacauggguugcgauucaaacaucugaugaggccaaauggugcccuccugaucaguuagugaauauacaugauuuucgcucggaugagauugaacaucuuguuguggaagaguuaguaaagaaaagagaagagugucuagaugcacuggagucuaucaugaccaccaaguccguaaguuucagacgccucagucacuugaggaagcucguccccggguuugggaaagcauauaccauauucaacaaaaccuugauggaggcugaugcucacuacaaaucaguccguacauggaaugagaucauccccucuaaaggauguuuaagaguuggggggagaugucacccccaugugaacgggguguuuuucaaugguaucauccuggguccugauggacauguucuaaucccagagaugcagucaucucuccuucaacagcauauggaguuguuggaauccucgguaaucccgcuaaugcaucccuuggcagaucccucaacgguuuuuaaggacggugacgaggcggaagauuuugucgagguucaccuuccggauguccacaagcaggucucgggaguugaucucggucucccaagcugggggaaguaugugcugaugaguguaggcgcuaugauugcacugauguugaugauuuuccugaugacguguugcagaaaagcuaacggagcagaaacaauacaacaccgucucggagagacgggaaggaaagugucugucaccucccaaagcgggagggucauaucuuccugggagucguauaaaagcgggggugagaccaagcuguag

SEQ ID NO: 63158 - RNA, 1575 nt, Artificial Sequence
  derived and/or modified CDS sequence (wt) from glycoprotein__RABV__JN786878.1
augauuccucaggcucuuuuguuuguaccccuuuugguuuucucaucgugcuucgggaaauuccccaucuacacgauaccagacaaacucggcccuuggaguccuauugacauacaucaucucaggugcccuaacaauuuaguuguggaggaugaggggugcaccaaccugucaggauucuccuacauggaacucaaagugggguacauuucagccauaaaagugaacggguucacuugcacggguguggugacagaagcagagaccuacacaaacuuugucggcuacgucaccaccacauuuaagagaaagcacuuccgcccgacaccugaugccugcagagcagcauauaacuggaagauggcaggugaccccagauaugaggaaucucugcauaauccguaucccgauuaucacuggcuccggacuguaaaaaccaccaaggagucucuuguuaucauaucuccgagugugucggacuuagacccguacgauaaaucucuucauuccagaguuuuucccagcgguaaauguucaggaauaacaguaucuucuaccuauugucccacuaaccaugacuauacuaucuggaugccggaaaauccgagacuagggaccucuugugacauuuucaccaauagcagagggaagagagcauccaaagggggcaagaccuguggauuuguggacgaaagaggcuuguacaagucucuaaaaggggcaugcaaauugaaacuauguggaguucuuggacuuagacuuauggacggaacauggguugcgauucaaacaucugaugaggccaaauggugcccuccugaucaguuagugaauauacaugauuuucgcucggaugagauugaacaucuuguuguggaagaguuaguaaagaaaagagaagagugucuagaugcacuggagucuaucaugaccaccaaguccguaaguuucagacgccucagucacuugaggaagcucguccccggguuugggaaagcauauaccauauucaacaaaaccuugauggaggcugaugcucacuacaaaucaguccguacauggaaugagaucauccccucuaaaggauguuuaagaguuggggggagaugucacccccaugugaacgggguguuuuucaaugguaucauccuggguccugauggacauguucuaaucccagagaugcagucaucucuccuucaacagcauauggaguuguuggaauccucgguaaucccgcuaaugcaucccuuggcagaucccucaacgguuuuuaaggacggugacgaggcggaagauuuugucgagguucaccuuccggauguccccaagcaggucucgggaguugaucucggucucccaagcugggggaaguaugugcugaugaguguaggcgcuaugauugcacugauguugaugauuuuccugaugacguguugcagaaaagcuaacggagcagaaacaauacaacaccgucucggagagacgggaaggaaagugucugucaccucccaaagcgggagggucauaucuuccugggagucguauaaaagcgggggugagaccaagcuguag

SEQ ID NO: 63159 - RNA, 1575 nt, Artificial Sequence
  derived and/or modified CDS sequence (wt) from glycoprotein__RABV__JN936687.1
augauuccucaaguucuuuuguuuguuccccuucuaguuuucucgucguguuuugggaaauuccccauuuacacgauaccagacaaacuugguccauggagucccaucgauauacaucaccucagcuguccgaacaaucugguuguggaagaugaaggaugcaccaaucugucuggauuuuccuacauggaacucaaagugggauauauuucagccauaaaagugaacggauucaccuguacagguguggugaccgaagcagaaaccuacacuaacuuuguugguuaugucaccaccacauuuaagagaaagcacuuucgcccuaugccggaugcgugcagagccgcauacaacuggaagauggcuggugaccccagguaugaagagucucugcacaauccguaccccgacuaccacuggcuccgaacugucaagaccaccaaggagucccuugucaucauaucuccgagcguugcagauuuagacccguacgauaaaucccuucacucgagaguuuuuccuggcggaaaaugcucaggaauaaccguguccuccacuugcugcucuacuaaccacgacuacaccaucuggaugccugaaaauccuagacugggaacuucaugugacauuuucaccaauaguagagggaagagggcaucaaaagggggcaagaccuguggauuuguggaugaaagaggcuuguacaagucucuaaagggagcaugcaagcugaagcuaugugggguucuaggacuuagacuuauggacggaacaugggucgcaauucagacaucagaugagaucaaauggugcucuccugaucagcuaguaaaucuacacgacuuucacucggaugagauugaacaucuuguuguggaggaguuggucaaaaagagggaagagugucuggacgcacuggagacuauuaugaccacaaaguccgugaguuucagacgucuuagucauuugaggaagcuagucccuggguuuggaaaggcguauaccauauucaacaaaaccuugauggaggcugaugcucacuacaaaucaauccggacuuggaaugaaaucauccccuccaaaggguguuuaagaguuggggggagaugucauccucaugugaacgggguguucuucaacggcauuauacuggguccugacggacauguucuaaucccagagaugcagucgucccuccuccaccagcauauggaauuguuggaguccucagucaucccuuugaugcaucccuuagcagacccgucaacagucuuuaaagacggcgacgaggcagaggacuuuguugagguucaccuuccggaugugcacaagcagaucucggggguugaucuuggucucccaaacugggggaaguaugugcugauaagugcaggugcucugacugcauuaauguugacgauuuucuuaaugacguguugcagaaagacuaauagagcagagucaauacaacacaguccuggagagacagggaggaaagugucggugacuucucacaacggaagggucauaucuucaugggaaucauauaaaagcggaagugagaccaagcuguga

SEQ ID NO: 63160 - RNA, 1575 nt, Artificial Sequence
  derived and/or modified CDS sequence (wt) from glycoprotein__RABV__JN936688.1
augguuccucaaguccuucuguuuguaccccuucuggccguuccauuguguuuugggaaauuccccauuuacacgauaccagacaaacucggucccuggagucccauugauauacaucaucucagcuguccgaauaauuugguuguggaggaugaaggauguaccaaucugucaggauuuucauacauggaacuuaaaguaggauacauuucagccauaaaggugaacggauucacuuguacggguguggugacggaagcagaaaccuacaccaacuuuguuggcuaugucaccaccacguuuaagagaaagcacuuucgaccaacaccggaugcgugcagauccgcauacaauuggaagauggcuggugaccccagauacgaagagucucugcacaaucccuauccugauuaucauuggcuccggacuguaaaaaccaccaaagaguccuuugucaucauaucuccaaguguggcagaucuagauccguacgauaaaucccuucauucgagaguuuuuccuagaggaaaaugcucaggaauaacggugucuucuaccuacugcucuacuaaccaugacuacaccaucuggaugccugagaaucccagacugggaaccucuugugauauuuucaccaacagcagagggaagagagcauccaaagggagcaagaccuguggauuuguagaugagagaggcuuguacaaaucucugaaaggagcaugcaaacugaagcugugugggguucuuggacuuagacuuauggauggaacaugggucgcaauucagacaucagacgagaccaaguggugcccuccugaccagcuagugaaucuacaugacuuucauucggaugagauugaacaucuuguuguggaggaguuggucaagaaaagggaagagugucuagaugcacuggaguccaucaugaccaccaaguccgugaguuuccgacgucucagucacuugaggaaacuugugccuggauucggaaaagcauacaccauauucaauaagaccuugauggaggcugaugcucacuacaaaucgguccggacuuggaacgagaucauccccucuaaaggguguuugagaguuggaggcagaugucauccccaugugaacgggguguuuuucaaugguauuauccuaggcccugacggccaugucuugaucccggaaaugcagucaucucuccuucagcagcauauggaguuguuggaauccucggucauccccuuaaugcauccuuuggcagauccaucaacgguuuuuaaagacggugacgaggcggaggauuuuguugagguucaccuuccagaugugcauaagcaggucucaggggucgaucucggucucccaagcugggggaaguauguguugaugagcgcaggcauuuugacugcacugauguugaugauuuucuuaaugacguguugccgaaggaccaauagagcagaaucaauacaacauagucuuggagagacagggaggaaaguuucgguaaccucccaaaacgggagggucauaucuucaugggagucauacaaaagcggaggugagaccaagcuguaa

SEQ ID NO: 63161 - RNA, 1575 nt, Artificial Sequence
  derived and/or modified CDS sequence (wt) from glycoprotein__RABV__JN936689.1
augguuccucaaguccuucuguuuguaccccuucuggccguuccauuguguuuugggaaauuccccauuuacacgauaccagacaaacuuggucccuggagucccauugacauacaucaucucagcuguccgaauaauuugguuguggaagaugaaggauguaccaaucugucaggauuuucauacauggaacuuaagguaggauacauuucagccauaaaggugaacggguucacuuguacggguguggugacggaagcagaaaccuacacuaacuuuguuggcuaugucaccaccacguuuaagagaaagcacuuucgaccaacuccggaugcaugcagauccgcauacaauuggaagauggcuggugaccccagauacgaagagucucugcacaaucccuauccugauuaucauuggcuccggacuguaaaaaccaccaaagaguccuuuguuaucauaucuccaaguguggcagaucuagauccguacgauaaaucccuucauucgagaguuuuuccuagaggaaaaugcucaggaauaacggugucuucuaccuacugcucuaccaaccaugacuacaccaucuggaugccugaaaaucccagacuggggaccucuugugauauuuucaccaacagcagagggaagagagcauccaaagggagcaagaccuguggauuuguagaugagagaggcuuguacaaaucucuaaaaggagcaugcaaacugaagcugugugggguucuuggacuuagacuuauggauggaacaugggucgcgauucagacaucagacgagaccaaguggugcccuccugaccagcuagugaaucuacaugacuuucauucggaugagauugaacaucuuguuguggaggaguuggucaagaaaagggaagagugucuagaugcacuggaguccaucaugaccaccaaguccgugaguuuccgacgucucagucacuugaggaaacuugugcccggguucggaaaagcauacaccauauucaauaagaccuugauggaggcugaugcucacuacaaaucgguccggacuuggaacgagaucauccccucuaaaggguguuugagaguuggaggcagaugucauccccaugugaacgggguguuuuuuaaugguauuauccuaggcccugacggccaugucuugaucccggaaaugcagucaucucuccuucagcaacauauggaguuguuggaauccucggucaucccauuaaugcauccuuuggcagauccaucaacgguguuuaaagauggugacgaggcggaggauuuuguugagguucaucuuccagaugugcauaagcaggucucaggggucgaucucggucucccaagcugggggaaguauguguugaugagcgcaggcauuuugacugcacugauguugacgauuuucuuaaugacguguugccgaaggacuaauagagcagaaucgauacaacacagucuuggagagacagggaggaaagugucgguaaccucccaaagcgggagggucauaucuuccugggagucauacaaaagcggaggugagaccaagcuguaa

SEQ ID NO: 63162 - RNA, 1575 nt, Artificial Sequence
  derived and/or modified CDS sequence (wt) from glycoprotein__RABV__JN936690.1
augguuccucaagccguucuguuuguaccccuucuggccguuccauuguguuuugggaaauuccccaucuacacaauaccagacaaacucggucccuggagucccauugauauacaucaucucagcuguccgaauaauuugguuguggaggaugaaggauguaccaaucugucaggauuuucauacauggaacuuaaaguaggauacauuucagccauaaaggugaacggguucacuuguacggguguggugacggaagcagaaaccuacaccaacuuuguuggcuaugucaccaccacguuuaagagaaagcacuuucgaccaacaccggaugcgugcagauccgcauacaauuggaagauggcuggugaccccagauacgaagagucucugcacaaucccuauccugauuaucauuggcuccggacuguaaaaaccaccaaagaguccuuugucaucauaucuccaaguguggcagaucuagauccguacgauaaaucccuucauucgagaguuuuuccuagaggaaaaugcucaggaauaacggugucuucuaccuacugcucuacuaaccaugacuacaccaucuggaugccugaaaaucccagacuggggaccucuugugauauuuucaccaacagcagagggaagagagcauccaaagggagcaagaccuguggauuuguagaugagagaggcuuguacaaaucucuaaaaggagcaugcaaacugaagcugugugggguucuuggacuuagacuuauggauggaacaugggucgcgauucagacaucagacgagaccaaguggugcccuccugaccagcuagugaaucuacaugacuuucauucggaugagauugaacaucuuguuguggaggaguuggucaagaaaagggaagagugucuagaugcacuggaguccaucaugaccaccaaguccgugaguuuccgacgucucagucacuugaggaaacuugugccuggauucggaaaagcauacaccauauucaauaagaccuugauggaggcugaugcucacuacaaaucgguccggacuuggaacgagaucauccccucuaaaggguguuugagaguuggaggcagaugucauccccaugugaacgggguguuuuuuaaugguauuauccugggcccugacggccaugucuugaucccggaaaugcagucaucucuccuucagcagcauauggaguuguuggaauccucggucauccccuuaaugcauccuuuggcagauccaucaacgguuuuuaaagauggugacgaggcggaggauuuuguugagguucaccuuccagaugugcauaagcaggucucaggggucgaucucggucucccaagcugggggaaguauguguugaugagcgcaggcauuuugacugcacugauguugaugauuuucuuaaugacguguugccgaaggaccaauagagcagaaucaauacaacacagucuuggagagacagggaggaaagucucgguaaccucccaaaacgggagggucauaucuucaugggagucauacaagagcggaggugagaccaagcuguaa

SEQ ID NO: 63163 - RNA, 1575 nt, Artificial Sequence
  derived and/or modified CDS sequence (wt) from glycoprotein__RABV__JN936691.1
augauuccucagguucuuuuguuuguuccccuucuaguguucucgucguguuuugggaaauuccccauuuacacgauaccagacaaacuugguccauggagucccaucgauauacaucaucucagcuguccgaacaauaugguuguggaagaugaaggaugcaccaaucugucuggauuuuccuacauggaacucaaagugggauauauuucagccauaaaagugaacggauucaccuguacagguguggugacagaagcagaaaccuacacuaacuuuguugguuaugucaccaccacguuuaagagaaagcacuuucgcccuaugccggaugcgugcagagccgcauacaacuggaagauggcuggugaccccagguaugaagagucucugcacaauccguacccugacuaccacuggcuccgaacugucaagaccaccaaggagucccuugucaucauaucuccgagcguugcagauuuggacccguacgauaaaucccuucacucgagaguuuuuccuggcggaaaaugcucaggaauaaccguguccuccacuugcugcucuacuaaccacgacuacaccaucuggaugccugaaaauccuagacugggaacuucaugugacauuuucaccaauaguagagggaagagggcaucaaaagggggcaagacuuguggauuuguggaugaaagaggcuuguacaagucucuaaagggagcaugcaagcugaagcugugugggguucuaggacuuagacuuauggacggaacaugggucgcaauucagacaucagaugagaucaaauggugcucuccugaucagcuaguaaaucuacaugacuuucacucggaugagauugaacaucuuguuguggaggaguuggucaaaaagagggaagagugucuggacgcacuggagacuauuaugaccacaaaguccgugaguuucagacgucuuagucauuugaggaagcuagucccuggguuuggaaaggcguauaccauauucaacaaaaccuugauggaggcugaugcucacuauaagucaauccggacuuggaaugaaaucauccccucuaaaggguguuuaagaguuggggggagaugucauccucaugugaacgggguguucuucaacggcauuauacuggguccugacggacauguucuaaucccagagaugcaaucgucccuccuccaccagcauauggaauuguuggaguccucagucaucccuuugaugcaucccuuagcagacccgucaacagucuuuaaggacggcgacgaggcagaggacuuuguugagguucaccuuccggaugugcacaagcagaucucggggguugaucuuggucucccaaacugggggaaguaugugcugauaagugcaggugcucugacugcauuaauguugacgauuuucuuaaugacguguugcagaaagacuaauagagcagagucaauacaacacaguccuggagagacagggaggaaagugucgguaacuucucacaacggaagggucauaucuucaugggaaucauauaaaagcggaggugagaccaagcuguga

SEQ ID NO: 63164 - RNA, 1575 nt, Artificial Sequence
  derived and/or modified CDS sequence (wt) from glycoprotein__RABV__JN936692.1
augauuccucaaguucuuuuguuuguuccccuucuaguuuucucgucguguuuugggaaauuccccauuuacacgauaccagacaaacuugguccauggagucccaucgauauacaucaucucagcuguccgaacaaucugguuguggaagaugaaggaugcaccaauuugucuggauuuuccuacauggaacucaaagugggauauauuucagccauaaaagugaacggauucaccuguacagguguggugacugaagcagaaaccuacacuaacuuuguugguuaugucaccaccacguuuaagagaaagcacuuucgcccuaugccggaugcgugcagagccgcauacaacuggaagauggcuggugaccccagguaugaagagucucugcacaauccguaccccgacuaccacuggcuccgaacugucaagaccaccaaggagucccuugucaucauaucuccgagcguugcagauuuggacccguacgauaaaucccuucacucgagaguuuuuccuggcggaaaaugcucaggaauaaccguguccuccacuugcugcucuacuaaccacgacuacaccaucuggaugccugaaaauccuagacugggaacuucaugugacauuuucaccaauaguagagggaagagggcaucaaaagggggcaagacuuguggauuuguggaugaaagaggcuuguacaagucucuaaagggagcaugcaagcugaagcuaugugggguucuaggacuuagacuuauggacggaacaugggucgcgauucagacaucagaugagaucaaauggugcucuccugaucagcuaguaaaucuacacgacuuucacucggaugagauugaacaucuuguuguggaggaguuggucaaaaagagggaagagugucuggacgcacuggagacuauuaugaccacaaaguccgugaguuucagacgucuuagucauuugaggaagcuagucccuggguuuggaaaggcguauaccauauucaacaaaaccuugauggaggcugaugcucacuacaaaucaauccggacuuggaaugaaaucauccccuccaaaggguguuuaagaguuggggggagaugucauccucaugugaacgggguguucuucaacggcauuauacuggguccugacggacauguucuaaucccagagaugcagucgucccuccuccaccagcauauggaauuguuggaguccucagucaucccuuugaugcaucccuuagcagacccgucaacagucuuuaaagacggcgacgaggcagaggacuuuguugagguucaccuuccggaugugcacaagcagaucucggggguugaucuuggucucccaaacugggggaaguaugugcugauaagugcaggugcucugacugcauuaauguugacgauuuucuuaaugacguguugcagaaagacuaauagagcagagucaauacaacacaguccuggagaaacagggaggaaagugucggugacuucucacaacggaagggucauaucuucaugggaaucauauaaaagcggaagugagaccaagcuguga

SEQ ID NO: 63165 - RNA, 1575 nt, Artificial Sequence
  derived and/or modified CDS sequence (wt) from glycoprotein__RABV__JN936693.1
augguuccucaagccuuucuguuuguaccccuucuggccauuccauuguguuuugggaaauuccccauuuacacgauaccagacaaacucggucccuggagucccauugauauacaucaccucagcuguccgaauaauuugguuguggaggaugaaggauguaccaaucugucaggauucucauacauggaacuuaaaguaggauacauuucagccauaaaggugaacggguucacuuguacggguguggugacggaagcagaaaccuacacuaacuuuguuggcuaugucaccaccacguuuaagagaaagcacuuucgaccaacaccggaugcaugcagauccgcauacaauuggaagauggcuggugaccccagauacgaagagucucugcacaaucccuauccugauuaucauuggcuucggacuguaaaaaccaccaaagaguccuuuguuaucauaucuccaaguguggcagaucuagauccguacgauaaaucccuccauucgagaguuuuuccuagaggaaaaugcucaggaauaacggugucuucuaccuacugcucuaccaaccaugacuacaccaucuggaugccugaaaaucccagacuggggacuucuugugauauuuucaccaauaguagagggaagagagcauccaaagggagcaagaccuguggauuuguagaugagagaggcuuguacaaaucucuaaaaggagcaugcaaacugaagcugugugggguucuuggacuuagacuuauggauggaacaugggucgcgauucagacaucagacgagaccaaguggugcccuccugaccagcuagugaaucuacaugacuuucauucggaugagauugaacaucuuguuguggaggaguuggucaagaaaagggaagagugccuagauacacuggaguccaucaugaccaccaaguccgugaguuuccgacgucucagucacuugaggaaacuugugccuggguucggaaaagcauacaccauauucaauaagaccuugauggaggcugaugcucacuacaagucgguccggacuuggaacgagaucauccccucuaaaggguguuugagaguuggaggcagaugucauccccaugugaacgggguguuuuuuaaugguauuauccuaggcccugacggccaugucuuaaucccggaaaugcagucaucucuccuucagcagcauauggaguuguuggaauccucggucaucccccuaaugcauccuuuggcagauccaucaacgguuuuuaaagauggugacgaggcggaggauuuuguugagguucaccuuccagaugugcauaagcaggucucaggggucgaucucggucucccaagcugggggaaguauguguugaugagcgcaggcauuuugacugcacugaugcugaugaucuucuuaaugacguguugccgaaggacuaauagagcagagucaauacaacacagucuuggagagacagggaggaaagugucgguaaccucccaaagcgggagggucauaucuucaugggagucauacaaaagcggaggugagaccaaguuguaa

SEQ ID NO: 63166 - RNA, 1575 nt, Artificial Sequence
  derived and/or modified CDS sequence (wt) from glycoprotein__RABV__JN936694.1
augguuccucaagcucuuuuguuuguuccccuucugguuuucucgucauguuucgggaaauuccccauuuacacgauaccagacaaacuugguccauggagucccaucgauauacaucaucucagcuguccgaacaauuuuguuguggaagaugaagggugcaccaaucugucuggauuuuccuacauggaacucaaagugggauauauuucagccauaaaagugaacggauucaccuguacagguguggugacagaagcagaaaccuacacgaacuuugucgguuaugucaccaccacguuuaagagaaagcacuuucgcccuaugccggaugcgugcagagccgcauacaacuggaagauggcuggugaccccagguaugaagagucucugcacaauccguacccugacuaccacuggcuccgaacugucaagaccaccaaggagucccuugucaucauaucuccgagcguugcagauuuggacccguacgauaaaucccuucacucgagaguuuuuccuggcggaaaaugcucaggaauaaccguguccuccacuugcugcucuacuaaccacgacuacaccaucuggaugccugaaaauccuagacugggaacuucgugugacauuuucaccaauaguagagggaagagggcaucaaaagggggcaagacuuguggauuuguggaugaaagaggcuuguacaagucucuaaagggagcaugcaagcugaagcuaugugggguucuaggacuuagacuuauggacggaacauggguugcaauucagacaucagaugagaucaaauggugcucuccugaucagcuaguaaaucuacacgacuuucacucggaugagauugaacauuuuguuguggaggaguuggucaaaaagagggaagagugucuggacgcacuggagacuauuaugaccacaaaguccgugaguuucagacgucuuagucauuugaggaaacuagucccuggguuuggaaaggcguauaccauauucaacaaaaccuugauggaggcugaugcucacuauaaaucaauccggacuuggaaugaaaucauccccucuaaaggguguuuaagaguuggggggagaugucauccucaugugaacgggguguucuucaacggcauuauacuggguccugacggacauguucuaaucccagagaugcaaucgucccuccuccaccagcauauggaauuguuggaguccucagucaucccguugaugcaucccuuagcagacccgucaacagucuuuaaagacggcgacgaggcagaggacuuuguugagguucaccuuccggaugugcacaagcagaucucggggguugaucuuggucucccaaacugggggaaguaugugcugauaagugcaggugcucugacugcauuaauguugaugauuuucuuaaugacguguugcagaaaggcuaauagagcagagucaauacaacacaauccuggagagacagggaggaaagugucgguaacuucucacaacggaagggucauaucuucaugggaaucauauaaaagcggaggugagaccaaacuguga

SEQ ID NO: 63167 - RNA, 1575 nt, Artificial Sequence
  derived and/or modified CDS sequence (wt) from glycoprotein__RABV__JN936695.1
augguuccucaagccuuucuguuuguaccccuucuggccaucccauuguguuuugggaaauuccccauuuacacgauaccagacaaacucggucccuggagucccauugauauacaucaccucagcuguccgaauaauuugguuguggaggaugaaggauguaccaaucugucaggauucucauacauggaacuuaaaguaggauacauuucagccauaaaggugaacggguucacuuguacggguguggugacggaagcagaaaccuacacuaacuuuguuggcuaugucaccacuacguuuaagagaaagcacuuucgaccaacaccggaugcaugcagauccgcauacaauuggaagauggcuggugaccccagauacgaagagucucugcacaaucccuauccugauuaucauuggcuucggacuguaaaaaccaccaaagaguccuuuguuaucauaucuccaaguguggcagaucuagauccguacgauaaaucccuccauucgagaguuuuuccuagaggaaaaugcucaggaauaacggugucuucuaccuacugcucuaccaaccaugacuacaccaucuggaugccugaaaaucccagacuggggaccucuugugauauuuucaccaauaguagagggaagagagcauccaaagggagcaagaccuguggauuuguagaugagagaggcuuguacaaaucucuaaaaggagcaugcaaacugaagcugugugggguucuuggacuuagacuuauggauggaacaugggucgcgauucagacaucagacgagaccaaguggugcccuccugaccagcuagugaaucuacaugacuuucauucggaugagauugaacaucuuguuguggaggaguuggucaagaaaagggaagagugccuagaugcacuggaguccaucaugaccaccaaguccgugaguuuccgacgucucagucacuugaggaaacuugugccuggguucggaaaagcauacaccauauucaauaagaccuugauggaggcugaugcucacuacaagucgguccggacuuggaacgagaucauccccucuaaaggguguuugagaguuggaggcagaugucauccccaugugaacgggguguuuuuuaaugguauuauccuaggcccugacggccaugucuuaaucccggaaaugcagucaucucuccuucagcagcauauggaguuguuggaauccucggucaucccccuaaugcauccuuuggcagacccaucaacgguuuuuaaagauggugacgaggcggaggauuuuguugagguucaccuuccagaugugcauaagcaggucucaggggucgaucucggucucccaagcugggggaaguauguguugaugagcgcaggcauuuugacugcacugaugcugaugaucuucuuaaugacguguugccgaagggcuaauagagcagagucaauacaacacagucuuggagagacagggaggaaagugucgguaaccucccaaagcgggagggucauaucuucaugggagucauacaaaagcggaggugagaccaaguuguaa

SEQ ID NO: 63168 - RNA, 1575 nt, Artificial Sequence
  derived and/or modified CDS sequence (wt) from glycoprotein__RABV__JN936696.1
augauucuucaaguucuuuuguuuguucccuuucuaguuuucucgucguguuucgggaaauuccccauuuacacgauaccagacaaacuugguccauggagucccaucgauauacaucaucucagcuguccgaacaaucugguuguggaagaugaaggaugcaccaauuugucuggauuuuccuacauggaacucaaagugggauauauuucagccauaaaagugaacggauucaccuguacagguguggugacagaagcagaaaccuacacuaacuuuguugguuaugucaccaccacguuuaagagaaagcacuuucgcccuaugccggaugcgugcagagccgcauacaacuggaagauggcuggugaccccagguaugaagagucucugcacaauccguacccugacuaccacuggcuccgaacugucaagaccaccaaggagucccuugucaucauaucuccgagcguugcagauuuggacccguacgauaaaucccuucacucgagaguuuuuccuggcggaaaaugcucaggaauaaccguguccuccacuugcugcucgaccaaccacgacuacaccaucuggaugccugaaaauccuagacugggaacuucgugugacauuuuuaccaauaguagagggaagagggcaucaaaagggggcaagacuuguggauuuguggaugaaagaggcuuguacaagucucuaaagggagcaugcaagcugaagcuaugugggguucuaggacuuagacuuauggacggaacaugggucgcaauucagacaucagaugagaucaaauggugcccuccugaucagcuaguaaaucuacacgacuuucacucggaugagauugagcaucuuguuguagaggaguuggucaaaaagagggaagagugucuggacgcacuggagacuauuaugacaacaaaguccgugaguuucagacgucucagucauuugaggaagcuagucccuggguuuggaaaggcguauaccauauucaacaaaaccuugauggaggcugaugcucacuacaaaucaauccggacuuggaaugaaaucauccccucuaaaggguguuuaagaguuggggggagaugucauccucaugugaacgggguguucuucaacggcauuauacuggguccugacggacauguucuaaucccagagaugcaaucgucccuccuccaccagcauauggaauuguuggaauccucagucaucccuuugaugcaucccuuagcagacccgucaacagucuuuaaagacggcgacgaggcagaggacuuuguugagguucaccuuccggaugugcacaagcagaucucggggguugaucuuggucucccaaacugggggaaguaugugcugauaagugcaggugcuuugacugcauuaauguugaugauuuucuuaaugacguguugcagaaagaauaauagagcagagucaauacaacacaguccuggagagacagggaggaaagugucggugacuucucauaacggaagggucauaucuucaugggaaucauauaaaagcggaggugagaccaagcuguga

SEQ ID NO: 63169 - RNA, 1575 nt, Artificial Sequence
  derived and/or modified CDS sequence (wt) from glycoprotein__RABV__JN936697.1
augguuccucaagccuuucuguuuguaccccuucuggccauuccauuguguuuugggaaauucccuauuuacacgauaccagacaaacucggucccuggagucccauugauauacaucaccucagcuguccgaauaauuugguuguggaggaugaaggauguaccaaucugucaggauucucauacauggaacuuaaaguaggauacauuucagccauaaaggugaacggguucacuuguacggguguggugacggaagcagaaaccuacacuaacuuuguuggcuaugucaccaccacguuuaagagaaagcacuuucgaccaacaccggaugcaugcagauccgcauacaauuggaagauggcuggugaccccagauacgaagagucucugcacaaucccuauccugauuaucauuggcuucggacuguaaaaaccaccaaagaguccuuuguuaucauaucuccaaguguggcagaucuagauccguacgauaaaucccuccauucgagaguuuuuccuagaggaaaaugcucaggaauaacggugucuucuaccuacugcucuaccaaccaugacuacaccaucuggaugccugaaaaucccagacuggggaccucuugugauauuuucaccaauaguagagggaagagagcauccaaagggagcaagaccuguggauuuguagaugagagaggcuuguacaaaucucuaaaaggagcaugcaaacugaagcugugugggguucucggacuuagacuuauggauggaacaugggucgcgauucagacaucagacgagaccaaguggugcccuccugaccagcuagugaaucuacaugacuuucauucggaugagauugaacaucuuguuguggaggaguuggucaagaaaagggaagagugccuagaugcacuggaguccaucaugaccaccaaguccgugaguuuccgacgucucagucacuugaggaaacuugugccuggguucggaaaagcauacaccauauucaauaagaccuugauggaggcugaugcucacuacaagucgguccggacuuggaacgagaucauccccucuaaaggguguuugagaguuggaggcagaugucauccccaugugaacgggguguuuuuuaaugguauuauccuaggcccugacggccaugucuuaaucccggaaaugcagucaucucuccuucagcagcauauggaguuguuggaauccucggucaucccccuaaugcauccuuuggcagauccaucaacgguuuuuaaagauggugacgaggcggaggauuuuguugagguucaccuuccagaugugcauaagcaggucucaggggucgaucucggucucccaagcugggggaaguauguguugaugagcgcaggcauuuugacugcacugaugcugaugaucuucuuaaugacauguugccgaaggacuaauagagcagagucaauacaacacagucuuggagagacagggaggaaagugucgguaaccucccaaagcgggagggucauaucuucaugggagucauacaaaagcggaggugagaccaaguuguaa

SEQ ID NO: 63170 - RNA, 1575 nt, Artificial Sequence
  derived and/or modified CDS sequence (wt) from glycoprotein__RABV__JN936698.1
augauuccucaaguucuuuuguuuguuccccuucuaguuuucucgucguguuuugggaaauuccccauuuacacgauaccagacaaacuugguccauggagucccaucgauauacaucaucucagcuguccgaacaaucugguuguggaagaugaaggaugcaccaaucugucuggauuuuccuacauggaacucaaagugggauauauuucagccauaaaagugaacggauucacuuguacagguguggugacagaagcagaaaccuacacgaacuuuguugguuaugucaccaccacuuuuaagagaaagcacuuucgcccuacgccagaugcgugcagagccgcuuacaacuggaagauggcuggugaccccagguaugaagagucucugcacaauccguacccugauuaucacuggcuccgaacugucaagaccuccaaggagucccuugucaucauaucuccgagcguugcagauuuggacccguacgauaaaucccuucacucgagaguuuuuccuggcggaaaaugcucuggaauaaccguguccuccacuugcugcucuacuaaccacgacuacaccaucuggaugccugaaaauccuagacugggaacuucgugugacauuuucaccaauaguagagggaagagggcaucaaaagggggcaagacuuguggauuuguggaugaaagaggcuuguacaagucucuaaagggagcaugcaagcugaagcuaugugggguucuaggacuuagacuuauggacggaacaugggucgcaauucagacaucagaugagaucaaauggugcucuccugaucagcuaguaaaucuacacgacuuucacucagaugagauugaacaucuuguuguggaggaguuggucaaaaagagggaagagugucuggacgcacuggagacuauuaugaccacaaaguccgugaguuucaggcgucuuagucauuugaggaagcuagucccuggguuuggaaaggcguauaccauauucaacaaaaccuugauggaggcugaugcucacuauaaaucaauccggacuuggaaugaaaucauccccucuaaaggguguuuaagaguuggggggagaugucauccucaugugaacgggguguucuucaacggcauuauacuggguccugacggacauguucuaaucccagagaugcaaucgucccuccuccaccagcauauggaauuguuggaguccucagucaucccuuugaugcaucccuuagcagacccgucaacaguuuuuaaagacggcgacgaggcagaggacuuuguugagguucaccuuccggaugugcacaagcagaucucggggguugaucuuggucucccaaacugggggaaguacgugcugguaagugcaggugcucugacugcauuaauguugaugauuuucuuaaugacguguugcagaaagacuaauagagcagagucaauacaacacaguccuggagagacagggaggaaagugucgguaacuucucacaacggaagggucauaucuucaugggaaucauauaaaaguggaggugagaccaagcuguga

SEQ ID NO: 63171 - RNA, 1575 nt, Artificial Sequence
  derived and/or modified CDS sequence (wt) from glycoprotein__RABV__JN936699.1
augguuccucaaguucuuuuguuuguucccuuucuaguuuucucgucauguuucgggaaauuccccauuuacacgauaccagacaaacuugguccauggagucccaucgauauacaucaucucagcuguccgaacaaucuuguuguggaagaugaagggugcaccaaucugucuggauuuuccuacauggaacucaaagugggauauauuucagccauaaaagugaacggauucaccuguacagguguggugacagaagcagaaaccuacacaaacuuuguugguuaugucaccaccacguuuaagagaaagcacuuucgcccuaugccggaugcgugcagagccgcauacaacuggaagauggcuggugaccccagguaugaagagucucugcacaauccguacccugacuaccacuggcuccgaacugucaagaccaccaaggagucccuugucaucauaucuccgaguguugcagauuuggacccguacgauaaaucccuucacucgagaguuuuuccuggcggaaaaugcucaggaauaaccguguccuccacuugcugcucuacuaaccacgacuacaccaucuggaugccugaaaauccuagacugggaacuucgugugacauuuucaccaauaguagagggaagagggcaucaaaagggggcaagacuuguggauuuguggaugaaagaggcuuguacaagucucuaaagggagcaugcaagcugaagcuaugugggguucuaggacuuagacuuauggacggaacauggguugcaauucagacaucagaugagaucaaauggugcucuccugaucagcuaguaaaucuacacgacuuucacucggaugagauugaacaucuuguuguggaggaguuggucaaaaagagggaagagugucuggacgcacuggagacuauuaugaccacaaaguccgugaguuucagacgucuuagucauuugaggaagcuagucccuggguuuggaaaggcguauaccauauucaacaaaaccuugauggaggcugaugcucacuauaaaucaauccggacuuggaaugaaaucauccccucuaaaggguguuuaagaguuggggggagaugucauccucaugugaacgggguguucuucaacggcauuauacuggguccugacggacauguucuaaucccagagaugcaaucgucccuccuccaccagcauauggaauuguuggaguccucagucaucccguugaugcaucccuuagcagacccgucaacagucuuuaaagacggcgacgaggcagaggacuuuguugagguucaccuuccggaugugcacaagcagaucucggggguugaucuuggucucccaaacugggggaaguaugugcugauaagugcaggugcucugacugcauuaauguugaugauuuucuuaaugacguguugcagaaaggcuaauagagcagagucaauacaacacaauccuggagagacagggaggaaagugucgguaacuucucacaacggaagggucauaucuucaugggaaucauauaaaagcggaggugagaccaaacuguga

SEQ ID NO: 63172 - RNA, 1575 nt, Artificial Sequence
  derived and/or modified CDS sequence (wt) from glycoprotein__RABV__JN936700.1
augguuccucaaguucuuuuguuuguuccccuucuaguuuucucgucauguuucgggaaauuccccauuuacacgauaccagacaaacuugguccauggagucccaucgauauacaucaucucagcuguccgaacaaucuuguuguggaagaugaagggugcaccaaucugucuggauuuuccuacauggaacucaaagugggauauauuucagccauaaaagugaacggauucaccuguacagguguggugacagaagcagaaaccuacacaaacuuuguugguuaugucaccaccacguuuaagagaaagcacuuucgcccuaugccggaugcgugcagagccgcauacaacuggaagauggcuggugaccccagguaugaagagucucugcacaauccguacccugacuaccacuggcuccgaacugucaagaccaccaaggagucccuugucaucauaucuccgagcguugcagauuuggacccguacgauaaaucccuucacucgagaguuuuuccuggcggaaaaugcucaggaauaaccguguccuccacuugcugcucuacuaaccacgacuacaccaucuggaugccugaaaauccuagacugggaacuucgugugacauuuucaccaauaguagagggaagagggcaucaaaagggggcaagacuuguggauuuguggaugaaagaggcuuguacaagucucuaaagggagcaugcaagcugaagcuaugugggguucuaggacuuagacuuauggacggaacauggguugcaauucagacaucagaugagaucaaauggugcucuccugaucagcuaguaaaucuacacgacuuucacucggaugagauugaacaucuuguuguggaggaguuggucaaaaagagggaagagugucuggacgcacuggagacuauuaugaccacaaaguccgugaguuucagacgucuuagucauuugaggaagcuagucccuggguuuggaaaggcguauaccauauucaacaaaaccuugauggaggcugaugcucacuauaaaucaauccggacuuggaaugaaaucauccccucuaaaggguguuuaagaguuggggggagaugucauccucaugugaacgggguguucuucaacggcauuauacuggguccugacggacauguucuaaucccagagaugcaaucgucccuccuccaccagcauauggaauuguuggaguccucagucaucccguugaugcaucccuuagcagacccgucaacagucuuuaaagacggcgacgaggcagaggacuuuguugagguucaccuuccggaugugcacaagcagaucucggggguugaucuuggucucccaaacugggggaaguaugugcugauaagugcaggcgcucugacugcauuaauguugaugauuuucuuaaugacguguugcagaaaggcuaauagagcagagucaauacaacacaauccuggagagacagggaggaaagugucgguaacuucucacaacggaagggucauaucuucaugggaaucauauaaaagcggaggugagaccaaacuguga

SEQ ID NO: 63173 - RNA, 1575 nt, Artificial Sequence
  derived and/or modified CDS sequence (wt) from glycoprotein__RABV__JN936701.1
augguuccucaaguucuuuuguuuguucccuuucuaguuuucucgucauguuucgggaaauuccccauuuacacgauaccagacaaacuugguccauggagucccaucgauauacaucaucucagcuguccgaacaaucuuguuguggaagaugaagggugcaccaaucugucuggauuuuccuacauggaacucaaagugggauauauuucagccauaaaagugaacggauucaccuguacagguguggugacagaagcagaaaccuacacgaacuuuguugguuaugucaccaccacguuuaagagaaagcacuuucgcccuaugccggaugcgugcagagccgcauacaacuggaagauggcuggugaccccagguaugaagagucucugcacaauccguaccccgacuaccacuggcuccgaacugucaagaccaccaaggagucccuugucaucauaucuccgagcguugcagauuuggacccguacgauaaaucccuucacucgagaguuuuuccuggcggaaaaugcucaggaauaaccguguccuccacuugcugcucuacuaaccacgacuacaccaucuggaugcccgaaaauccuagacugggaacuucgugugacauuuucaccaauaguagagggaagagggcaucaaaagggggcaagacuuguggauuuguggaugaaagaggcuuguacaagucucuaaagggagcaugcaagcugaagcuaugugggguucuaggacuuagacuuauggacggaacauggguugcaauucagacaucagaugagaucaaauggugcucuccugaucagcuaguaaaucuacacgacuuucacucggaugagauugaacaucuuguuguggaggaguuggucaaaaagagggaagagugucuggacgcacuggagacuauuaugaccacaaaguccgugaguuucagacgucuuagucauuugaggaagcuagucccuggguuuggaaaggcguauaccauauucaacaaaaccuugauggaggcugaugcucacuauaaaucaauccggacuuggaaugaaaucauccccucuaaaggguguuuaagaguuggggggagaugucauccucaugugaacgggguguucuucaacggcauuauacuggguccugacggacauguucuaaucccagagaugcaaucgucccuccuccaccagcauauggaauuguuggaguccucagucaucccguugaugcaucccuuagcagacccgucaacagucuuuaaagacggcgacgaggcagaggacuuuguugagguucaccuuccggaugugcacaagcagaucucggggguugaucuuggucucccaaacugggggaaguaugugcugauaagugcaggugcucugacugcauuaauguugaugauuuucuuaaugacguguugcagaaaggcuaauagagcagagucaauacaacacaauccuggagagacagggaggaaagugucgguaacuucucacaacggaagggucauaucuucaugggaaucauauaaaagcggaggugagaccaaacuguga

SEQ ID NO: 63174 - RNA, 1575 nt, Artificial Sequence
  derived and/or modified CDS sequence (wt) from glycoprotein__RABV__JN936702.1
augguuccucaaguucuuuuguuuguuccccuucuaguuuucucgucauguuucgggaaauuccccauuuacacgauaccagacaaacuugguccauggagucccaucgauauacaucaucucagcuguccgaacaaucuuguuguggaagaugaagggugcaccaaucugucuggauuuuccuacauggaacucaaagugggauauauuucagccauaaaagugaacggauucaccuguacagguguggugacagaagcagaaaccuacacgaacuuuguugguuaugucaccaccacguuuaagagaaagcacuuucgcccuaugccggaugcgugcagagccgcauacaacuggaagauggcuggugaccccagguaugaagagucucugcacaauccguaccccgacuaccacuggcuccgaacugucaagaccaccaaggagucccuugucaucauaucuccgagcguugcagauuuggacccguacgauaaaucccuucacucgagaguuuuuccuggcggaaaaugcucaggaauaaccguguccuccacuugcugcucuacuaaccacgacuacaccaucuggaugcccgaaaauccuagacugggaacuucgugugacauuuucaccaauaguagagggaagagggcaucaaaagggggcaagacuuguggauuuguggaugaaagaggcuuguacaagucucuaaagggagcaugcaagcugaagcuaugugggguucuaggacuuagacuuauggacggaacauggguugcaauucagacaucagaugagaucaaauggugcucuccugaucagcuagugaaucuacacgacuuucacucggaugagauugaacaucuuguuguggaggaguuggucaaaaagagggaagagugucuggacgcacuggagacuauuaugaccacaaaguccgugaguuucagacgucuuagucauuugaggaagcuagucccuggguuuggaaaggcguauaccauauucaacaaaaccuugauggaggcugaugcucacuauaaaucaauccggacuuggaaugaaaucauccccucuaaaggguguuuaagaguuggggggagaugucauccucaugugaacgggguguucuucaacggcauuauacuggguccugacggacauguucuaaucccagagaugcaaucgucccuccuccaccagcauauggaauuguuggaguccucagucaucccguugaugcaucccuuagcagacccgucaacagucuuuaaagacggcgacgaggcagaggacuuuguugagguucaccuuccggaugugcacaagcagaucucggggguugaucuuggucucccaaacugggggaaguaugugcugauaagugcaggugcucugacugcauuaauguugaugauuuucuuaaugacguguugcagaaaggcuaauagagcagagucaauacaacacaauccuggagagacagggaggaaagugucgguaacuucucacaacggaagggucauaucuucaugggaaucauauaaaagcggaggugagaccaaacuguga

SEQ ID NO: 63175 - RNA, 1575 nt, Artificial Sequence
  derived and/or modified CDS sequence (wt) from glycoprotein__RABV__JN936703.1
augguuccucaaguucuuuuguuuguuccccuucuaguuuucucgucauguuucgggaaauuccccauuuacacgauaccagacaaacuugguccauggagucccaucgauauacaucaucucagcuguccgaacaaucuuguuguggaagaugaagggugcaccaaucugucuggauuuuccuacauggaacucaaagugggauauauuucagccauaaaagugaacggauucaccuguacagguguggugacagaagcagaaaccuacacaaacuuuguugguuaugucaccaccacguuuaagagaaagcacuuucgcccuaugccggaugcgugcagagccgcauacaacuggaagauggcuggugaccccagguaugaagagucucugcacaauccguacccugacuaccacuggcuccgaacugucaagaccaccaaggagucccucgucaucauaucuccgagcguugcagauuuggacccguaugauaaaucccuucacucgagaguuuuuccuggcggaaaaugcucaggaauaaccguguccuccacuugcugcucuacuaaccacgacuacaccaucuggaugccugaaaauccuagacugggaacuucgugugacauuuucaccaauaguagagggaagagggcaucgaaagggggcaagacuuguggauuuguggaugaaagaggcuuguacaagucucuaaagggagcaugcaagcugaagcuaugugggguucuaggacuuagacuuauggacggaacauggguugcaauucagacaucagaugagaucaaauggugcucuccugaucagcuaguaaaucuacacgacuuucacucggaugagauugaacaucuuguuguggaggaguuggucaaaaagagggaagagugucuggacgcacuggagacuauuaugaccacaaaguccgugaguuucagacgucuuagucauuugaggaagcuagucccuggguuuggaaaggcguauaccauauucaacaaaaccuugauggaggcugaugcucacuauaaaucaauccggacuuggaaugaaaucauccccucuaaaggguguuuaagaguuggggggagaugucauccucauguaaacgggguguucuucaauggcauuauacuggguccugacggacauguucuaaucccagagaugcaaucgucccuccuccaccagcauauggaauuguuggaguccucagucaucccguugaugcaucccuuagcagacccgucaacagucuuuaaagacggcgacgaggcagaggacuuuguugagguucaccuuccggaugugcacaagcagaucucggggguugaucuuggucucccaaacugggggaaguaugugcugauaagugcaggugcucugacugcauuaauguugaugauuuucuuaaugacguguugcagaaaggcuaauagagcagagucaauacaacacaauccuggagagacagggaggaaagugucgguaacuucucacaacggaagggucauaucuucaugggaaucauauaaaagcggaggugagaccaaacuguga

SEQ ID NO: 63176 - RNA, 1575 nt, Artificial Sequence
  derived and/or modified CDS sequence (wt) from glycoprotein__RABV__JN936704.1
augguuccucaaguucuuuuguuuguuccccuucuagccuucucgucauguuucgggaaauuccccaucuacacgauaccagacaaacuugguccauggagucccaucgauauacaucaucucagcuguccgaacaaucuuguuguggaagaugaagggugcaccaaucugucuggauuuuccuacauggaacucaaagugggauauauuucagccauaaaagugaacggauucaccuguacagguguggugacagaagcagaaaccuacacgaacuuuguugguuaugucaccaccacguuuaagagaaagcacuuucgcccuaugccggaugcgugcagagccgcauacaacuggaagauggcuggugaccccagguaugaagagucucugcacaauccguacccugacuaccacuggcuccgaacugucaagaccaccaaggagucccuugucaucauaucuccgagcguugcagauuuggacccguacgauaaaucccuucacucgagaguuuuuccuggcggaaaaugcucaggaauaaccguguccuccacuugcugcucuacuaaccacgacuacaccaucuggaugccugaaaaucccagacugggaacuucgugugacauuuucaccaauaguagagggaagagggcaucaaaaggaggcaagacuuguggauuuguggaugaaagaggcuuguacaagucucuaaagggagcaugcaagcugaagcuaugugggguucuaggacuuagacuuauggacggaacauggguugcaauucagacaucagaugagaucaaauggugcucuccugaucagcuaguaaaucuacacgacuuucacucggaugagauugaacaucuuguuguggaggaguuggucaaaaagagggaagagugucuggacgcacuggagacuauuaugaccacaaaguccgugaguuucagacgucuuagucauuugaggaagcuagucccuggguuuggaaaggcguauaccauauucaacaaaaccuugauggaggcugaugcucacuauaaaucaauccggacuuggaaugaaaucauccccucuaaaggguguuuaagaguuggggggagaugucauccucaugugaacgggguguucuucaacggcauuauacuggguccugacggacauguucuaaucccagagaugcaaucgucccuccuccaccagcauauggaauuguuggaguccucagucaucccguugaugcaucccuuagcagacccgucaacagucuuuaaagacggcgacgaggcagaggacuuuguugagguucaccuuccagaugugcacaagcagaucucggggguugaucuuggucucccaaacugggggagguaugugcugauaagugcaggugcucugacugcauuaauguugaugauuuucuuaaugacguguugcagaaaggcuaauagagcagaguuaauacaacacaauccuggagagacagggaggaaagugucgguaacuucucacaacggaagggucauaucuucaugggaaucauauaaaagcggaggugagaccaaacuguga

SEQ ID NO: 63177 - RNA, 1575 nt, Artificial Sequence
  derived and/or modified CDS sequence (wt) from glycoprotein__RABV__JN936705.1
augauuccucagguucuuuuguuuguuccccuucuaguguucucgucguguuuugggaaauuccccauuuacacgauaccagacaaacuugguccauggagucccaucgauauacaucaucucagcuguccgaacaauaugguuguggaagaugaaggaugcaccaaucugucuggauuuuccuacauggaacucaaagugggauauauuucagccauaaaggugaacggguucaccuguacagguguggugacagaagcagaaaccuacacuaacuuuguugguuaugucaccaccacguuuaagagaaagcacuuucgcccuaugccggaugcgugcagagccgcauacaacuggaagauggcuggugaccccagguaugaagagucucugcacaauccguacccugacuaccacuggcuccgcacugucaagaccaccaaggagucccuugucaucauaucuccgagcguugcagauuuggacccguacgauaaaucccuucacucgagaguuuuuccuggcggaaaaugcucaggaauaaccguguccuccacuugcugcucuacuaaccacgacuacaccaucuggaugccugaaaauccuagacugggaacuucgugugacauuuucaccaauaguagagggaagagggcaucaaaagggggcaagacuuguggauuuguggaugaaagaggcuuguacaagucucuaaagggagcaugcaagcugaagcugugugggguucuaggacuuagacuuauggacggaacaugggucgcaauucagacaucagaugagaucaaauggugcucuccugaucagcuaguaaaucuacaugacuuucacucggaugagauugaacaucuuguuguggaggaguuggucaaaaagagggaagagugucuggacgcacuggagacuauuaugaccacaaaguccgugaguuucagacgucuuagucauuugaggaagcuagucccuggguuuggaaaggcguauaccauauucaacaaaaccuugauggaggcugaugcucacuauaagucaauccggacuuggaaugaaaucauccccucuaaaggguguuuaagaguuggggggagaugucauccucaugugaacgggguguucuucaacggcauuauacuggguccugacggacauguucuaaucccagagaugcaaucgucccuccuccaccagcauauggaauuguuggaguccucagucaucccuuugaugcaucccuuagcagacccgucaacagucuuuaaggacggcgacgaggcagaggacuuuguugagguucaccuuccggaugugcacaagcagaucucggggguugaucuuggucucccaaacugggggaaguaugugcugauaagugcaugugcucugacugcauuaauguugacgauuuucuuaaugacguguugcagaaagacuaguagagcagagucgauacaacacaguccuggagagacagggaggaaagugucgguaacuucucacaacggaagggucauaucuucaugggaaucauauaaaagcggaggugagaccaagcuguga

SEQ ID NO: 63178 - RNA, 1575 nt, Artificial Sequence
  derived and/or modified CDS sequence (wt) from glycoprotein__RABV__JN936706.1
augauuccucaaguucuuuuguuuguucccuuucuaguuuucucgucguguuuugggaaauuccccauuuacacgauaccagacaaacuugguccauggagucccaucgauauacaucaucucagcuguccgaacaaucugguuguggaagaugaaggaugcaccaaucugucuggauuuuccuacauggaacucaaagugggauauauuucagccauaaaagugaacggauucaccuguacagguguggugacagaagcagaaaccuacaccaacuuuguugguuaugucaccaccacguuuaagagaaagcacuuucgcccuaugccggaugcgugcagagccgcauacaacuggaagauggcuggugacccuagguaugaagagucucugcacaauccguacccugacuaccacuggcuccggacugucaagaccaccaaggagucccuugucaucauaucuccgagcguugcagauuuggacccguacgauaaaucucuucacucaagaguuuuuccuggcggaaaaugcucaggaauaaccguguccuccacuugcugcucuacuaaccacgacuacaccaucuggaugccugaaaauccuagacugggaacuucgugugacauuuucaccaauaguagagggaagagggcaucaaaaggaggcaagacuuguggauuuguggaugaaagaggcuuguacaagucucuaaagggagcaugcaagcugaagcuaugugggguucuaggacuuagacuuauggacggaacaugggucgcaauccagacaucagaugagaucaaguggugcucuccugaucagcuaguaaaucuacacgacuuucacucggaugagauugaacaucuuguuguggaggaguuggucaaaaagagggaagagugucuggacgcacuggagacuauuaugaccacaaaguccgugaguuucagacgucuuagucauuugaggaagcuagucccuggguuuggaaaggcguauaccauauucaacaaaaccuugauggaggcugaugcucacuauaaaucaauccggacuuggaaugaaaucauccccucuaaaggguguuuaagaguuggggggagaugucauccucaugugaacgggguguucuuuaacggcauuauacuggguccugacggacauguucuaaucccagagaugcaaucgucccuccuccaccagcauauggaauuguuggaguccucagucaucccuuugaugcaucccuuagcagacccgucaacagucuuuaaagacggcgacgaggcagaggacuuuguugagguucaccuuccggaugugcacaagcagaucucggggguugaucuuggucucccaaacugggggaaguaugugcugauaagugcaggugcucugacugcauuaauguugaugacuuucuuaaugacguguugcagaaagacuaauagagcagagucaauacaacacaguccuggagagacagggaggaaagugucgguaacuucucacaacggaagggucauaucuucaugggaaucauauaaaagcggaggugagaccaagcuguga

SEQ ID NO: 63179 - RNA, 1575 nt, Artificial Sequence
  derived and/or modified CDS sequence (wt) from glycoprotein__RABV__JN936707.1
augguuccucaagccuuucuguuuguaccccuucuggccguuccauuguguuuugggaaauuccccauuuacacgauaccagacaaacuuggucccuggagucccauugacauacaucaucucagcuguccgaauaauuugguuguggaagaugaaggauguaccaaucugucaggauuuucauacauggaacuuaaaguaggauacauuucagccauaaaggugaacggguucacuuguacggguguggugacggaagcagaaaccuacacuaacuuuguuggcuaugucaccaccacguuuaagagaaagcacuuucgaccaacuccggaugcaugcagauccgcauacaauuggaagauggcuggugaccccagauacgaagagucucugcacaaucccuauccugauuaucauuggcuccggacuguaaaaaccaccaaagaguccuuuguuaucauaucuccaaguguggcagaucuagauccguacgauaaaucccuucauucgagaguuuuuccuagaggaaaaugcucaggaauaacggugucuucuaccuacugcucuacuaaccaugacuacaccaucuggaugccugaaaaucccagacuggggaccucuugugauauuuucaccaacagcagagggaagagagcauccaaagggagcaagaccuguggauuuguagaugagagaggcuuguacaaaucucuaaaaggagcaugcaaacugaagcugugugggguucuuggacuuagacuuauggauggaacaugggucgcgauucagacaucagacgagaccaaguggugcccuccugaccagcuagugaaucuacaugacuuucauucagaugagauugaacaucuuguuguggaggaguuggucaagaaaagggaagagugucuagaugcacuggaguccaucaugaccaccaaguccgugaguuuccgacgucucagucacuugaggaaacuugugcccggguucggaaaagcauacaccauauucaauaagaccuugauggaggcugaugcucacuacaaaucgguccggacuuggaacgagaucauccccucuaaaggguguuugagaguuggaggcagaugucauccccaugugaacgggguguuuuuuaaugguauuauccuaggcccugacggccaugucuugaucccggaaaugcagucaucucuccuucagcaacauauggaguuguuggaauccucggucauccccuuaaugcauccuuuggcagauccaucaacgguguuuaaagauggugacgaggcggaggauuuuguugagguucaccuuccagaugugcauaagcaggucucaggggucgaucucggucucccaagcugggggaaguauguguugaugagcgcaggcauuuugacugcacugauguugacgauuuucuuaaugacguguugccgaaggacuaauagagcagaaucgauacaacacagucuuggagagacagggaggaaagugucgguaaccucccaaagcgggagggucauaucuucaugggagucauacaaaagcggaggugagaccaagcuguaa

SEQ ID NO: 63180 - RNA, 1575 nt, Artificial Sequence
  derived and/or modified CDS sequence (wt) from glycoprotein__RABV__JN936708.1
augauuccucaaguucuuuuguuuguuccccuucuaguuuucucgucguguuuugggaaauuccccauuuacacgauaccagacaaacuugguccauggagucccaucgauauacaucaucucagcuguccgaacaaucugguuguggaagaugaaggaugcaccaaucugucuggauuuuccuacauggaacucaaagugggauauauuucagccauaaaagugaacggauucaccuguacagguguggugacagaagcagaaaccuacacgaacuuuguugguuaugucaccaccacguuuaagagaaagcacuuucgcccuacgccggaugcguguagagccgcauacaacuggaagauggcuggugaccccagguaugaagagucucugcacaauccguacccugauuaccacuggcuccgaacugucaagaccuccaaggagucccuugucaucauaucuccgagcguugcagauuuggacccguacgauaaaucccuucacucgagaguuuuuccuggcggaaaaugcucaggaauaaccguguccuccacuugcugcucuacuaaccacgacuacaccaucuggaugccugaaaauccuagacugggaacuucgugugacauuuucaccaauaguagagggaagagggcaucaaaagggggcaagacuuguggauuuguggaugaaagaggcuuguacaagucucuaaagggagcaugcaagcugaagcuaugugggguucuaggacuuagacuuauggacggaacaugggucgcaauucagacaucagaugagaucaaauggugcucuccugaucagcuaguaaaucuacacgacuuucacucagaugagauugaacaucuuguuguggaggaguuggucaaaaagagggaagagugucuggacgcacuggagaccauuaugaccacaaaguccgugaguuucaggcgucuuagucauuugaggaagcuagucccuggguuuggaaaggcguauaccauauucaacaaaaccuugauggaggcugaugcucacuauaaaucaauccggacuuggaaugaaaucauccccucuaaaggguguuuaagaguuggggggagaugucauccucaugugaacgggguguucuucaacggcauuauacuggguccugacggacauguucuaaucccagagaugcaaucgucccuccuccaccagcauauggaauuguuagaguccucagucaucccuuugaugcaucccuuagcagacccgucaacaguuuuuaaagacggcgacgaggcagaggacuuuguugagguucaccuuccggaugugcacaagcagaucucggggguugaucuuggucucccaaacugggggaaguacgugcugguaagugcaggugcucugacugcauuaauguugaugauuuucuuaaugacguguugcagaaagacuaauagagcagagucaauacaacacaguccuggagagacagggaggaaagugucgguaacuucucacaacggaagggucauaucuucaugggaaucauauaaaaguggaggugagaccaagcuguga

SEQ ID NO: 63181 - RNA, 1575 nt, Artificial Sequence
  derived and/or modified CDS sequence (wt) from glycoprotein__RABV__JN936709.1
augauuccucaaguucuuuuguuuguucccuuucuaguuuucucguuguguuuugggaaauuccccauuuacacgauaccagacaaacuugguccauggagucccaucgauauacaucaucucagcuguccgaacaaucugguuguggaagaugaaggaugcaccaaucugucuggauuuuccuacauggaacucaaagugggauauauuucagccauaaaagugaacggauucaccuguacagguguggugacagaagcagaaaccuacacuaacuuuguugguuaugucacaaccacguuuaagagaaagcacuuucgcccuaugccggaugcguguagagccgcauacaacuggaagauggcuggugaccccagguaugaagagucucugcacaauccguacccugacuaccacuggcuccgaacugucaagaccaccaaggagucccuugucaucauaucuccgagcguugcagauuuggacccguacgauaagucccuucacucgagaguuuuuccuggcggaaaaugcucaggaauaaccguguccuccacuugcugcucuacuaaccacgacuacaccaucuggaugccugaaaacccuagacugggaacuucgugugacauuuucaccaauaguagagggaagagggcaucaaaagggggcaagacuuguggauuuguggaugaaagaggcuuguacaagucucuaaagggagcaugcaagcugaagcuaugugggguucuaggacuuagacuuauggacggaacaugggucgcaauucagacgucagaugagaucaaauggugcucuccugaucagcuaguaaaucuacacgacuuucacucggaugagauugaacaucuuguuguggaggaguuggucaaaaagagagaagagugucuggacgcacuggagacuauuaugaccacaaaguccgugaguuucagacgucuuagucauuugaggaagcuagucccuggguuuggaaaggcguauaccauauucaacaaaaccuugauggaggcugaugcucacuauaaaucaauccggacuuggaaugaaaucauccccucuaaaggguguuuaagaguuggggggagaugucauccucaugugaacgggguguucuucaacggcauuauacuggguccugacggacauguucuaaucccagagaugcaaucgucccuccuccaccagcauauggaauuguuggaguccucagucaucccuuugaugcaucccuuagcagacccgucaacagucuuuaaagacggcgacgaggcagaggacuuuguugagguucaccuuccagaugugcacaagcagauuucggggguugaucuuggucucccaaacugggggaaguaugugcugauaagugcaggugcucugacugcauuaauguugaugauuuucuuaaugacguguugcagaaagacuaauagagcagagucaauacaacacaguccuggagagacagggaggaaagugucgguaacuucucacaacggaagggucauaucuucaugggaaucauauaaaagcggaggugagaccaagcuguga

SEQ ID NO: 63182 - RNA, 1575 nt, Artificial Sequence
  derived and/or modified CDS sequence (wt) from glycoprotein__RABV__JN936710.1
augauuccucaaguucuuuuguuuguuccccuucuaguuuucucgucguguuuugggaaauuccccauuuacacgauaccagacaaacuugguccauggagucccaucgauauacaucaucucagcuguccgaacaaucugguuguggaagaugaaggaugcaccaaucugucuggauuuuccuacauggaacucaaagugggauauauuucagccauaaaagugaacggauucaccuguacagguguggugacagaagcagaaaccuacacgaacuuuguugguuaugucaccaccacguuuaagagaaagcacuuucgcccuacgccggaugcguguagagccgcauacaacuggaagauggcuggugaccccagguaugaagagucucugcacaauccguacccugauuaccacuggcuccgaacugucaagaccuccaaggagucccuugucaucauaucuccgagcguugcagauuuggacccguacgauaaaucccuucacucgagaguuuuuccuggcggaaaaugcucaggaauaaccguguccuccacuugcugcucuacuaaccacgacuacaccaucuggaugccugaaaauccuagacugggaacuucgugugacauuuucaccaauaguagagggaagagggcaucaaaagggggcaagacuuguggauuuguggaugaaagaggcuuguacaagucucuaaagggagcaugcaagcugaagcuaugugggguucuaggacuuagacuuauggacggaacaugggucgcaauucagacaucagaugagaucaaauggugcucuccugaucagcuaguaaaucuacacgacuuucacucagaugagauugaacaucuuguuguggaggaguuggucaaaaagagggaagagugucuggacgcacuggagacuauuaugaccacaaaguccgugaguuucaggcgucuuagucauuugaggaagcuagucccuggguuuggaaaggcguauaccauauucaacaaaaccuugauggaggcugaugcucacuauaaaucaauccggacuuggaaugaaaucauccccucuaaaggguguuuaagaguuggggggagaugucauccucaugugaacgggguguucuucaacggcauuauacuggguccugacggacauguucuaaucccagagaugcaaucgucccuccuccaccagcauauggaauuguuagaguccucagucaucccuuugaugcaucccuuagcagacccgucaacaguuuuuaaagacggcgacgaggcagaggacuuuguugagguucaccuuccggaugugcacaagcagaucucggggguugaucuuggucucccaaacugggggaaguacgugcugguaagugcaggugcucugacugcauuaauguugaugauuuucuuaaugacguguugcagaaagacuaauagagcagagucaauacaacacaguccuggagagacagggaggaaagugucgguaacuucucacaacggaagggucauaucuucaugggaaucauauaaaaguggaggugagaccaagcuguga

SEQ ID NO: 63183 - RNA, 1575 nt, Artificial Sequence
  derived and/or modified CDS sequence (wt) from glycoprotein__RABV__JN936711.1
augguuccucaagccguucuguuuguaccccuucuggccguuccauuguguuuugggaaauuccccauuuacacgauaccagacaaacucggucccuggagucccauugauauacaucaucucagcuguccgaauaauuugguuguggaggaugaaggauguaccaaucugucaggauuuucauacauggaacuuaaaguaggauacauuucagccauaaaggugaacggguucacuuguacggguguggugacggaagcagaaaccuacaccaacuuuguuggcuaugucaccaccacguuuaagagaaagcacuuucgaccaacaccggaugcgugcagauccgcauacaauuggaagauggcuggugaccccagauacgaagagucucugcacaaucccuauccugauuaucauuggcuccggacuguaaaaaccaccaaagaguccuuugucaucauaucuccaaguguggcagaucuagauccguacgauaaaucccuucauucgagaguuuuuccuagaggaaaaugcucaggaauaacggugucuucuaccuacugcucuacuaaccaugacuacaccaucuggaugccugaaaaucccagacuggggaccucuugugauauuuucaccaacagcagagggaagagagcauccaaagggagcaagaccuguggauuuguagaugagagaggcuuguacaaaucucuaaaaggagcaugcaaacugaagcugugugggguucuuggacuuagacuuauggauggaacaugggucgcgauucagacaucagacgagaccaaguggugcccuccugaccagcuagugaaucuacaugacuuucauucggaugagauugaacaucuuguuguggaggaguuggucaagaaaagggaagagugucuagaugcacuggaguccaucaugaccaccaaguccgugaguuuccgacgucucagucacuugaggaaacuugugccuggauucggaaaagcauacaccauauucaauaagaccuugauggaggcugaugcucacuacaaaucgguccggacuuggaacgagaucauccccucuaaaggguguuugagaguuggaggcagaugucauccccaugugaacgggguguuuuuuaaugguauuauccuaggcccugacggccaugucuugaucccggaaaugcagucaucucuccuucagcagcauauggaguuguuggaauccucggucauccccuuaaugcauccuuuggcagauccaucaacgguuuuuaaagauggugacgaggcggaggauuuuguugagguucaccuuccagaugugcauaagcaggucucaggggucgaucucggucucccaagcugggggaaguauguguugaugagcgcaggcauuuugacugcacugauguugaugauuuucuuaaugacguguugccgaaggaccaauagagcagaaucaauacaacacagucuuggagagacagggaggaaaguuucgguaaccucccaaaacgggagggucauaucuucaugggagucauacaaaagcggaggugagaccaagcuguaa

SEQ ID NO: 63184 - RNA, 1575 nt, Artificial Sequence
  derived and/or modified CDS sequence (wt) from glycoprotein__RABV__JN936712.1
augauuccucaaguucuuuuguuuguuccccuucuaguuuucucguuguguuuugggaaauuccccauuuacacgauaccagacaaacuugguccauggagucccaucgauauacaucaucucagcuguccgaacaaucugguuguggaagaugaaggaugcaccaaucugucuggauuuuccuacauggaacucaaagugggauauauuucagccauaaaagugaacggauucaccuguacagguguggugacagaagcagaaaccuacacuaacuuuguugguuaugucacaaccacguuuaagagaaagcacuuucgcccuaugccggaugcguguagagccgcauacaacuggaagauggcuggugaccccagguaugaagagucucugcacaauccguacccugacuaccacuggcuccgaacugucaagaccaccaaggagucccuugucaucauaucuccgagcguugcagauuuggacccguacgauaagucccuucacucgagaguuuuuccuggcggaaaaugcucaggaauaaccguguccuccacuugcugcucuacuaaccacgacuacaccaucuggaugccugaaaacccuagacugggaacuucgugugacauuuucaccaauaguagagggaagagggcaucaaaagggggcaagacuuguggauuuguggaugaaagaggcuuguacaagucucuaaagggagcaugcaagcugaagcuaugugggguucuaggacuuagacuuauggacggaacaugggucgcaauucagacgucagaugagaucaaauggugcucuccugaucagcuaguaaaucuacacgacuuucacucggaugagauugaacaucuuguuguggaggaguuggucaaaaagagagaagagugucuggacgcacuggagacuauuaugaccacaaaguccgugaguuucagacgucuuagucauuugaggaagcuagucccuggguuuggaaaggcguauaccauauucaacaaaaccuugauggaggcugaugcucacuauaaaucaauccggacuuggaaugaaaucauccccucuaaaggguguuuaagaguuggggggagaugucauccucaugugaacgggguguucuucaacggcauuauacuggguccugacggacauguucuaaucccagagaugcaaucgucccuccuccaccagcauauggaauuguuggaguccucagucaucccuuugaugcaucccuuagcagacccgucaacagucuuuaaagacggcgacgaggcagaggacuuuguugagguucaccuuccagaugugcacaagcagauuucggggguugaucuuggucucccaaacugggggaaguaugugcugauaagugcaggugcucugacugcauuaauguugaugauuuucuuaaugacguguugcagaaagacuaauagagcagagucaauacaacacaguccuggagagacagggaggaaagugucgguaacuucucacaacggaagggucauaucuucaugggaaucauauaaaagcggaggugagaccaagcuguga

SEQ ID NO: 63185 - RNA, 1575 nt, Artificial Sequence
  derived and/or modified CDS sequence (wt) from glycoprotein__RABV__JN936713.1
augguuccucaagccguucuguuuguaccccuucuggccguuccauuguguuuugggaaauuccccauuuacacgauaccagacaaacucggucccuggagucccauugauauacaucaucucagcuguccgaauaauuugguuguggaggaugaaggauguaccaaucugucaggauuuucauacauggaacuuaaaguaggauacauuucagccauaaaggugaacggguucacuuguacggguguggugacggaagcagaaaccuacaccaacuuuguuggcuaugucaccaccacguuuaagagaaagcacuuucgaccaacaccggaugcgugcagauccgcauacaauuggaagauggcuggugaccccagauacgaagagucucugcacaaucccuauccugauuaucauuggcuccggacuguaagaaccaccaaagaguccuuugucaucauaucuccaaguguggcagaucuagauccguacgauaaaucccuucauucgagaguuuuuccuagaggaaaaugcucaggaauaacggugucuucuaccuacugcucuacuaaccaugacuacaccaucuggaugccugaaaaucccagacuggggaccucuugugauauuuucaccaacagcagagggaagagagcauccaaagggagcaagaccuguggauuuguagaugagagaggcuuguacaaaucucuaaaaggagcaugcaaacugaagcugugugggguucuuggacuuagacuuauggauggaacaugggucgcgauucagacaucagacgagaccaaguggugcccuccugaccagcuggugaaucuacaugacuuucauucggaugagauugaacaucuuguuguggaggaguuggucaagaaaagggaagagugucuagaugcacuggaguccaucaugaccaccaaauccgugaguuuccgacgucucagucacuugaggaaacuugugccuggauucggaaaagcauacaccauauucaauaagaccuugauggaggcugaugcucacuacaaaucgguccggacuuggaacgagaucauccccucuaaaggguguuugagaguuggaggcagaugucauccccaugugaacgggguguuuuuuaaugguauuauccuaggcccugacggccaugucuugaucccggaaaugcagucaucucuccuucagcagcauauggaguuguuggaauccucggucauccccuuaaugcauccuuuggcagauccaucaacgguuuuuaaagauggugacgaggcggaggauuuuguugagguucaccuuccagaugugcauaagcaggucucaggggucgaucucggucucccaagcugggggaaguauguguugaugagcgcaggcauuuugacugcacugauguugaugauuuucuuaaugacguguugccgaaggaccaauagagcagaaucaauacaacacagucuuggagagacagggaggaaagucucgguaaccucccaaaacgggagggucauaucuucaugggagucauacaaaagcggaggugagaccaagcuguaa

SEQ ID NO: 63186 - RNA, 1575 nt, Artificial Sequence
  derived and/or modified CDS sequence (wt) from glycoprotein__RABV__JN936714.1
augauuccucaaguucuuuuguuuguuccccuucuaguuuucucgucguguuuugggaaauuccccauuuacacgauaccagacaaacuugguccauggagucccaucgauauacaucaucucagcuguccgaacaaucugguuguggaagaugaaggaugcaccaaucugucuggauuuuccuacauggaacucaaagugggauauauuucagcaauaaaagugaacggauucaccuguacagguguggugacagaagcagaaaccuacacuaacuuuguugguuaugucacaaccacguuuaagagaaagcacuuucgcccuaugccggaugcgugcagagccgcauacaacuggaagauggcuggugaccccagguaugaagagucucugcacaauccguacccugacuaccacuggcuccgaacugucaagaccaccaaggagucccuugucaucauaucuccgagcguugcagauuuggacccguacgauaagucccuucacucgagaguuuuuccuggcggaaaaugcucaggaauaaccguguccuccacuugcugcucuacuaaccacgacuacaccaucuggaugccugaaaacccuagacugggaacuucgugugacauuuucaccaauaguagagggaagagggcaucaaaagggggcaagacuuguggauuuguggaugaaagaggcuuguacaagucucuaaagggagcaugcaagcugaagcuaugugggguucuaggacuuagacuuauggacggaacaugggucgcaauucagacgucagaugagaucaaauggugcucuccugaucagcuaguaaaucuacacgacuuucacucggaugagauugaacaucuuguuguggaggaguuggucaaaaagagagaagagugucuggacgcacuggagacuauuaugaccacaaaguccgugaguuucagacgucuuagucauuugaggaagcuagucccuggguuuggaaaggcguauaccauauucaacaaaaccuugauggaggcugaugcucacuauaaaucaauccggacuuggaaugaaaucauccccucuaaaggguguuuaagaguuggggggagaugucauccucaugugaacgggguguucuucaacggcauuauacuggguccugacggacauguucuaaucccagagaugcaaucgucccuccuccaccagcauauggaauuguuggaguccucagucaucccuuugaugcaucccuuagcagacccgucaacagucuuuaaagacggcgacgaggcagaggacuuuguugagguucaccuuccagaugugcacaagcagauuucggggguugaucuuggucucccaaacugggggaaguaugugcugauaagugcaggugcucugacugcauuaaugucgaugauuuucuuaaugacguguugcagaaagacuaauagagcagagucaauacaacacaguccuggagagacagggaggaaagugucgguaacuucucacaacggaagggucauaucuucaugggaaucauauaaaagcggaggugagaccaagcuguga

SEQ ID NO: 63187 - RNA, 1575 nt, Artificial Sequence
  derived and/or modified CDS sequence (wt) from glycoprotein__RABV__JN936715.1
augguuccucaagcccuucuguuuguaccccuucuggccguuccauuguguuuugggaaauuccccaucuacacaauaccagacaaacucggucccuggagucccauugauauacaucaucucagcuguccgaauaauuugguuguggaggaugaaggauguaccaaucugucaggauuuucauacauggaacuuaaaguaggauacauuucagccauaaaggugaacggguucacuuguacggguguggugacggaagcagaaaccuacaccaacuuuguuggcuaugucaccaccacguuuaagagaaagcacuuucgaccaacaccggaugcgugcagauccgcauacaauuggaagauggcuggugaccccagauacgaagagucucugcacaaucccuauccugauuaucauuggcuccggacuguaaaaaccaccaaagaguccuuugucaucauaucuccaaguguggcagaucuagauccguacgauaaaucccuucauucgagaguuuuuccuagaggaaaaugcucaggaauaacggugucuucuaccuacugcucuacuaaccaugacuacaccaucuggaugccugaaaaucccagacuggggaccucuugugauauuuucaccaacagcagagggaagagagcauccaaagggagcaagaccuguggauuuguagaugagagaggcuuguacaaaucucuaaaaggagcaugcaaacugaagcugugugggguucuuggacuuagacuuauggauggaacaugggucgcgauucagacaucagacgagaccaaguggugcccuccugaccagcuagugaaucuacaugacuuucauucggaugagauugaacaucuuguuguggaggaguuggucaagaaaagggaagagugucuagaugcacuggaguccaucaugaccaccaaguccgugaguuuccgacgucucagucacuugaggaaacuugugccuggauucggaaaagcauacaccauauucaauaagaccuugauggaggcugaugcucacuacaaaucgguccggacuuggaacgagaucauccccucuaaaggguguuugagaguuggaggcagaugucauccccaugugaacgggguguuuuuuaaugguauuauccugggcccugacggccaugucuugaucccggaaaugcagucaucucuccuucagcagcauauggaguuguuggaauccucggucauccccuuaaugcauccuuuggcagauccaucaacgguuuuuaaagauggugacgaggcggaggauuuuguugagguucaccuuccagaugugcauaagcaggucucaggggucgaucucggucucccaagcugggggaaguauguguugaugagcgcaggcauuuugacugcacugauguugaugauuuucuuaaugacguguugccgaaggaccaauagagcagaaucaauacaacacagucuuggagagacagggaggaaagucucgguaaccucccaaaacgggagggucauaucuucaugggagucauacaagagcggaggugagaccaagcuguaa

SEQ ID NO: 63188 - RNA, 1575 nt, Artificial Sequence
  derived and/or modified CDS sequence (wt) from glycoprotein__RABV__JN936716.1
augauuccucaaguucuuuugcuuguuccccuucuaguuuucucgucguguuuugggaaauuccccauuuacacgauaccagacaaacuugguccauggagucccaucgauauacaucaucucagcuguccgaacaaucuggucguggaggaugaaggaugcaccaaucuguccggauuuuccuacauggaacucaaagugggauauauuucagccauaaaagugaacggauucaccuguacagguguggugacagaagcagaaaccuacacuaacuuuguugguuaugucaccaccacguuuaagagaaagcacuuucgcccuaugccggaugcgugcagagccgcauacaacuggaagauggcuggugaccccagguaugaagagucucugcacaauccguacccugacuaccacuggcuccgaacugucaagaccaccaaggagucccuugucaucauaucuccgagcguugcagauuuggacccguacgauaaaucccuucacucgagaguuuuuccuggcggaaaaugcucaggaauaaccguguccuccacuugcugcucuacuaaccacgacuacaccaucuggaugccugaaaacccuagacugggaacuucgugugacauuuucaccaauaguagagggaagagggcaucaaaagggggcaagacuuguggauuuguggaugaaagaggcuuguacaagucucuaaagggagcaugcaagcugaagcuaugugggguucuaggacuuagacuuauggacggaacaugggucgcaauucagacaucggaugagaucaaauggugcucuccugaucagcuaguaaaucuacacgacuuucacucggaugagauugaacaucuuguuguggaggaguuggucaaaaagagagaagagugucuggacgcccuggagacuauuaugaccacaaaguccgugaguuucagacgucuuagucauuugaggaagcuagucccuggguuuggaaaggcguauaccauauucaacaaaaccuugauggaggcugaugcucacuauaaaucaauccggacuuggaaugaaaucauccccucuaaaggguguuuaagaguuggggggagaugucauccucauguaaacgggguguucuucaacggcauuauacuggguccugacggacauguucuaaucccagagaugcaaucgucccuccuccaccagcauauggaauuguuggaguccucagucaucccuuugaugcaucccuuagcagacccgucaacagucuuuaaagacggcgacgaggcagaggacuuuguugagguucaccuuccggaugugcauaagcagauuucggggguugaucuuggucucccaaacugggggaaguaugugcugauaagugcaggugcucugacugcauuaaugucgaugauuuucuuaaugacguguugcagaaagacuaauagagcagagucaauacaacacaguccuggagagacagggaggaaagugucgguaacuucucacaacggaagggucauaucuucaugggaaucauauaaaaguggaggugagaccaagcuguga

SEQ ID NO: 63189 - RNA, 1575 nt, Artificial Sequence
  derived and/or modified CDS sequence (wt) from glycoprotein__RABV__JN936717.1
augauuccucaagcucuuuugcuuguuccccuucuaguuuucucgucguguuuugggaaauuccccauuuacacgauaccagacaaacuugguccauggagucccaucgauauacaucaucucagcuguccgaacaaucuggucguggaggaugaaggaugcaccaaucuguccggauuuuccuacauggaacucaaagugggauauauuucagccauaaaagugaacggauucaccuguacagguguggugacagaagcagaaaccuacacuaacuuuguugguuaugucaccaccacguuuaagagaaagcacuuucgcccuaugccggaugcgugcagagccgcauacaacuggaagauggcuggugaccccagguaugaagagucucugcacaauccguacccugacuaccacuggcuccgaacugucaagaccaccaaggagucccuugucaucauaucuccgagcguugcagauuuggacccguacgauaaaucccuucacucgagaguuuuuccuggcggaaaaugcucaggaauaaccguguccuccacuugcugcucuacuaaccacgacuacaccaucuggaugccugaaaacccuagacugggaacuucgugugacauuuucaccaauaguagagggaagagggcaucaaaagggggcaagacuuguggauuuguggaugaaagaggcuuguacaagucucuaaagggagcaugcaagcugaagcuaugugggguucuaggacuuagacuuauggacggaacaugggucgcaauucagacaucggaugagaucaaauggugcucuccugaucagcuaguaaaucuacacgacuuucacucggaugagauugaacaucuuguuguggaggaguuggucaaaaagagagaagagugucuggacgcccuggagacuauuaugaccacaaaguccgugaguuucagacgucuuagucauuugaggaagcuagucccuggguuuggaaaggcguauaccauauucaacaaaaccuugauggaggcugaugcucacuauaaaucaauccggacuuggaaugaaaucauccccucuaaaggguguuuaagaguuggggggagaugucauccucauguaaacgggguguucuucaacggcauuauacuggguccugacggacauguucuaaucccagagaugcaaucgucccuccuccaccagcauauggaauuguuggaguccucagucaucccuuugaugcaucccuuagcagacccgucaacagucuuuaaagacggcgacgaggcagaggacuuuguugagguucaccuuccggaugugcauaagcagauuucggggguugaucuuggucucccaaacugggggaaguaugugcugauaagugcaggugcucugacugcauuaaugucgaugauuuucuuaaugacguguugcagaaagacuaauagagcagagucaauacaacacaguccuggagagacagggaggaaagugucgguaacuucucacaacggaagggucauaucuucaugggaaucauauaaaaguggaggugagaccaagcuguga

SEQ ID NO: 63190 - RNA, 1575 nt, Artificial Sequence
  derived and/or modified CDS sequence (wt) from glycoprotein__RABV__JN936718.1
augauuccucaaguucuuuugcuuguuccccuucuaguuuucucgucguguuuugggaaauuccccauuuacacgauaccagacaaacuugguccauggagucccaucgauauacaucaucucagcuguccgaacaaucuggucguggaggaugaaggaugcaccaaucugucuggauuuuccuacauggaacucaaagugggauauauuucagccauaaaagugaacggauucaccuguacagguguggugacagaagcagaaaccuacacuaacuuuguugguuaugucaccaccacguuuaagagaaagcacuuucgcccuaugccggaugcgugcagagccgcauacaacuggaagauggcuggugaccccagguaugaagagucucugcacaauccguacccugacuaccacuggcuccgaacugucaagaccaccaaggagucccuugucaucauaucuccgagcguugcagauuuggacccguaugauaaaucccuucacucgagaguuuuuccuggcggaaaaugcucaggaauaaccguguccuccacuugcugcucuacuaaccacgacuacaccaucuggaugccugaaaacccuagacugggaacuucgugugacauuuucaccaauaguagagggaagagggcaucaaaagggggccagacuuguggauuuguggaugaaagaggcuuguacaagucucuaaagggagcaugcaagcugaagcuaugugggguucuaggacuuagacuuauggacggaacaugggucgcaauucagacaucggaugagaucaaauggugcucuccugaucagcuaguaaaucuacacgacuuucacucggaugagauugaacaucuuguuguggaggaguuggucaaaaagagagaagagugucuggacgcccuggagacuauuaugaccacaaaguccgugaguuucagacgucuuagucauuugaggaagcuagucccuggguuuggaaaggcguauaccauauucaacaaaaccuugauggaggcugaugcucacuauaaaucaauccggacuuggaaugaaaucauccccucuaaaggguguuuaagaguuggggggagaugucauccucauguaaacgggguguucuucaacggcauuauacuggguccugacggacauguucuaaucccagagaugcaaucgucccuccuccaccagcauauggaauuguuggaguccucagucaucccuuugaugcaucccuuagcagacccgucaacagucuuuaaagacggcgacgaggcagaggacuuuguugagguucaccuuccggaugugcauaagcagauuucggggguugaucuuggucucccaaacugggggaaguaugugcugauaagugcaggugcucugacugcauuaaugucgaugauuuucuuaaugacguguugcagaaagacuaauagagcagagucaauacaacacaguccuggagagacagggaggaaagugucgguaacuucucacaacggaagggucauaucuucaugggaaucauauaaaaguggaggugagaccaagcuguga

SEQ ID NO: 63191 - RNA, 1575 nt, Artificial Sequence
  derived and/or modified CDS sequence (wt) from glycoprotein__RABV__JN936719.1
augauuccucaagcccuucuguuuguaccccuucuggccguuccauuguguuuugggaaauuccccaucuacacaauaccagacaaacucggucccuggagucccauugauauacaucaucucagcuguccgaauaauuugguuguggaggaugaaggauguaccaaucugucaggauuuucauacauggaacuuaaaguaggauacauuucagccauaaaggugaacggguucacuuguacggguguggugacggaagcagaaaccuacaccaacuuuguuggcuaugucaccaccacguuuaagagaaagcacuuucgaccaacaccggaugcgugcagauccgcauacaauuggaagauggcuggugaccccagauacgaagagucucugcacaaucccuauccugauuaucauuggcuccggacuguaaaaaccaccaaagaguccuuugucaucauaucuccaaguguggcagaucuagauccguacgauaaaucccuucauucgagaguuuuuccuagaggaaaaugcucaggaauaacggugucuucuaccuacugcucuacuaaccaugacuacaccaucuggaugccugaaaaucccagacuggggaccucuugugauauuuucaccaacagcagagggaagagagcauccaaagggagcaagaccuguggauuuguagaugagagaggcuuguacaaaucucuaaaaggagcaugcaaacugaagcugugugggguucuuggacuuagacuuauggauggaacaugggucgcgauucagacaucagacgagaccaaguggugcccuccugaccagcuagugaaucuacaugacuuucauucggaugagauugaacaucuuguuguggaggaguuggucaagaaaagggaagagugucuagaugcccuggagucuaucaugaccaccaaguccgugaguuucagacgucucagucauuugaggaagcuagucccuggauucggaaaggcguauaccauauucaacaagaccuugauggaggcugaugcucacuauaaaucaauccggacuuggaaugaaaucauccccucuaaaggguguuugagaguuggaggcagaugucauccucaugugaacgggguguucuucaauggcauuauccuggguccugacggacauguucugaucccagaaaugcaaucgucccuccuucaccagcauauggaauuguuggaguccucagucaucccuuugaugcauccuuuggcagauccgucaacggucuuuaaagauggugacgaggcggaggauuuuguugagguucaccuuccggaugugcauaagcagaucucagggguugaucuuggucucccaagcugggggaaguaugugcugaugagugcaggugcucugacugcauugauguugaugauuuucuuaaugacguguugccgaaggacuaauagagcagaaucaauacaacacagucuuggagagacagggaggaaagugucgguaacuucccaaaacgggagggucauaucuucaugggaaucauacaaaagcggaggugagaccaagcuguaa

SEQ ID NO: 63192 - RNA, 1575 nt, Artificial Sequence
  derived and/or modified CDS sequence (wt) from glycoprotein__RABV__JN936720.1
augauuccucaagcucuguuguuuguaccucuucugguuuuuccauuguguuucgggaaauuccccauuuacacgauaccagacaaacucggccccuggagucccaucgauauacaucaccucagcuguccgaacaaucugguuguggaggacgaaggauguaccaaucugucaggauucucauacauggagcuuaaaguaggauauauuucggccauaaaggugaacggguucacuuguacgggugugguaacggaagcagaaaccuacacuaacuuugucgguuaugucaccaccacguuuaagagaaagcacuuccgaccaacaccggaugcaugcagaucagcauacaauuggaagauggcaggugaccccagauaugaagagucucugcacaaucccuauccugauuaucauuggcuccggacuguaaaaaccaccaaagagucuguuguuaucauaucuccaaguguggcagacuuagacccguacgauaaaucacuucauucgagaguuuuuccuagaggaaaaugcucaggaauaacggugucuucugccuacugcucuaccaaccaugauuauaccaucuggaugccugaaaauccuagacuggggaccucuugugauauuuucaccaacagcagagggaagagagcauccaaagggagcaagaccuguggauuuguggaugagagaggcuuguacaaaucucuaaaaggagcaugcaaacugaagcuguguggaguucuuggacuuaggcuuauggacggaaccugggucgcgauucagacaucaaacgagaccaaguggugcccuccugaucaacucgugaaucuacaugacuuucauucagaugagauugaacaucuuguuguggaggaguugguugagaagagggaggagugucuagaugcacuggaguccaucaugaccaccaaguccgugaguuuccgacgucucagucacuugaggaaacuugugccuggauucggaaaagcauacaccauauucaauaagaccuugauggaggcugaugcucacuacaaaucgguccggacuuggaacgagaucauccccucuaaaggguguuugagaguuggaggcagaugucauccccaugugaacgggguguuuuuuaaugguauuauccuaggcccugacggccaugucuugaucccggaaaugcagucaucucuccuucagcagcauauggaguuguuggaauccucggucauccccuuaaugcauccuuuggcagauccaucaacgguuuuuaaagauggugacgaggcggaggauuuuguugagguucaccuuccagaugugcauaagcaggucucaggggucgaucucggucucccaagcugggggaaguauguguugaugagcgcaggcauuuugacugcacugauguugaugauuuucuuaaugacguguugccgaaggaccaauagagcagaaucaauacaacacagucuuggagagacagggaggaaaguuucgguaaccucccaaaacgggagggucauaucuucaugggagucauacaaaagcggaggugagaccaagcuguaa

SEQ ID NO: 63193 - RNA, 1575 nt, Artificial Sequence
  derived and/or modified CDS sequence (wt) from glycoprotein__RABV__JN936721.1
augauuccucaagcucuguuguuuguaccucuucugguuuuuccauuguguuucgggaaauuccccauuuacacgauaccagacaaacucggccccuggagucccaucgauauacaucaccucagcuguccgaacaaucugguuguggaggacgaaggauguaccaaucugucaggauucucauacauggagcuuaaaguaggauauauuucggccauaaaggugaacggguucacuuguacgggugugguaacggaagcagaaaccuacacuaacuuugucgguuaugucaccaccacguuuaagagaaagcacuuccgaccaacaccggaugcaugcagaucagcauacaauuggaagauggcaggugaccccagauaugaagagucucugcacaaucccuauccugauuaucauuggcuccggacuguaaaaaccaccaaagagucuguuguuaucauaucuccaaguguggcagacuuagacccguacgauaaaucacuucauucgagaguuuuuccuagaggaaaaugcucaggaauaacggugucuucugccuacugcucuaccaaccaugauuauaccaucuggaugccugaaaauccuagacuggggaccucuugugauauuuucaccaacagcagagggaagagagcauccaaagggagcaagaccuguggauuuguggaugagagaggcuuguacaaaucucuaaaaggagcaugcaaacugaagcuguguggaguucuuggacuuaggcuuauggacggaaccugggucgcgauucagacaucaaacgagaccaaguggugcccuccugaucaacucgugaaucuacaugacuuucauucagaugagauugaacaucuuguuguggaggaguugguugaaaagagagaagagugucuggacgcccuggagacuauuaugaccacaaaguccgugaguuucagacgucuuagucauuugaggaagcuagucccuggguuuggaaaggcguauaccauauucaacaaaaccuugauggaggcugaugcucacuauaaaucaauccggacuuggaaugaaaucauccccucuaaaggguguuuaagaguuggggggagaugucauccucauguaaacgggguguucuucaacggcauuauacuggguccugacggacauguucuaaucccagagaugcaaucgucccuccuccaccagcauauggaauuguuggaguccucagucaucccuuugaugcaucccuuagcagacccgucaacagucuuuaaagacggcgacgaggcagaggacuuuguugagguucaccuuccggaugugcauaagcagauuucggggguugaucuuggucucccaaacugggggaaguaugugcugauaagugcaggugcucugacugcauuaaugucgaugauuuucuuaaugacguguugcagaaagacuaauagagcagagucaauacaacacaguccuggagagacagggaggaaagugucgguaacuucucacaacggaagggucauaucuucaugggaaucauauaaaaguggaggugagaccaagcuguga

SEQ ID NO: 63194 - RNA, 1575 nt, Artificial Sequence
  derived and/or modified CDS sequence (wt) from glycoprotein__RABV__JN936722.1
augauuccucaagcucuguuguuuguaccucuucugguuuuuccauuguguuucgggaaauuccccauuuacacgauaccagacaaacucggccccuggagucccaucgauauacaucaccucagcuguccgaacaaucugguuguggaggacgaaggauguaccaaucugucaggauucucauacauggagcuuaaaguaggauauauuucggccauaaaggugaacggguucacuuguacgggugugguaacggaagcagaaaccuacacuaacuuugucgguuaugucaccaccacguuuaagagaaagcacuuccgaccaacaccggaugcaugcagaucagcauacaauuggaagauggcaggugaccccagauaugaagagucucugcacaaucccuauccugauuaucauuggcuccggacuguaaaaaccaccaaagagucuguuguuaucauaucuccaaguguggcagacuuagacccguacgauaaaucacuucauucgagaguuuuuccuagaggaaaaugcucaggaauaacggugucuucugccuacugcucuaccaaccaugauuauaccaucuggaugccugaaaauccuagacuggggaccucuugugauauuuucaccaacagcagagggaagagagcauccaaagggagcaagaccuguggauuuguggaugagagaggcuuguacaaaucucuaaaaggagcaugcaaacugaagcuguguggaguucuuggacuuaggcuuauggacggaaccugggucgcgauucagacaucaaacgagaccaaguggugcccuccugaucaacucgugaaucuacaugacuuucauucagaugagauugaacaucuuguuguggaggaguugguugagaagagggaggagugucuagaugcacuggagucuauuaugaccacaaaguccgugaguuucagacgucuuagucauuugaggaagcuagucccuggguuuggaaaggcguauaccauauucaacaaaaccuugauggaggcugaugcucacuauaaaucaauccggacuuggaaugaaaucauccccucuaaaggguguuuaagaguuggggggagaugucauccucauguaaacgggguguucuucaacggcauuauacuggguccugacggacauguucuaaucccagagaugcaaucgucccuccuccaccagcauauggaauuguuggaguccucagucaucccuuugaugcaucccuuagcagacccgucaacagucuuuaaagacggcgacgaggcagaggacuuuguugagguucaccuuccggaugugcauaagcagauuucggggguugaucuuggucucccaaacugggggaaguaugugcugauaagugcaggugcucugacugcauuaaugucgaugauuuucuuaaugacguguugcagaaagacuaauagagcagagucaauacaacacaguccuggagagacagggaggaaagugucgguaacuucucacaacggaagggucauaucuucaugggaaucauauaaaaguggaggugagaccaagcuguga

SEQ ID NO: 63195 - RNA, 1575 nt, Artificial Sequence
  derived and/or modified CDS sequence (wt) from glycoprotein__RABV__JN936723.1
augauuccucaagcccuuuugcuuguuccucuucuggcuuuuccauuguguuuugggaaauuccccauuuacacgauaccagacaaacucgguccauggagucccaucgauauacaucaucucagcuguccgaacaaucuggucguggaggaugaaggaugcaccaaucugucaggauuuucauacauggaacucaaaguaggauauauuucagccauaaaggugaacggauucacuuguacagguguggugacagaagcagaaaccuacacuaacuuuguugguuaugucaccaccacguuuaagagaaagcacuuucgcccaacaccggaugcgugcagauccgcauacaauuggaagauggcuggugaccccagauaugaagagucucugcacaauccguauccugauuaucauuggcuccggacugucaaaaccaccaaagagucccuugucaucauaucuccaagcguggcagauuuagauccguacgauaaaucccuucauucgagaguuuuuccuagaggaaaaugcucaggaauaacggugucuuccaccugcugcucuacuaaccaugacuacaccaucuggaugccugaaaauccuagacuggggacuucuugugacauuuucaccaacagcagagggaagagagcauccaaagggagcaagaccuguggauuuguggaugaaagaggcuuguacaaaucucuaaaaggagcaugcaaacugaagcuaugugggguucuaggacuuagacuuauggacggaacaugggucgcgauucagacaucagacgagaucaaauggugcccuccugaucagcuagugaaucuacaugacuuucauucggaugagauugaacaucuuguuguggaggaguuggucaaaaagagagaagagugucuggacgcccuggagacuauuaugaccacaaaguccgugaguuucagacgucuuagucauuugaggaagcuagucccuggguuuggaaaggcguauaccauauucaacaaaaccuugauggaggcugaugcucacuauaaaucaauccggacuuggaaugaaaucauccccucuaaaggguguuuaagaguuggggggagaugucauccucauguaaacgggguguucuucaacggcauuauacuggguccugacggacauguucuaaucccagagaugcaaucgucccuccuccaccagcauauggaauuguuggaguccucagucaucccuuugaugcaucccuuagcagacccgucaacagucuuuaaagacggcgacgaggcagaggacuuuguugagguucaccuuccggaugugcauaagcagauuucggggguugaucuuggucucccaaacugggggaaguaugugcugauaagugcaggugcucugacugcauuaaugucgaugauuuucuuaaugacguguugcagaaagacuaauagagcagaaucaauacaacacaguccuggagagacagggaggaaagugucgguaacuucucacaacggaagggucauaucuucaugggaaucauauaaaaguggaggugagaccaagcuguga

SEQ ID NO: 63196 - RNA, 1575 nt, Artificial Sequence
  derived and/or modified CDS sequence (wt) from glycoprotein__RABV__JN936724.1
augauuccucaagcucuguuguuuguaccucuucugguuuuuccauuguguuucgggaaauuccccauuuacacgauaccagacaaacucggccccuggagucccaucgauauacaucaccucagcuguccgaacaaucugguuguggaggacgaaggauguaccaaucugucaggauucucauacauggagcuuaaaguaggauauauuucggccauaaaggugaacggguucacuuguacgggugugguaacggaagcagaaaccuacacuaacuuugucgguuaugucaccaccacguuuaagagaaagcacuuccgaccaacaccggaugcaugcagaucagcauacaauuggaagauggcaggugaccccagauaugaagagucucugcacaaucccuauccugauuaucauuggcuccggacuguaaaaaccaccaaagagucuguuguuaucauaucuccaaguguggcagacuuagacccguacgauaaaucacuucauucgagaguuuuuccuagaggaaaaugcucaggaauaacggugucuucugccuacugcucuaccaaccaugauuauaccaucuggaugccugaaaauccuagacuggggaccucuugugauauuuucaccaacagcagagggaagagagcauccaaagggagcaagaccuguggauuuguggaugagagaggcuuguacaaaucucuaaaaggagcaugcaaacugaagcuguguggaguucuuggacuuaggcuuauggacggaaccugggucgcgauucagacaucaaacgagaccaaguggugcccuccugaucaacucgugaaucuacaugacuuucauucagaugagauugaacaucuuguuguggaggaguugguugagaagagggaggagugucuagaugcacuggagacuauuaugaccacaaaguccgugaguuucagacgucuuagucauuugaggaagcuagucccuggguuuggaaaggcguauaccauauucaacaaaaccuugauggaggcugaugcucacuauaagucaauccggacuuggaaugaaaucauccccucuaaaggguguuuaagaguuggggggagaugucauccucaugugaacgggguguucuucaacggcauuauacuggguccugacggacauguccuaaucccagagaugcaaucgucccuccuccaccagcauauggaauuguuggaguccucagucaucccuuugaugcaucccuuagcagacccgucaacagucuuuaaggacggcgacgaggcagaggacuuuguugagguucaccuuccggaugugcacaagcagaucucggggguugaucuuggucucccaaacugggggaaguaugugcugauaagugcaggugcucugacugcauuaauguugacgauuuucuuaaugacguguugcagaaagacuaguagagcagagucgauacaacacaguccuggagagacagggaggaaagugucgguaacuucucacaacggaagggucauaucuucaugggaaucauauaaaagcggaggugagaccaagcuguga

SEQ ID NO: 63197 - RNA, 1575 nt, Artificial Sequence
  derived and/or modified CDS sequence (wt) from glycoprotein__RABV__JN936725.1
augauuccucaaguucuuuuguuuguuccccuucuaguuuucucgucguguuuugggaaauuccccauuuacacgauaccagacaaacuugguccauggagucccaucgauauacaucaucucagcuguccgaacaaucugguuguggaagaugaaggaugcaccaauuugucuggauuuuccuacauggaacucaaagugggauauauuucagccauaaaagugaacggauucaccuguacagguguggugaccgaagcagaaaccuacacuaacuuuguugguuaugucaccaccacguuuaagagaaagcacuuucgcccuaugccggaugcgugcagagccgcauacaacuggaagauggcuggugaccccagguaugaagagucucugcacaauccguaccccgacuaccacuggcuccgaacugucaagaccaccaaggagucccuugucaucauaucuccgagcguugcagauuuggacccguacgauaaaucccuucacucgagaguuuuuccuggcggaaaaugcucaggaauaaccguguccuccacuugcugcucuacuaaccacgacuacaccaucuggaugccugaaaauccuagacugggaacuucaugugacauuuucaccaauagcagagggaagagggcaucaaaagggggcaagacuuguggauuuguggaugaaagaggcuuguacaagucucuaaagggagcaugcaagcugaagcuaugugggguucuaggacuuagacuuauggacggaacaugggucgcgauucagacaucagaugagaucaaauggugcucuccugaucagcuaguaaaucuacacgacuuucacucggaugagauugaacaucuuguuguggaggaguuggucaaaaagagggaagagugucuggacgcacuggagacuauuaugaccacaaaguccgugaguuucagacgucuuagucauuugaggaagcuagucccuggguuuggaaaggcguauaccauauucaacaaaaccuugauggaggcugaugcucacuacaaaucaauccggacuuggaaugaaaucauccccuccaaaggguguuuaagaguuggggggagaugucauccucaugugaacgggguguucuucaacggcauuauacuggguccugacggacauguucuaaucccagagaugcagucgucccuccuccaccagcauauggaauuguuggaguccucagucaucccuuugaugcaucccuuagcagacccgucaacagucuuuaaagacggcgacgaggcagaggacuuuguugagguucaccuuccggaugugcacaagcagaucucggggguugaucuuggucucccaaacugggggaaguaugugcugauaagugcaggugcuuugacugcauuaauguugacgauuuucuuaaugacguguugcagaaagacuaauagagcagggucaauacaacacaguccuggagagacagggaggaaagugucggugacuucucacaacggaagggucauaucuucaugggaauccuauaaaagcggaagugagaccaagcuguga

SEQ ID NO: 63198 - RNA, 1575 nt, Artificial Sequence
  derived and/or modified CDS sequence (wt) from glycoprotein__RABV__JN936726.1
augauuccucaaguucuuuuguuuguuccccuucuaguuuucucgucguguuucgggaaauuccccauuuacacgauaccagacaaacuugguccauggagucccaucgauauacaucaccucagcuguccgaacaaucugguuguggaagaugaaggaugcaccaaucugucuggauuuuccuacauggaacucaaagugggauauauuucagccauaaaagugaacggauucaccuguacagguguggugaccgaagcagaaaccuacacuaacuuuguugguuaugucaccaccacguuuaagagaaagcacuuucgcccuaugccggaugcgugcagagccgcauacaacuggaagauggcuggugaccccagguaugaagagucucugcacaauccguaccccgacuaccacuggcuccgaacugucaagaccaccaaggagucccuugucaucauaucuccgagcguugcagauuuggacccguacgauaaaucccuucacucgagaguuuuuccuggcggaaaaugcucaggaauaaccguguccuccacuugcugcucuacuaaccacgacuacaccaucuggaugccugaaaauccuagacugggaacuucaugugacauuuucaccaacaguagagggaagagggccucaaaagggggcaagacuuguggauuuguggaugaaagaggcuuguacaagucucuaaggggagcaugcaagcugaagcuaugugggguucuaggacuuagacuuauggacggaacaugggucgcaauucagacaucagaugagaucaaauggugcucuccugaucagcuaguaaaucuacacgacuuucacucggaugagauugaacaucuuguuguggaggaguuggucaaaaagagggaagagugucuggacgcacuggagacuauuaugaccacaaaguccgugaguuucagacgucuuagucauuugaggaagcuagucccuggguuuggaaaggcguauaccauauucaacaagaccuugauggaggcugaugcucacuacaaaucaauccggacuuggaaugaaaucauccccuccaaaggguguuuaagaguuggggggagaugucauccucaugugaacgggguguucuucaacggcauuauacuggguccugacggacauguucuaaucccagagaugcagucgucccuccuccaccagcauauggaauuguuggaguccucagucaucccuuugaugcaucccuuagcagacccgucaacagucuuuaaagacggcgacgaggcagaggacuuuguugagguucaccuuccggaugugcacaagcagaucucggggguugaucuuggucucccaaacugggggaaguaugugcugauaagugcaggugcucugacugcauuaauguugacgauuuucuuaaugacguguugcagaaagacuaauagagcagagucaauacaacacaguccuggagagacagggaggaaagugucggugacuucucacaacggaagggucauaucuucaugggaaucauauaaaagcggaagugagaccaagcuguga

SEQ ID NO: 63199 - RNA, 1575 nt, Artificial Sequence
  derived and/or modified CDS sequence (wt) from glycoprotein__RABV__JN936727.1
augauuccucaaguucuuuuguuuguuccccuucuaguuuucucgucguguuuugggaaauuccccauuuacacgauaccagacaaacuugguccauggagucccaucgauauacaucaucucagcuguccgaacaaucugguuguggaagaugaaggaugcaccaauuugucuggauuuuccuacauggaacucaaagugggauauauuucagccauaaaagugaacggauucaccuguacagguguggugaccgaagcagaaaccuacacuaacuuuguugguuaugucaccaccacguuuaagagaaagcacuuucgcccuaugccggaugcgugcagagccgcauacaacuggaagauggcuggugaccccagguaugaagagucccugcacaauccguaccccgacuaccacuggcuccgaacugucaagaccaccaaggagucccuugucaucauaucuccgagcguugcagauuuggacccguacgauaaaucccuucacucgagaguuuuuccuggcggaaaaugcucaggaauaaccguguccuccacuugcugcucuacuaaccacgacuacaccaucuggaugccugaaaauccuagacugggaacuucaugugacauuuucaccaauagcagagggaagagggcaucaaaagggggcaagacuuguggauuuguggaugaaagaggcuuguacaagucucuaaagggagcaugcaagcugaagcuaugugggguucuaggacuuagacuuauggacggaacaugggucgcgauucagacaucagaugagaucaaauggugcucuccugaucagcuaguaaaucuacacgacuuucacucggaugagauugaacaucuuguuguggaggaguuggucaaaaagagggaagagugucuggacgcacuggagacuauuaugaccacaaaguccgugaguuucagacgucuuagucauuugaggaagcuagucccuggguuuggaaaggcguauaccauauucaacaaaaccuugauggaggcugaugcucacuacaaaucaauccggacuuggaaugaaaucauccccuccaaaggguguuuaagaguuggggggagaugucauccucaugugaacgggguguucuucaacggcauuauacuggguccugacggacauguucuaaucccagagaugcagucgucccuccuccaccagcauauggaauuguuggaguccucagucaucccuuugaugcaucccuuagcagacccgucaacagucuuuaaagacggcgacgaggcagaggacuuuguugagguucaccuuccggaugugcacaagcagaucucggggguugaucuuggucucccaaacugggggaaguaugugcugauaagugcaggugcuuugacugcauuaauguugacgauuuucuuaaugacguguugcagaaagacuaauagagcagggucaauacaacacaguccuggagagacagggaggaaagugucggugacuucucacaacggaagggucauaucuucaugggaauccuauaaaagcggaagugagaccaagcuguga

SEQ ID NO: 63200 - RNA, 1575 nt, Artificial Sequence
  derived and/or modified CDS sequence (wt) from glycoprotein__RABV__JN936728.1
augauuccucaaguucuuuuguuuguuccccuucuaguuuucucgucguguuuugggaaauuccccauuuacacgauaccagacaaacuugguccauggagucccaucgauauacaucaucucagcuguccgaacaaucugguuguggaagaugaaggaugcaccaauuugucuggauuuuccuacauggaacucaaagugggauauauuucagccauaaaagugaacggauucaccuguacagguguggugaccgaagcagaaaccuacacuaacuuuguugguuaugucaccaccacguuuaagagaaagcacuuucgcccuaugccggaugcgugcagagccgcauacaacuggaagauggcuggugaccccagguaugaagagucucugcacaauccguaccccgacuaccacuggcuccgaacugucaagaccaccaaggagucccuugucaucauaucuccgagcguugcagacuuggacccguacgauaaaucccuucacucgagaguuuuuccuggcggaaaaugcucaggaauaaccguguccuccacuugcugcucuacuaaccacgacuacaccaucuggaugccugaaaauccuagacugggaacuucaugugacauuuucaccaauaguagagggaagagggcaucaaaagggggcaagacuuguggauuuguggaugaaagaggcuuguacaagucucuaaagggagcaugcaagcugaagcuaugugggguucuaggacuuagacuuauggacggaacaugggucgcgauucagacaucagaugagaucaaauggugcucuccugaucagcuaguaaaucuacacgacuuucacucggaugagauugaacaucuuguuguggaggaguuggucaaaaagagggaagagugucuggacgcacuggagacuauuaugaccacaaaguccgugaguuucagacgucuuagucauuugaggaagcuagucccuggguuuggaaaggcguauaccauauucaacaaaaccuugauggaggcugaugcucacuacaaaucgauccggacuuggaaugaaaucauccccuccaaaggguguuuaagaguuggggggagaugucauccucaugugaacgggguguucuucaacggcauuauacuggguccugacggacauguucuaaucccagagaugcagucgucccuccuccaccagcauauggaauuguuggaguccucagucaucccuuugaugcaucccuuagcagacccgucaacagucuuuaaagacggcgacgaggcagaggacuuuguugagguucaccuuccggaugugcacaagcagaucucggggguugaucuuggucucccaaacugggggaaguaugugcugauaagugcaggugcuuugacugcauuaauguugacgauuuucuuaaugacguguugcagaaagacuaauagagcagggucaauacaacacaguccuggagagacagggaggaaagugucggugacuucucacaacggaagggucauaucuucaugggaaucauauaaaagcggaagugagaccaagcuguga

SEQ ID NO: 63201 - RNA, 1575 nt, Artificial Sequence
  derived and/or modified CDS sequence (wt) from glycoprotein__RABV__JN936729.1
augauuccucaaguucuuuuguuuguuccccuucuaguuuucucgucguguuuugggaaauuccccauuuacacgauaccagacaaacuugguccauggagucccaucgauauacaucaucucagcuguccgaacaaucugguuguggaagaugaaggaugcaccaauuugucuggauuuuccuacauggaacucaaagugggauauauuucagccauaaaagugaacggauucaccuguacagguguggugaccgaagcagaaaccuacacuaacuuuguugguuaugucaccaccacguuuaagagaaagcacuuucgcccuaugccggaugcgugcagagccgcauacaacuggaagauggcuggugaccccagguaugaagagucucugcacaauccguaccccgacuaccacuggcuccgaacugucaagaccaccaaggagucccuugucaucauaucuccgagcguugcagauuuggacccguacgauaaaucccuucacucgagaguuuuuccuggcggaaaaugcucaggaauaaccguguccuccacuugcugcucuacuaaccacgacuacaccaucuggaugccugaaaauccuagacugggaacuucaugugacauuuucaccaauagcagagggaagagggcaucaaaagggggcaagacuuguggauuuguggaugaaagaggcuuguacaagucucuaaagggagcaugcaagcugaagcuaugugggguucuaggacuuagacuuauggacggaacaugggucgcgauucagacaucagaugagaucaaauggugcucuccugaucagcuaguaaaucuacacgacuuucacucggaugagauugaacaucuuguuguggaggaguuggucaaaaagagggaagagugucuggacgcacuggagacuaucaugaccacaaaguccgugaguuucagacgucuuagucauuugaggaagcuagucccuggguuuggaaaggcguauaccauauucaacaaaaccuugauggaggcugaugcucacuacaaaucaauccggacuuggaaugaaaucauccccuccaaaggguguuuaagaguuggggggagaugucauccucaugugaacgggguguucuucaacggcauuauacuggguccugacggacauguucuaaucccagagaugcagucgucccuccuccaccagcauauggaauuguuggaguccucagucauaccuuugaugcaucccuuagcagacccgucaacagucuuuaaagacggcgacgaggcagaggacuuuguugagguucaccuuccggaugugcacaagcagaucucggggguugaucuuggucucccaaacugggggaaguaugugcugauaagugcaggugcuuugacugcauugauguugacgauuuucuuaaugacguguugcagaaagacuaauagagcagggucaauacaacacaguccuggagagacagggaggaaagugucggugacuucucacaacggaagggucauaucuucaugggaaucauauaaaagcggaagugagaccaagcuguga

SEQ ID NO: 63202 - RNA, 1575 nt, Artificial Sequence
  derived and/or modified CDS sequence (wt) from glycoprotein__RABV__JN936731.1
augauuccucaaguucuuuuguuuguuccccuucuaguuuucucgucguguuuugggaaauuccccauuuacacgauaccagacaaacuugguccauggagucccaucgauauacaucaucucagcuguccgaacaaucugguuguggaagaugaaggaugcaccaauuugucuggauuuuccuacauggaacucaaagugggauauauuucagccauaaaagugaacggauucaccuguacagguguggugaccgaagcagaaaccuacacuaacuuuguugguuaugucaccaccacguuuaagagaaagcacuuucgcccuaugccggaugcgugcagagccgcauacaacuggaagauggcuggugaccccagguaugaagagucucugcacaauccguaccccgacuaccacuggcuccgaacugucaagaccaccaaggagucccuugucaucauaucuccgagcguugcagauuuggacccguacgauaaaucccuucacucgagaguuuuuccuggcggaaaaugcucaggaauaaccguguccuccacuugcugcucuacuaaccacgacuacaccaucuggaugccugaaaauccuagacugggaacuucaugugacauuuucaccaauaguagagggaagagggcaucaaaagggggcaagacuuguggauuuguggaugaaagaggcuuguacaagucucuaaagggagcaugcaagcugaagcuaugugggguucuaggacuuagacuuauggacggaacaugggucgcgauucagacaucagaugagaucaaauggugcucuccugaucagcuaguaaaucuacacgacuuucacucggaugagauugaacaucuuguuguggaggaguuggucaaaaagagggaagagugucuggacgcacuggagacuauuaugaccacaaaguccgugaguuucagacgucuuagucauuugaggaagcuagucccuggguuuggaaaggcguauaccauauucaacaaaaccuugauggaggcugaugcucacuacaaaucaauccggacuuggaaugaaaucauccccucuaaaggguguuuaagaguuggggggagaugucauccucaugugaacgggguguucuucaacggcauuauacuggguccugacggacauguucuaaucccagagaugcagucgucccuccuccaccagcauauggaacuguuggaguccucagucaucccuuugaugcaucccuuagcagacccgucaacagucuuuaaagacggcgacgaggcagaggacuuuguugagguucaccuuccggaugugcacaagcagaucucggggguugaucuuggucucccaaacugggggaaguaugugcugauaagugcaggugcuuugacugcauuaauguugacgauuuucuuaaugacguguugcagaaagacuaauagagcagagucaauacaacacaguccuggagagacagggaggaaagugucggugacuucucacaacggaagggucauaucuucaugggaaucauauaaaagcggaagugagaccaagcuguga

SEQ ID NO: 63203 - RNA, 1575 nt, Artificial Sequence
  derived and/or modified CDS sequence (wt) from glycoprotein__RABV__JN936732.1
augauuccucaaguucuuuuguuuguuccccuucuaguuuucucgucguguuuugggaaauuccccauuuacacgauaccagacaaacuugguccauggagucccaucgauauacaucaucucagcuguccgaacaaucugguuguggaagaugaaggaugcaccaaucugucuggauuuuccuacauggaacucaaagugggauauauuucagccauaaaagugaacggauucaccuguacagguguggugaccgaagcagaaaccuacacuaacuuuguugguuaugucaccaccacguuuaagagaaagcacuuucgcccuaugccggaugcgugcagagccgcauacaacuggaagauggcuggugaccccagguaugaagagucucugcacaauccguaccccgacuaccacuggcuccgaacugucaagaccaccaaggagucccuugucaucauaucuccgagcguugcagauuuggacccguacgauaagucccuucacucgagaguuuuuccuggcggaaaaugcucaggaauaaccguguccuccacuugcugcucuacuaaccacgacuacaccaucuggaugccugaaaauccuagacugggaacuucaugugacauuuucaccaauaguagagggaagagggcaucaaaagggggcaagacuugcggauuuguggaugaaagaggcuuguacaagucucuaaagggagcaugcaagcugaagcuaugugggguucuaggacuuaggcuuauggacggaacaugggucgcgauucagacaucagaugagaucaaauggugcucuccugaucagcuaguaaaucuacacgacuuucacucggaugagauugaacaucuuguuguggaggaguuggucaaaaagagggaagagugucuggacgcacuggagacuauuaugaccacaaaguccgugaguuucagacgucuuagucauuugaggaagcuagucccuggguuuggaaaggcguauaccauauucaacaaaaccuugauggaggcugaugcucacuacaaaucaauccggacuuggaaugaaaucauccccuccaaaggguguuuaagaguuggggggagaugucauccucaugugaacgggguguucuucaacggcauuauacuggguccugacggacauguucuaaucccagagaugcagucgucccuccuccaccagcauauggaauuguuggaguccucagucaucccuuugaugcaucccuuagcagacccgucaacagucuuuaaagacggcgacgaggcagaggacuuuguugagguucaccuuccggaugugcacaagcagaucucggggguugaucuuggucucccaaacugggggaaguaugugcugauaagugcaggugcucugacugcauuaauguugacgauuuucuuaaugacguguugcagaaagacuaauagagcagagucaauacaacacaguccuggagaaacagggaggaaagugucggugacuucucacaacggaagggucauaucuucaugggaaucauauaaaagcggaagugagaccaagcuguga

SEQ ID NO: 63204 - RNA, 1575 nt, Artificial Sequence
  derived and/or modified CDS sequence (wt) from glycoprotein__RABV__JN936733.1
augauuccucaaguucuuuuguuuguuccccuucuaguuuucucgucguguuuugggaaauuccccauuuacacgauaccagacaaacuugguccauggagucccaucgauauacaucaucucagcuguccgaacaaucugguuguggaagaugaaggaugcaccaauuugucuggauuuuccuacauggaacucaaagugggauauauuucagccauaaaagugaacggauucaccuguacagguguggugaccgaagcagaaaccuacacuaacuuuguugguuaugucaccaccacguuuaagagaaagcacuuucgcccuaugccggaugcgugcagagccgcauacaacuggaagauggcuggugaccccagguaugaagagucucugcacaauccguaccccgacuaccacuggcuccgaacugucaagaccaccaaggagucccuugucaucauaucuccgagcguugcagauuuggacccguacgauaaaucccuucacucgagaguuuuuccuggcggaaaaugcucaggaauaaccguguccuccacuugcugcucuacuaaccacgacuacaccaucuggaugccugaaaauccuagacugggaacuucaugugacauuuucaccaauaguagagggaagagggcaucaaaagggggcaagacuuguggauuuguggaugaaagaggcuuguacaagucucuaaagggagcaugcaagcugaagcuaugugggguucuaggacuuagacuuauggacggaacaugggucgcgauucagacaucagaugagaucaaauggugcucuccugaucagcuaguaaaucuacacgacuuucacucggaugagauugaacaucuuguuguggaggaguuggucaaaaagagggaagaaugucuggacgcacuggagacuauuaugaccacaaaguccgugaguuucagacgucuuagucauuugaggaagcuagucccuggguuuggaaaggcguauaccauauucaacaaaaccuugauggaggcugaugcucacuacaaaucaauccggacuuggaaugaaaucauccccuccaaaggguguuuaagaguuggggggagaugucauccucaugugaacgggguguucuucaacggcauuauacuggguccugacggacauguucuaaucccagagaugcagucgucccuccuccaccagcauauggaauuguuggaguccucagucaucccuuugaugcaucccuuagcagacccgucaacagucuuuaaagacggcgacgaggcagaggacuuuguugagguucaccuuccggaugugcacaagcagaucucggggguugaucuuggucucccaaacugggggaaguaugugcugauaagugcaggugcuuugacugcauuaauguugacgauuuucuuaaugacguguugcagaaagacuaauagagcagagucaauacaccacaguccuggagagacagggaggaaagugucggugacuucucacaacggaagggucauaucuucaugggaaucauauaaaagcggaagugagaccaagcuguga

SEQ ID NO: 63205 - RNA, 1575 nt, Artificial Sequence
  derived and/or modified CDS sequence (wt) from glycoprotein__RABV__JN936734.1
augauuccccaaguucuuuuguuuguuccccuucuaguuuucucgucguguuuugggaaauuccccauuuacacgauaccagacaaacuugguccauggagucccaucgauauacaucaucucagcuguccgaacaaucugguuguggaagaugaaggaugcaccaauuugucuggauuuuccuacauggaacucaaagugggauauauuucagccauaaaagugaacggauucaccuguacagguguggugaccgaagcagaaaccuacacuaacuuuguugguuaugucaccaccacguuuaagagaaagcacuuucgcccuaugccggaugcgugcagagccgcauacaacuggaagauggcuggugaccccagguaugaagagucucugcacaauccguaccccgacuaccacuggcuccgaacugucaagaccaccaaggagucccuugucaucauaucuccgagcguugcagauuuggacccguacgauaaaucccuucacucaagaguuuuuccuggcggaaaaugcucaggaauaaccguguccuccacuugcugcucuacuaaccacgacuacaccaucuggaugccugaaaauccuagacugggaacuucaugugacauuuucaccaauaguagagggaagagggcaucaaaagggggcaagacuuguggauuuguggaugaaagaggcuuguacaagucucuaaagggagcaugcaagcugaagcuaugugggguucuaggacuuagacuuauggacggaacaugggucgcgauucagacaucagaugagaucaaauggugcucuccugaucagcuaguaaaucuacacgacuuucacucggaugagauugaacaucuuguuguggaggaguuggucaaaaagagggaagagugucuggacgcacuggagacuauuaugaccacaaaguccgugaguuucagacgucuuagucauuugaggaagcuagucccuggguuuggaaaggcguauaccauauucaacaaaaccuugauggaggcugaugcucacuacaaaucaauccggacuuggaaugaaaucauccccuccaaaggguguuuaagaguuggggggagaugucauccucaugugaacgggguguucuucaacggcauuauacuggguccugacggacauguucuaaucccagagaugcagucgucccuccuccaccagcauauggaauuguuggaguccucagucaucccuuugaugcaucccuuagcagacccgucaacagucuuuaaagacggcgacgaggcagaggacuuuguugagguucaccuuccggaugugcacaagcagaucucggggguugaucuuggucucccaaacugggggaaguaugugcugauaagugcaggugcuuugacugcauuaauguugacgauuuucuuaaugacguguugcagaaagacuaauagagcagagucaauacaccacaguccuggagagacagggaggaaagugucggugacuucucacaacggaagggucauaucuucaugggaaucauauaaaagcggaagugagaccaagcuguga

SEQ ID NO: 63206 - RNA, 1575 nt, Artificial Sequence
  derived and/or modified CDS sequence (wt) from glycoprotein__RABV__JN936735.1
augauuccucaaguucuuuuguuuguuccccuucuaguuuucucgucguguuuugggaaauuccccauuuacacgauaccagacaaacuugguccauggagucccaucgauauacaucaucucagcuguccgaacaaucugguuguggaagaugaaggaugcaccaauuugucuggauuuuccuacauggaacucaaagugggauauauuucagccauaaaagugaacggauucaccuguacagguguggugaccgaagcagaaaccuacacuaacuuuguugguuaugucaccaccacguuuaagagaaagcacuuucgcccuaugccggaugcgugcagagccgcauacaacuggaagauggcuggugaccccagguaugaagagucucugcacaauccguaccccgacuaccacuggcuccgaacugucaagaccaccaaagagucccuugucaucauaucuccgagcguugcagauuuggacccguacgauaaaucccuucacucgagaguuuuuccuggcggaaaaugcucaggaauaaccguguccuccacuugcugcucuacuaaccacgacuacaccaucuggaugccugaaaauccuagacugggaacuucaugugacauuuucaccaauagcagagggaagagggcaucaaaagggggcaagacuuguggauuuguggaugaaagaggcuuguacaagucucuaaagggagcgugcaagcugaagcuaugugggguucuaggacuuagacuuauggacggaacaugggucgcgauucagacaucagaugaaaucaaauggugcucuccugaucagcuaguaaaucuacacgacuuucacucggaugagauugaacaucuuguuguggaggaguuggucaaaaagagggaagagugucuggacgcacuggagacuauuaugaccacaaaguccgugaguuucagacgucuuagucauuugaggaagcuagucccuggguuuggaaaggcguauaccauauucaacaaaaccuugauggaggcugaugcucacuacaaaucaauccggacuuggaaugaaaucauccccuccaaaggguguuuaagaguuggggggagaugucauccucaugugaacgggguguucuucaacggcauuauacuggguccugacggacauguucuaaucccagagaugcagucgucccuccuccaccagcauauggaauuguuggaguccucagucaucccuuugaugcaucccuuagcagacccgucaacagucuuuaaagacggcgacgaggcagaggacuuuguugagguucaccuuccggaugugcacaagcagaucucggggguugaucuuggucucccaaacugggggaaguaugugcugauaagugcaggugcuuugacugcauuaauguugacgauuuucuuaaugacguguugcagaaagacuaauagagcagggucaauacaacacaguccuggagagacagggaggaaagugucggugacuucucacaacggaagggucauaucuucaugggaaucauauaaaagcggaagugagaccaagcuguga

SEQ ID NO: 63207 - RNA, 1575 nt, Artificial Sequence
  derived and/or modified CDS sequence (wt) from glycoprotein__RABV__JN936736.1
augauuccccaaguucuuuuguuuguuccccuucuaguuuucucgucguguuuugggaaauuccccauuuacacgauaccagacaaacuugguccauggagucccaucgauauacaucaucucagcuguccgaacaaucugguuguggaagaugaaggaugcaccaauuugucuggauuuuccuacauggaacucaaagugggauauauuucagccauaaaagugaacggauucaccuguacagguguggugaccgaagcagaaaccuacacuaacuuuguugguuaugucaccaccacguuuaagagaaagcacuuucgcccuaugccggaugcgugcagagccgcauacaacuggaagauggcuggugaccccagguaugaagagucucugcacaauccguaccccgacuaccacuggcuccgaacugucaagaccaccaaggagucccuugucaucauaucuccgagcguugcagauuuggacccguacgauaaaucccuucacucgagaguuuuuccuggcggaaaaugcucaggaauaaccguguccuccacuugcugcucuacuaaccacgacuacaccaucuggaugccugaaaauccuagacugggaacuucaugugacauuuucaccaauagcagagggaagagggcaucaaaagggggcaagacuuguggauuuguggaugaaagaggcuuguacaagucucuaaagggagcaugcaagcugaagcuaugugggguucuaggacuuagacuuauggacggaacaugggucgcgauucagacaucagaugagaucaaauggugcucuccugaucagcuaguaaaucuacacgacuuucacucggaugagauugaacaucuuguuguggaggaguuggucaaaaagagggaagagugucuggacgcacuggagacuaucaugaccacaaaguccgugaguuucagacgucuuagucauuugaggaagcuagucccuggguuuggaaaggcguauaccauauucaacaaaaccuugauggaggcugaugcucacuacaaaucaauccggacuuggaaugaaaucauccccuccaaaggguguuuaagaguuggggggagaugucauccucaugugaacgggguguucuucaacggcauuauacuggguccugacggacauguucuaaucccagagaugcagucgucccuccuccaccagcauauggaauuguuggaguccucagucauaccuuugaugcaucccuuagcagacccgucaacagucuuuaaagacggcgacgaggcagaggacuuuguugagguucaccuuccggaugugcacaagcagaucucggggguugaucuuggucucccaaacugggggaaguaugugcugauaagugcaggugcuuugacugcauugauguugacgauuuucuuaaugacguguugcagaaagacuaauagagcagggucaauacaacacaguccuggagagacagggaggaaagugucggugacuucucacaacggaagggucauaucuucaugggaaucauauaaaagcggaagugagaccaagcuguga

SEQ ID NO: 63208 - RNA, 1575 nt, Artificial Sequence
  derived and/or modified CDS sequence (wt) from glycoprotein__RABV__JN936737.1
augauuccccaaguucuuuuguuuguuccccuucuaguuuucucgucguguuuugggaaauuccccauuuacacgauaccagacaaacuugguccauggagucccaucgauauacaucaucucagcuguccgaacaaucugguuguggaagaugagggaugcaccaauuugucuggauuuuccuacauggaacucaaagugggauauauuucagccauaaaagugaacggauucaccuguacagguguggugaccgaagcagaaaccuacacuaacuuuguugguuaugucaccaccacguuuaagagaaagcacuuucgcccuaugccggaugcgugcagagccgcauacaacuggaagauggcuggugaccccagguaugaagagucucugcacaauccguaccccgacuaccacuggcuccgaacugucaagaccaccaaggagucccuugucaucauaucuccgagcguugcagauuuggacccguacgauaaaucccuucacucgagaguuuuuccuggcggaaaaugcucaggaauaaccguguccuccacuugcugcucuacuaaccacgacuacaccaucuggaugccugaaaauccuagacugggaacuucaugugacauuuucaccaauagcagagggaagagggcaucaaaagggggcaagacuuguggauuuguggaugaaagaggcuuguacaagucucuaaagggagcaugcaagcugaagcuaugugggguucuaggacuuagacuuauggacggaacaugggucgcgcuucagacaucagaugagaucaaauggugcucuccugaucagcuaguaaaucuacacgacuuucacucggaugagauugaacaucuuguuguggaggaguuggucaaaaagagggaagagugucuggacgcacuggagacuaucaugaccacaaaguccgugaguuucagacgucuuagucauuugaggaagcuagucccuggguuuggaaaggcguauaccauauucaacaaaaccuugauggaggcugaugcucacuacaaaucaauccggacuuggaaugaaaucauccccuccaaaggguguuuaagaguuggggggagaugucauccucaugugaacgggguguucuucaacggcauuauacuggguccugacggacauguucuaaucccagagaugcagucgucccuccuccaccagcauauggaauuguuggaguccucagucauaccuuugaugcaucccuuagcagacccgucaacagucuuuaaagacggcgacgaggcagaggacuuuguugagguucaccuuccggaugugcacaagcagaucucggggguugaucuuggucucccaaacugggggaaauaugugcugauaagugcaggugcuuugacugcauugauguugacgauuuucuuaaugacguguugcagaaagacuaauagagcagggucaauacaacacaguccuggagagacagggaggaaagugucggugacuucucacaacggaagggucauaucuucaugggaaucauauaaaagcggaagugagaccaagcuguga

SEQ ID NO: 63209 - RNA, 1575 nt, Artificial Sequence
  derived and/or modified CDS sequence (wt) from glycoprotein__RABV__JN936738.1
augauuccccaaguucuuuuguuuguuccccuucuaguuuucucgucguguuuugggaaauuccccauuuacacgauaccagacaaacuugguccauggagucccaucgauauacaucaucucagcuguccgaacaaucugguuguggaagaugaaggaugcaccaauuugucuggauuuuccuacauggaacucaaagugggauauauuucagccauaaaagugaacggauucaccuguacagguguggugaccgaagcagaaaccuacacuaacuuuguugguuaugucaccaccacguuuaagagaaagcacuuucgcccuaugccggaugcgugcagagccgcauacaacuggaagauggcuggugaccccagguaugaagagucucugcacaauccguaccccgacuaccacuggcuccgaacugucaagaccaccaaggagucccuugucaucauaucuccgagcguugcagauuuggacccguacgauaaaucccuucacucgagaguuuuuccuggcggaaaaugcucaggaauaaccguguccuccacuugcugcucuacuaaccacgacuacaccaucuggaugccugaaaauccuagacugggaacuucaugugacauuuucaccaauaguagagggaagagggcaucaaaagggggcaagacuuguggauuuguggaugaaagaggcuuguacaagucucuaaagggagcaugcaagcugaagcuaugugggguucuaggacuuagacuuauggacggaacaugggucgcgauucagacaucagaugagaucaaauggugcucuccugaucagcuaguaaaucuacacgacuuucacucggaugaaauugaacaucuuguuguggaggaguuggucaaaaagagggaagagugucuggacgcacuggagacuauuaugaccacaaaguccgugaguuucagacgucuuagucauuugaggaagcuagucccuggguuuggaaaggcguauaccauauucaacaaaaccuugauggaggcugaugcucacuacaaaucaauccggacuuggaaugaaaucauccccucuaaaggguguuuaagaguuggggggagaugucauccucaugugaacgggguguucuucaacggcauuauacuggguccugacggacauguucuaaucccagagaugcagucgucccuccuccaccagcauauggaauuguuggaguccucagucaucccuuugaugcaucccuuagcagacccgucaacagucuuuaaagacggcgacgaggcagaggacuuuguugagguucaccuuccggaugugcacaagcagaucucggggguugaucuuggucucccaaacugggggaaguaugugcugauaagugcaggugcuuugacugcauuaauguugacgauuuucuuaaugacguguugcagaaagacuaauagagcagagucaauacaacacaguccuggagagacagggaggaaagugucggugacuucucacaacggaagggucauaucuucaugggaaucauauaaaagcggaagugagaccaagcuguga

SEQ ID NO: 63210 - RNA, 1575 nt, Artificial Sequence
  derived and/or modified CDS sequence (wt) from glycoprotein__RABV__JN936739.1
augauuccccaaguucuuuuguuuguuccccuucuaguuuucucgucguguuuugggaaauuccccauuuacacgauaccagacaaacuugguccauggagucccaucgauauacaucaucucagcuguccgaacaaucugguuguggaagaugaaggaugcaccaaucugucuggauuuuccuacauggaacucaaagugggauauauuucagccauaaaagugaacggauucaccuguacagguguggugaccgaagcagaaaccuacacuaacuuuguugguuaugucaccaccacguuuaagagaaagcacuuucgcccuaugccggaugcgugcagagccgcauacaacuggaagauggcuggugaccccagguaugaagagucucugcacaauccguaccccgacuaccacuggcuccgaacugucaagaccaccaaagagucccuugucaucauaucuccgagcguugcagauuuggacccguacgauaaaucccuucacucgagaguuuuuccuggcggaaaaugcucaggaauaaccguguccuccacuugcugcucuacuaaccacgacuacaccaucuggaugccugaaaauccuagacugggaacuucaugugacauuuucaccaauaguagagggaagagggcaucaaaagggggcaagacuuguggauuuguggaugaaagaggcuuguacaagucucuaaagggagcaugcaagcugaagcuaugugggguucuaggacuuagacuuauggacggaacaugggucgcgauucagacaucagaugagaucaaauggugcucuccugaucagcuaguaaaucuacacgacuuucacucggaugagauugaacaucuuguuguggaggaguuggucaaaaagagggaagagugucuggacgcacuggagacuauuaugaccacaaaguccgugaguuucagacgucuuagucauuugaggaagcuagucccuggguuuggaaaggcguauaccauauucaacaaaaccuugauggaggcugaugcucacuacaaaucaauccggacuuggaaugaaaucauccccuccaaaggguguuuaagaguuggggggagaugucauccucaugugaacgggguguucuucaacggcauuauacuggguccugacggacauguucuaaucccagagaugcagucgucccuccuccaccagcauauggaauuguuggaguccucagucaucccuuugaugcaucccuuagcagacccgucaacagucuuuaaagacggcgacgaggcagaggacuuuguugagguucaccuuccggaugugcacaagcagaucucggggguugaucuuggucucccaaacugggggaaguaugugcugauaagugcaggugcucugacugcauuaauguugacgauuuucuuaaugacguguugcagaaagacuaauagagcagagucaauacaacacaguccuggagagacagggaggaaagugucggugacuucucacaacggaagggucauaucuucaugggaaucauauaaaagcggaagugagaccaagcuguga

SEQ ID NO: 63211 - RNA, 1575 nt, Artificial Sequence
  derived and/or modified CDS sequence (wt) from glycoprotein__RABV__JN936740.1
augauuccucaaguucuuuuguuuguuccccuucuaguuuucucgucguguuuugggaaauuccccauuuacacgauaccagacaaacuugguccauggagucccaucgauauacaucaucucagcuguccgaacaaucugguuguggaagaugaaggaugcaccaaucugucuggauuuuccuacauggaacucaaagugggauauauuucagccauaaaagugaacggauucaccuguacagguguggugaccgaagcagaaaccuacacuaacuuuguugguuaugucaccaccacguuuaagagaaagcacuuucgcccuaugccggaugcgugcagagccgcauacaacuggaagauggcuggugaccccagguaugaagagucucugcacaauccguaccccgacuaccacuggcuccgaacugucaagaccaccaaggagucccuugucaucauaucuccgagcguugcagauuuggacccguacgauaaaucccuucacucgagaguuuuuccuggcggaaaaugcucaggaauaaccguguccuccacuugcugcucuacuaaccacgacuacaccaucuggaugccugaaaauccuagacugggaacuucaugugacauuuucaccaauaguagagggaagagggcaucaaaagggggcaagacuuguggauuuguggaugaaagaggcuuguacaagucucuaaagggagcaugcaagcugaagcuaugugggguucuaggacuuagacuuauggacggaacaugggucgcgauucagacaucagaugagaucaaauggugcucuccugaucagcuaguaaaucuacacgacuuucacucggaugagauugaacaucuuguuguggaggaguuggucaaaaagagggaagagugucuggacgcacuggagacuauuaugaccacaaaguccgugaguuucagacgucuuagucauuugaggaagcuagucccuggguuuggaaaggcguauacuauauucaacaaaaccuugauggaggcugaugcucacuacaaaucaauccggacuuggaaugaaaucauccccuccaaaggguguuuaagaguuggggggagaugucauccucaugugaacgggguguucuucaacggcauuauacuggguccugacggacauguucuaaucccagagaugcagucgucccuccuccaccagcauauggaauuguuggaguccucagucaucccuuugaugcaucccuuagcagacccgucaacagucuuuaaagacggcgacgaggcagaggacuuuguugagguucaccuuccugaugugcacaagcagaucucagggguugaucuuggucucccaaacugggggaaguaugugcugauaagugcaggugcucugacugcauuaauguugacgauuuucuuaaugacguguugcagaaagacuaauagagcagagucaauacaacacaguccuggagagacagggaggaaagugucggugacuucucacaacggaagggucauaucuucaugggaaucauauaaaagcggaagugagaccaagcuguga

SEQ ID NO: 63212 - RNA, 1575 nt, Artificial Sequence
  derived and/or modified CDS sequence (wt) from glycoprotein__RABV__JN936741.1
augauuccccaaguucuuuuguuuguuccccuucuaguuuucucgucguguuuugggaaauuccccauuuacacgauaccagacaaacuugguccauggagucccaucgauauacaucaucucagcuguccgaacaaucugguuguggaagaugaaggaugcaccaauuugucuggauuuuccuacauggaacucaaagugggauauauuucagccauaaaagugaacggauucaccuguacagguguggugaccgaagcagaaaccuacacuaacuuuguugguuaugucaccaccacguuuaagagaaagcacuuucgcccuaugccggaugcgugcagagccgcauacaacuggaagauggcuggugaccccagguaugaagagucucugcacaauccguaccccgacuaccacuggcuccgaacugucaagaccaccaaggagucccuugucaucauaucuccgagcguugcagauuuggacccguacgauaaaucccuucacucgagaguuuuuccuggcggaaaaugcucaggaauaaccguguccuccacuugcugcucuacuaaccacgacuacaccaucuggaugccugaaaauccuagacugggaacuucaugugacauuuucaccaauaguagagggaagagagcaucaaaagggggcaagacuuguggauuuguggaugaaagaggcuuguacaagucucuaaagggagcaugcaagcugaagcuaugugggguucuaggacuuagacuuauggacggaacaugggucgcgauucagacaucagaugagaucaaauggugcucuccugaucagcuaguaaaucuacacgacuuucacucggaugagauugaacaucuuguuguggaggaguuggucaaaaagagggaagagugucuggacgcacuggagacuauuaugaccacaaaguccgugaguuucagacgucuuagucauuugaggaagcuagucccuggguuuggaaaggcguauaccauauucaacaaaaccuugauggaggcugaugcucacuacaaaucaauccggacuuggaaugaaaucauccccuccaaaggguguuuaagaguuggggggagaugucauccucaugugaacgggguguucuucaacggcauuauacuggguccugacggacauguucuaaucccagagaugcagucgucccuccuccaccagcauauggaauuguuggaguccucagucaucccuuugaugcaucccuuagcagacccgucaacagucuuuaaagacggcgacgaggcagaggacuuuguugagguucaccuuccggaugugcacaagcagaucucggggguugaucuuggucucccaaacugggggaaguaugugcugauaagugcaggugcuuugacugcauuaauguugacgauuuucuuaaugacguguugcagaaagacuaauagagcagagucaauacaacacaguccuggagagacagggaggaaagugucggugacuucucacaacggaagggucauaucuucaugggaaucauauaaaagcggaagugagaccaagcuguga

SEQ ID NO: 63213 - RNA, 1575 nt, Artificial Sequence
  derived and/or modified CDS sequence (wt) from glycoprotein__RABV__JN936742.1
augauuccucaaguucuuuuguuuguuccccuucuaguuuucucgucguguuuugggaaauuccccauuuacacgauaccggacaaacuugguccauggagucccaucgauauacaucaucucagcuguccgaacaaucugguuguggaagaugaaggaugcaccaaucugucuggauuuuccuacauggaacucaaagugggauauauuucagccauaaaagugaacggauucaccuguacagguguggugaccgaagcagaaaccuacacuaacuuuguugguuaugucaccaccacguuuaagagaaagcacuuucgcccuaugccggaugcgugcagagccgcauacaacuggaagauggcuggugaccccagguaugaagagucucugcacaauccguaccccgacuaccacuggcuccgaacugucaagaccaccaaggagucccuugucaucauaucuccgagcguugcagauuuggacccguacgauaaaucccuucacucgagaguuuuuccuggcggaaaaugcucaggaauaaccguguccuccacuugcugcucuacuaaccacgacuacaccaucuggaugccugaaaauccuagacugggaacuucaugugacauuuucaccaauaguagagggaagagggcaucaaaagggggcaagacuuguggauuuguggaugaaagaggcuuguacaagucucuaaagggagcaugcaagcugaagcuaugugggguucuaggacuuagacuuauggacggaacaugggucgcgauucagacaucagaugagaucaaauggugcucuccugaucagcuaguaaaucuacacgacuuucacucggaugagauugaacaucuuguuguggaggaguuggucaaaaagagggaagagugucuggacgcacuggagacuauuaugaccacaaaguccgugaguuucagacgucuuagucauuugagaaagcuagucccuggguuuggaaaggcguauaccauauucaacaaaaccuugauggaggcugaugcucacuacaaaucaauccggacuuggaaugaaaucauccccuccaaaggguguuuaagaguuggggggagaugucauccucaugugaacgggguguucuucaacggcauuauacuggguccugacggacauguucuaaucccagagaugcagucgucccuccuccaccagcauauggaauuguuggaguccucagucaucccuuugaugcaucccuuagcagacccgucaacagucuuuaaagacggcgacgaggcagaggacuuuguugagguucaccuuccggaugugcacaagcagaucucggggguugaucuuggucucccaaacugggggaaguaugugcugauaagugcaggugcucugacugcauuaaugcugacgauuuucuuaaugacguguugcagaaagacuaauagagcagagucaauacaacacaguccuggagagacagggaggaaagugucggugacuucucacaacggaagggucauaucuucaugggaaucauauaaaagcggaagugagaccaagcuguga

SEQ ID NO: 63214 - RNA, 1575 nt, Artificial Sequence
  derived and/or modified CDS sequence (wt) from glycoprotein__RABV__JN936743.1
augauuccucaaguucuauuguuuguuccccuucuaguuuucucgucguguuuugggaaauuccccauuuacacgauaccagacaaacuugguccauggagucccaucgauauacaucaucucagcuguccgaacaaucugguuguggaagaugaaggaugcaccaaucugucuggauuuuccuacauggaacucaaagugggauauauuucagccauaaaagugaacggauucaccuguacagguguggugaccgaagcagaaaccuacacuaacuuuguugguuaugucaccaccacguuuaagagaaagcacuuucgcccuaugccggaugcgugcagagccgcauacaacuggaagauggcuggugaccccagguaugaagagucucugcacaauccguaccccgacuaccacuggcuccgaacugucaagaccaccaaggagucccuugucaucauaucuccgagcguugcagauuuggacccguacgauaaaucccuucacucgagaguuuuuccuggcggaaaaugcucaggaauaaccguguccuccacuugcugcucuacuaaccacgacuacaccaucuggaugccugaaaauccuagacugggaacuucaugugacauuuucaccaauaguagagggaagagggcaucaaaagggggcaagacuuguggauuuguggaugaaagaggcuuguacaagucucuaaagggagcaugcaagcugaagcuaugugggguucuaggacuuagacuuauggacggaacaugggucgcgauucagacaucagaugagaucaaauggugcucuccugaucagcuaguaaaucuacaugacuuucacucggaugagauugaacaucuuguuguggaggaguuggucaaaaagagggaagagugucuggacgcacuggagacuauuaugaccacaaaguccgugaguuucagacgucuuagucauuugaggaagcuagucccuggguuuggaaaggcguauaccauauucaacaaaaccuugauggaggcugaugcucacuacaaaucaauccggacuuggaaugaaaucauccccuccaaaggguguuuaagaguuggggggagaugucauccucaugugaacgggguguucuucaacggcauuauacuggguccugacggacauguucuaaucccagagaugcagucgucccuccuccaccagcauauggaauuguuggaguccucagucaucccuuugaugcaucccuuagcagacccgucaacagucuuuaaagacggcgacgaggcagaggacuuuguugagguucaccuuccggaugugcacaagcagaucucggggguugaucuuggucucccaaacugggggaaguaugugcugauaagugcaggugcucugacugcauuaauguugacgauuuucuuaaugacguguugcagaaagacuaauagagcagagucaauacaacacaguccuggagaaacagggaggaaagugucggugacuucucacaacggaagggucauaucuucaugggaaucauauaaaagcggaagugagaccaagcuguga

SEQ ID NO: 63215 - RNA, 1575 nt, Artificial Sequence
  derived and/or modified CDS sequence (wt) from glycoprotein__RABV__JN936744.1
augauucuucaaguucuuuuguuuguuccccuucuaguuuucucgucguguuucgggaaauuccccauuuacacgauaccagacaaacuugguccauggagucccaucgauauacaucaucucagcugcccgaacaaucugguuguggaagaugaaggaugcaccaaucugucuggauuuuccuacauggaacucaaagugggauauauuucagccauaaaagugaacggauucaccuguacagguguggugacagaggcagaaaccuacacuaacuuuguugguuaugucaccaccacguuuaagagaaagcacuuucgcccuaugccggaugcgugcagagccgcauacaacuggaagauggcuggugaccccagguaugaagagucucugcacaauccguacccugacuaccacuggcuccgaacugucaagaccaccaaggagucccuugucaucauaucuccgagcguugcagauuuggacccguacgauaaaucccuucacucgagaguuuuuccuggcggaaaaugcucaggaauaaccguguccuccacuugcugcucgaccaaccacgacuacaccaucuggaugccugaaaauccuagacugggaacuucgugugacauuuuuaccaauaguagagggaagagggcaucaaaagggggcaagacuuguggauuuguggaugaaagaggcuuguacaagucucuaaagggagcaugcaagcugaagcuauguggaguucuaggacuuagacuuauggacggaacaugggucgcaauucagacaucagaugagaucaaauggugcccuccugaucagcuaguaaaucuacacgacuuucacucggaugagauugagcaucuuguuguagaggaguuggucaaaaagagggaagagugucuggacgcacuggagacuauuaugacaacaaaauccgugaguuucagacgucucagucauuugaggaagcuagucccuggguuuggaaaggcguauaccauauucaacaaaaccuugauggaggcugaugcucacuauaaaucaauccggacuuggaaugaaaucauccccucuaaaggguguuuaagaguuggggggagaugucauccucaugugaacggaguguucuucaacggcauuauacuggguccugacggacauguucuaaucccagagaugcaaucgucccuccuccaccagcauauggaauuguuggaauccucagucaucccuuugaugcaucccuuagcagacccgucaacagucuuuaaagacggcgacgaggcagaggacuuuguugagguucaccuuccggaugugcacaagcagaucucggggguugaucuuggucucccaaacugggggaaguaugugcugauaagugcaggugcucugacugcauuaauguugaugauuuucuuaaugacguguugcagaaagaauaauagagcagagucaauacaacacaguccuggagagacagggaggaaagugucgguaacuucucauaacggaagggucauaucuucaugggaaucauauaaaagcggaggugagaccaagcuguga

SEQ ID NO: 63216 - RNA, 1575 nt, Artificial Sequence
  derived and/or modified CDS sequence (wt) from glycoprotein__RABV__JN936745.1
augauuccucaaguucuuuuguuuguuccccuucuaguuuucucgucguguuucgggaaauuccccauuuacacaauaccagacaaacuugguccauggagucccaucgauauacaucaccucagcuguccgaacaaucugguuguggaagaugaaggaugcaccaaucugucuggauuuuccuacauggaacucaaaguaggauauauuucagccauaaaagugaacggauucaccuguacagguguagugaccgaagcagaaaccuacacuaacuuuguugguuaugucaccaccacguuuaagagaaagcacuuucgcccuaugccggaugcgugcagagccgcauacaacuggaagauggcuggugaccccagguaugaagagucucugcacaauccguaccccgacuaccacuggcuccgaacugucaagaccaccaaggagucccuugucaucauaucuccgagcguugcagauuuggacccguacgauaaaucccuucacucgagaguuuuuccuggcggaaaaugcucaggaauaaccguguccuccacuugcugcucuacuaaccacgacuacaccaucuggaugccugaaaauccuagacugggaacuucaugugacauuuucaccaauaguagagggaagagggccucaaaagggggcaagacuuguggauuuguggaugaaagaggcuuguacaagucucuaaggggagcaugcaagcugaagcuaugugggguucuaggacuuagacuuauggacggaacaugggucgcaauucagacaucagaugagaucaaauggugcucuccugaucagcuaguaaaucuacacgacuuucacucggaugagaucgaacaucuuguuguggaggaguuggucaaaaagagggaagagugucuggacgcacuggagacuauuaugaccacaaaguccgugaguuucagacgucuuagucauuugaggaagcuagucccuggguuuggaaaggcguauaccauauucaacaagaccuugauggaggcugaugcucacuacaaaucaauccggacuuggaaugaaaucauccccuccaaaggguguuuaagaguuggggggagaugucauccucaugugaacgggguguucuucaacggcauuauacuggguccugacggacauguucucaucccagagaugcagucgucccuccuccaccagcauauggaauuguuggaguccucagucaucccuuugaugcaucccuuagcagacccgucaacagucuuuaaagacggcgacgaggcagaggacuuuguugagguucaccuuccggaugugcacaagcagaucucggggguugaucuuggucucccaaacugggggaaguaugugcugauaagugcaggugcucugacugcauuaauguugaugauuuucuuaaugacguguugcagaaagacuaauagagcagagucaauacaacacaguccuggagagacagggaggaaagugucggugacuucucacaacggaagggucauaucuucaugggaaucauauaaaagcggaagugagaccaagcuguga

SEQ ID NO: 63217 - RNA, 1575 nt, Artificial Sequence
  derived and/or modified CDS sequence (wt) from glycoprotein__RABV__JN936746.1
augauuccucaaguucuuuuguuuguuccccuucuaguuuucucgucguguuuugggaaauuccccauuuacacgauaccagacaaacuugguccauggagucccaucgauauacaucaucucagcuguccgaacaaucugguuguggaagaugaaggaugcaccaaucugucuggauuuuccuacauggaacucaaagugggauauauuucagccauaaaagugaacggauucaccuguacagguguggugacagaagcagaaaccuacaccaacuuuguugguuaugucaccaccacguuuaagagaaagcacuuucgcccuaugccggaugcgugcagagccgcauacaacuggaagauggcuggugacccuagguaugaagagucucugcacaauccguacccugacuaccacuggcuccggacugucaagaccaccaaggagucccuugucauaauaucuccgagcguugcagauuuggacccguacgauaaaucucuucacucaagaguuuuuccuggcggaaaaugcucaggaauaaccguguccuccacuugcugcucuacuaaccacgacuacaccaucuggaugccugaaaauccuagacugggaacuucgugugacauuuucaccaauaguagagggaagagggcaucaaaaggaggcaagacuuguggauuuguggaugaaagaggcuuguacaagucucuaaagggagcaugcaagcugaagcuaugugggguucuaggacuuagacuuauggacggaacaugggucgcaauucagacaucagaugagaucaaguggugcucuccugaucagcuaguaaaucuacacgacuuucacucggaugagauugaacaucuuguuguagaggaguuggucaaaaagagggaagagugucuggacgcacuggagacuauuaugaccacaaaguccgugaguuucagacgucuuagucauuugaggaagcuaguccccggguuuggaaaggcguauaccauauucaacaaaaccuugauggaggcugaugcucacuauaaaucaauccggacuuggaaugaaaucauccccucuaaaggguguuuaagaguuggggggagaugucauccucaugugaacgggguguucuuuaacggcauuauacuggguccugacggacauguucuaaucccagagaugcaaucgucccuccuccaccagcauauggaauuguuggaguccucagucaucccuuugaugcaucccuuagcagacccgucaacagucuuuaaagacggcgacgaggcagaggacuuuguugagguucaccuuccggaugugcacaagcagaucucggggguugaucuuggucucccaaacugggggaaguaugugcugauaagugcaggugcucugacugcauuaauguugaugauuuucuuaaugacguguugcagaaauacuaauagagcagagucaauacaacacaguccuggagagacagggaggaaagugucgguaacuucucacaacggaagggucauaucuucaugggaaucauauaaaagcggaggugagaccaagcuguga

SEQ ID NO: 63218 - RNA, 1575 nt, Artificial Sequence
  derived and/or modified CDS sequence (wt) from glycoprotein__RABV__JN936747.1
augauucuucaaguucuuuuguuuguuccccuucuaguuuucucgucguguuucgggaaauuccccauuuacacgauaccagacaaacuugguccauggagucccaucgauauacaucaucucagcuguccgaacaaucugguuguggaagaugaaggaugcaccaauuugucuggauuuuccuacauggaacucaaagugggauauauuucagccauaaaagugaacggauucaccuguacagguguggugacagaagcagaaaccuacacuaacuuuguugguuaugucaccaccacguuuaagagaaagcacuuucgcccuaugccggaugcgugcagagccgcauacaacuggaagauggcuggugaccccagguaugaagagucucugcacaauccguacccugacuaccacuggcuccgaacugucaagaccaccaaggagucccuugucaucauaucuccgagcguugcagauuuggacccguacgauaaaucccuucacucgagaguuuuuccuggcggaaaaugcucaggaauaaccguguccuccacuugcugcucgaccaaccacgacuacaccaucuggaugccugaaaauccuagacugggaacuucgugugacauuuuuaccaauaguagagggaagagggcaucaaaagggggcaagacuuguggauuuguggaugaaagaggcuuguacaagucucuaaagggagcaugcaagcugaagcuauguggaguucuaggacuuagacuuauggacggaacaugggucgcaauucagacaucagaugagaucaaauggugcccuccugaucagcuaguaaaucuacacgacuuucacucggaugaaauugagcaucuuguuguagaggaguuggucaaaaagagggaagagugucuggacgcacuggagacuauuaugacaacaaaauccgugaguuucagacgucucagucauuugaggaagcuagucccuggguuuggaaaggcguauaccauauucaacaaaaccuugauggaggcugaugcucacuauaaaucaauccggacuuggaaugaaaucauccccucuaaaggguguuuaagaguuggggggagaugucauccucaugugaacggaguguucuucaacggcauuauacuggguccugacggacauguucuaaucccagagaugcaaucgucccuccuccaccagcauauggaauuguuggaauccucagucaucccuuugaugcaucccuuagcagacccgucaacagucuuuaaagacggcgacgaggcagaggacuuuguugagguucaccuuccggaugugcacaagcagaucucggggguugaucuuggucucccaaacugggggaaguaugugcugauaagugcaggugcucugacugcauuaauguugaugauuuucuuaaugacguguugcagaaagaauaauagagcagagucaauacaacacaguccuggagagacagggaggaaagugucgguaacuucucauaacggaagggucacaucuucaugggaaucauacaaaagcggaggugagaccaagcuguga

SEQ ID NO: 63219 - RNA, 1575 nt, Artificial Sequence
  derived and/or modified CDS sequence (wt) from glycoprotein__RABV__JN936748.1
augauuccucaaguucuuuuguuuguuccccuucuaguuuucucgucguguuucgggaaauuccccauuuacacgauaccagacaaacuugguccauggagucccaucgauauacaucaccucagcuguccgaacaaucugguuguggaagaugaaggaugcaccaaucugucuggauuuuccuacauggaacucaaagugggauauauuucagcuauaaaagugaacggauucaccuguacagguguagugaccgaagcagaaaccuacacuaacuuuguugguuaugucaccaccacguuuaagagaaagcacuuucgcccuaugccggaugcgugcagagccgcauacaacuggaagauggcuggugaccccagguaugaagagucucugcacaauccguaccccgacuaccacuggcuccgaacugucaagaccaccaaggagucccuugucaucauaucuccgagcguugcagauuuggacccguacgauaaaucccuucacucgagaguuuuuccuggcggaaaaugcucaggaauaaccguguccuccacuugcugcucuacuaaccacgacuacaccaucuggaugccugaaaauccuagacugggaacuucaugugacauuuucaccaauaguagagggaagagggccucaaaagggggcaagacuuguggauucguggaugaaagaggcuuguacaagucucuaaggggagcaugcaagcugaagcuaugugggguucuaggacuuagacuuauggacggaacaugggucgcaauucagacaucagaugagaucaaauggugcucuccugaucagcuaguaaaccuacacgacuuucacucggaugagaucgaacaucuuguuguggaggaguuggucaaaaagagggaagagugucuggacgcacuggagacuauuaugaccacaaaguccgugaguuucagacgucuuagucauuugaggaagcuagucccuggguuuggaaaggcguauaccauauucaacaagaccuugauggaggcugaugcucacuacaaaucaauccggacuuggaaugaaaucauccccuccaaaggguguuuaagaguuggggggagaugucauccucaugugaacgggguguucuucaacggcauuauacuggguccugacggacauguucucaucccagagaugcagucgucccuccuccaccagcauauggaauuguuggaguccucagucaucccuuugaugcaucccuuagcagacccgucaacagucuuuaaagacggcgacgaggcagaggacuuuguugagguucaccuuccggaugugcacaagcagaucucggggguugaucuuggucucccaaacugggggaaguaugugcugauaagugcaggugcucugacugcauuaauguugaugauuuucuuaaugacguguugcagaaagacuaauagagcagagucaauacaacacaguccuggagagacagggaggaaagugucggugacuucucacaacggaagggucauaucuucaugggaaucauauaaaagcggaagugagaccaagcuguga

SEQ ID NO: 63220 - RNA, 1575 nt, Artificial Sequence
  derived and/or modified CDS sequence (wt) from glycoprotein__RABV__JN936749.1
augauuccucaaguucuuuuguuuguuccccuucuagucuucucgucguguuucgggaaauuccccauuuacacgauaccagacaaacuugguccauggagucccaucgauauacaucaccucagcuguccgaacaaucugguuguggaagaugaaggaugcaccaaucugucuggauuuuccuacauggaacucaaagugggauauauuucagccauaaaagugaacggauucaccuguacagguguagugaccgaagcagaaaccuacacuaacuuuguugguuaugucaccaccacguuuaagagaaagcacuuucgcccuaugccggaugcgugcagagccgcauacaacuggaagauggcuggugaccccagguaugaagagucucugcacaauccguaccccgacuaccacuggcuccgaacugucaagaccaccaaggagucccuugucaucauaucuccaagcguugcagauuuggacccguacgauaaaucccuucacucgagaguuuuuccuggcggaaaaugcucaggaauaaccguguccuccacuugcugcucuacuaaccacgacuacaccaucuggaugccugaaaauccuagacugggaacuucaugugacauuuucaccaauaguagagggaagagggccucaaaagggggcaagacuuguggauuuguggaugaaagaggcuuguacaagucucuaaggggagcaugcaagcugaagcuaugugggguuuuaggacuuagacuuauggacggaacaugggucgcaauucagacaucagaugagaucaaauggugcucuccugaucagcuaguaaaucuacacgacuuucacucggaugagaucgaacaucuuguuguggaggaguuggucaaaaagagggaagagugucuggacgcacuggagacuauuaugaccacaaaguccgugaguuucagacgucuuagucauuugaggaagcuagucccuggguuuggaaaggcguauaccauauucaacaagaccuugauggaggcugaugcucacuacaaaucaauccggacuuggaaugaaaucauccccuccaaaggguguuuaagaguuggggggagaugucauccucaugugaacgggguguucuucaacggcauuauacuggguccugacggacauguucucaucccagagaugcagucgucccuccuccaccagcauauggaauuguuggaguccucagucaucccuuugaugcaucccuuagcagacccgucaacagucuuuaaagacggcgacgaggcagaggacuuuguugagguucaccuuccggaugugcacaagcagaucucggggguugaucuuggucucccaaacugggggaaguaugugcugauaagugcaggugcucugacugcauuaauguugaugauuuucuuaaugacguguugcagaaagacuaauagagcagagucaauacaacacaguccuggagagacagggaggaaagugucggugacuucucacaacggaagggucauaucuucaugggaaucauauaaaagcggaagugagaccaagcuguga

SEQ ID NO: 63221 - RNA, 1575 nt, Artificial Sequence
  derived and/or modified CDS sequence (wt) from glycoprotein__RABV__JN936750.1
augauuccucaaguucuuuuguuuguuccccuucuagucuucucgucguguuucgggaaauuccccauuuacacgauaccagacaaacuugguccauggagucccaucgauauacaucaccucagcuguccgaacaaucugguuguggaagaugaaggaugcaccaaucugucuggauuuuccuacauggaacucaaagugggauauauuucagccauaaaagugaacggauucaccuguacagguguagugaccgaagcagaaaccuacacuaacuuuguugguuaugucaccaccacguuuaagagaaagcacuuucgccccaugccggaugcgugcagagccgcauacaacuggaagauggcuggugaccccagguaugaagagucucugcacaauccguaccccgacuaccacuggcuccgaacugucaagaccaccaaggagucccuugucaucauaucuccgagcguugcagauuuggacccguacgauaaaucccuucacucgagaguuuuuccuggcggaaaaugcucaggaauaaccguguccuccacuugcugcucuacuaaccacgacuacaccaucuggaugccugaaaauccuagacugggaacuucaugugacauuuucaccaauaguagagggaagagggccucaaaagggggcaagacuuguggauuuguggaugaaagaggcuuguacaagucucuaaggggagcaugcaagcugaagcuaugugggguuuuaggacuuagacuuauggacggaacaugggucgcaauucagacaucagaugagaucaaauggugcucuccugaucagcuaguaaaucuacacgacuuucacucggaugagaucgaacaucuuguuguggaggaguuggucaaaaagagggaagagugucuggacgcacuggagacuauuaugaccacaaaguccgugaguuucagacgucuuagucauuugaggaagcuagucccuggguuuggaaaggcguauaccauauucaacaagaccuugauggaggcugaugcucacuacaaaucaauccggacuuggaaugaaaucauccccuccaaaggguguuuaagaguuggggggagaugucauccucaugugaacgggguguucuucaacggcauuauacuggguccugacggacauguucucaucccagagaugcagucgucccuccuccaccagcauauggaauuguuggaguccucagucaucccuuugaugcaucccuuagcagacccgucaacagucuuuaaagacggcgacgaggcagaggacuuuguugagguucaccuuccggaugugcacaagcagaucucggggguugaucuuggucucccaaacugggggaaguaugugcugauaagugcaggugcucugacugcauuaauguugaugauuuucuuaaugacguguugcagaaagacuaauagagcagagucaauacaacacaguccuggagagacagggaggaaagugucggugacuucucacaacggaagggucauaucuucaugggaaucauauaaaagcggaagugagaccaagcuguga

SEQ ID NO: 63222 - RNA, 1575 nt, Artificial Sequence
  derived and/or modified CDS sequence (wt) from glycoprotein__RABV__JN936751.1
augauuccucaaguucuuuuguuuguuccccuucuaguuuucucgucguguuucgggaaauuccccauuuacacgauaccagacaaacuugguccauggagucccaucgauauacaucaccucagcuguccgaacaaucugguuguggaagaugaaggaugcaccaaucugucuggauuuuccuacauggaacucaaaguaggauauauuucagcuauaaaagugaacggauucaccuguacagguguagugaccgaagcagaaaccuacacuaacuuuguugguuaugucaccaccacguuuaagagaaagcacuuucgcccuaugccggaugcgugcagagccgcauacaacuggaagauggcuggugaccccagguaugaagagucucugcacaauccguaccccgacuaccacuggcuccgaacugucaagaccaccaaggagucccuugucaucauaucuccgagcguugcagauuuggacccguacgauaaaucccuucacucgagaguuuuuccuggcggaaaaugcucaggaauaaccguguccuccacuugcugcucuacuaaccacgacuacaccaucuggaugccugaaaauccuagacugggaacuucaugugacauuuucaccaauaguagagggaagagggccucaaaagggggcaagacuuguggauucguggaugaaagaggcuuguacaagucucuaaggggagcaugcaagcugaagcuaugugggguucuaggacuuagacuuauggacggaacaugggucgcaauucagacaucagaugagaucaaauggugcucuccugaucagcuaguaaaccuacacgacuuucacucggaugagaucgaacaucuuguuguggaggaguuggucaaaaagagggaagagugucuggacgcacuggagacuauuaugaccacaaaguccgugaguuucagacgucuuagucauuugaggaagcuagucccuggguuuggaaaggcguauaccauauucaacaagaccuugauggaggcugaugcucacuacaaaucaauccggacuuggaaugaaaucauccccuccaaaggguguuuaagaguuggggggagaugucauccucaugugaacgggguguucuucaacggcauuauacuggguccugacggacauguucucaucccagagaugcagucgucccuccuccaccagcauauggaauuguuggaguccucagucaucccuuugaugcaucccuuagcagacccgucaacagucuuuaaagacggcgacgaggcagaggacuuuguugagguucaccuuccggaugugcacaagcagaucucggggguugaucuuggucucccaaacugggggaaguaugugcugauaagugcaggugcucugacugcauuaauguugaugauuuucuuaaugacguguugcagaaagacuaauagagcagagucaauacaacacaguccuggagagacagggaggaaagugucggugacuucucacaacggaagggucauaucuucaugggaaucauauaaaagcggaagugagaccaagcuguga

SEQ ID NO: 63223 - RNA, 1575 nt, Artificial Sequence
  derived and/or modified CDS sequence (wt) from glycoprotein__RABV__JN936753.1
augauuccucaaguucuuuuguuuguuccccuucuaguuuucucgucguguuuugggaaauuccccauuuacacgauaccagacaaacuugguccauggagucccaucgauauacaucaucucagcuguccgaacaaucugguuguggaagaugaaggaugcaccaaucugucuggauuuuccuacauggaacucaaagugggauauauuucagccauaaaagugaacggauucaccuguacagguguggugacagaagcagaaaccuacacgaacuuugucgguuaugucaccaccacguuuaagagaaagcacuuucgcccuacgccagaugcgugcagagccgcguacaacuggaagauggcuggugaccccagguaugaagagucucugaacaauccguacccugauuaucacuggcuccgaacugucaagaccuccaaggagucccuugucaucauaucuccgagcguugcagauuuggacccguacgauaaaucccuucacucgagaguuuuuccuggcggaaaaugcucuggaauaaccguguccuccaccugcugcucuacuaaccacgacuacaccaucuggaugccugaaaauccuagacugggaacuucgugugacauuuucaccaauaguagagggaagagggcaucaaaagggggcaagacuuguggauuuguggaugaaagaggcuuguacaagucucuaaagggagcaugcaagcugaagcuaugugggguucuaggacuuagacuuauggacggaacaugggucgcaauucagacaucagaugagaucaaauggugcucuccugaucagcugguaaaucuacacgacuuucacucagaugagauugaacaucuuguuguggaggaguuggucaaaaagagggaagagugucuggacgcacuggagacuauuaugaccacaaaguccgugaguuucaggcgucuuagucauuugaggaagcuagucccuggguuuggaaaggcguauaccauauucaacaaaaccuugauggaggcugaugcucacuauaaaucaauccggacuuggaaugaaaucauccccucuaaaggguguuuaagaguuggggggagaugucauccucaugugaacgggguguucuucaacggcauuauacuggguccugacggacauguucuaaucccagagaugcaaucgucccuccuccaccagcauauggaauuguuggaguccucagucaucccuuugaugcaucccuuagcagacccgucaacaguuuuuaaagacggcgacgaggcagaggacuuuguugagguucaccuuccggaugugcacaagcagaucucggggguugaucuuggucucccaaacugggggaaguacgugcugguaagugcaggugcucugacugcauuaauguugaugauuuucuuaaugacguguugcagaaagacuaauagagcagagucaauacaacacaguccuggagagacagggaggaaagugucgguaacuucucacaacggaagggucauaucuucaugggaaucauauaaaaguggaggugagaccaagcuguga

SEQ ID NO: 63224 - RNA, 1575 nt, Artificial Sequence
  derived and/or modified CDS sequence (wt) from glycoprotein__RABV__JN936754.1
augauuccucaaguucuuuuguuuguuccccuucuaguuuucucgucguguuuugggaaauuccccauuuacacgauaccagacaaacuugguccauggagucccaucgauauacaucaucucagcuguccgaacaaucugguuguggaagaugaaggaugcaccaaucugucuggauuuuccuacauggaacucaaagugggauauauuucagccauaaaagugaacggauucaccuguacagguguggugacagaagcagaaaccuacacgaacuuuguugguuaugucaccaccacuuuuaagagaaagcacuuucgcccuacgccagaugcgugcagagccgcguacaacuggaagauggcuggugaccccagguaugaagagucucugcacaauccguacccugauuaucacuggcuccgaacugucaagaccuccaaggagucccuugucaucauaucuccgagcguugcagauuuggacccguacgauaaaucccuucacucgagaguuuuuccuggcggaaaaugcucuggaauaaccguguccuccacuugcugcucuacuaaccacgacuacaccaucuggaugccugaaaauccuagacugggaacuucgugugacauuuucaccaauaguagagggaagagggcaucaaaagggggcaagacuuguggauuuguggaugaaagaggcuuguacaagucucuaaagggagcaugcaagcugaagcuaugugggguucuaggacuuagacuuauggacggaacaugggucgcaauucagacaucagaugagaucaaauggugcucuccugaucagcuaguaaaucuacacgacuuucacucagaugagauugaacaucuuguuguggaggaguuggucaaaaagagggaagagugucuggacgcacuggagacuauuaugaccacaaaguccgugaguuucaggcgucuuagucauuugaggaagcuagucccuggguuuggaaaggcguauaccauauucaacaaaaccuugauggaggcugaugcucacuauaaaucaauccggacuuggaaugaaaucauccccucuaaaggguguuuaagaguuggggggagaugucauccucaugugaacgggguguucuucaacggcauuauacuggguccugacggacauguucuaaucccagagaugcaaucgucccuccuccaccagcauauggaauuguuggaguccucagucaucccuuugaugcaucccuuagcagacccgucaacaguuuuuaaagacggcgacgaggcagaggacuuuguugagguucaccuuccggaugugcacaagcagaucucggggguugaucuuggucucccaaacugggggaaguacgugcugguaagugcaggugcucugacugcauuaaugcugaugauuuucuuaaugacguguugcagaaagacuaauagagcagagucaauacaacacaguccuggagagacagggaggaaagugucgguaacuucucacaacggaagggucauaucuucaugggaaucauauaaaaguggaggugagaccaagcuguga

SEQ ID NO: 63225 - RNA, 1575 nt, Artificial Sequence
  derived and/or modified CDS sequence (wt) from glycoprotein__RABV__JN936755.1
augauuccucaaguucuuuuguuuguuccccuucuaguuuccucgucguguuuugggaaauuccccauuuacacgauaccagacaaacuugguccauggagucccaucgauauacaucaucucagcuguccgaacaaucugguuguggaagaugaaggaugcaccaaucugucuggauuuuccuacauggaacucaaagugggauauauuucagccauaaaagugaacggauucaccuguacagguguggugacagaagcagaaaccuacacgaacuuuguugguuaugucaccaccacguuuaagagaaagcacuuucgcccuacgccagaugcgugcagagccgcguacaacuggaagauggcuggugaccccagguaugaagagucucugcacaauccguacccugauuaucacuggcuccgaacugucaagaccuccaaggagucccuugucaucauaucuccgagcguugcagauuuggacccguacgauaaaucccuucacucgagaguuuuuccuggcggaaaaugcucuggaauaaccguguccuccacuugcugcucuacuaaccacgacuacaccaucuggaugccugaaaauccuagacugggaacuucgugugacauuuucaccaauaguagagggaagagggcaucaaaagggggcaagacuuguggauuuguggaugaaagaggcuuguacaagucucuaaagggagcaugcaagcugaagcuaugugggguucuaggacuuagacuuauggacggaacaugggucgcaauucagacaucagaugagaucaaauggugcucuccugaucagcuaguaaaucuacacgacuuucacucagaugagauugaacaucuuguuguggaggaguuggucaaaaagagggaagagugucuggacgcacuggagacuauuaugaccacaaaguccgugaguuucaggcgucuuagucauuugaggaagcuagucccuggguuuggaaaggcguauaccauauucaacaaaaccuugauggaggcugaugcucacuauaaaucaauccggacuuggaaugaaaucauccccucuaaaggguguuuaagaguuggggggagaugucauccucaugugaacgggguguucuucaacggcauuauacuggguccugacggacauguucuaaucccagagaugcaaucgucccuccuccaccagcauauggaauuguuggaguccucagucaucccuuugaugcaucccuuagcagacccgucaacaguuuuuaaagacggcgacgaggcagaggacuuuguugagguucaccuuccggaugugcacaagcagaucucggggguugaucuuggucucccaaacugggggaaguacgugcugguaagugcaggugcucugacugcauuaauguugaugauuuucuuaaugacguguugcagaaagacuaauagagcagagucaauacaacacaguccuggagagacagggaggaaagugucgguaacuucucacaacggaagggucauaucuucaugggaaucauauaaaaguggaggugagaccaagcuguga

SEQ ID NO: 63226 - RNA, 1575 nt, Artificial Sequence
  derived and/or modified CDS sequence (wt) from glycoprotein__RABV__JN936756.1
augauuccucaaguucuuuuguuuguuccccuucuaguuuucucgucguguuucgggaaauuccccauuuacacaauaccagacaaacuugguccauggagucccaucgauauacaucaccucagcuguccgaacaaucugguuguggaagaugaaggaugcaccaaucugucuggauuuuccuacauggaacucaaaguaggauauauuucagccauaaaagugaacggauucaccuguacagguguagugaccgaagcagaaaccuacacuaacuuuguugguuaugucaccaccacguuuaagagaaagcacuuucgcccuaugccggaugcgugcagagccgcauacaacuggaagauggcuggugaccccagguaugaagagucucugcacaauccguaccccgacuaccacuggcuccgaacugucaagaccaccaaggagucccuugucaucauaucuccgagcguugcagauuuggacccguacgauaaaucccuucacucgagaguuuuuccuggcggaaaaugcucaggaauaaccguguccuccacuugcugcucuacuaaccacgauuacaccaucuggaugccugaaaauccuagacugggaacuucaugugacauuuucaccaauaguagagggaagagggccucaaaagggggcaagacuuguggauuuguggaugaaagaggcuuguacaagucucuaaggggagcaugcaagcugaagcuaugugggguucuaggacuuagacuuauggacggaacaugggucgcaauucagacaucagaugagaucaaauggugcucuccugaucagcuaguaaaucuacacgacuuucacucggaugagaucgaacaucuuguuguggaggaguuggucaaaaagagggaagagugucuggacgcacuggagacuauuaugaccacaaaguccgugaguuucagacgucuuagucauuugaggaagcuagucccuggguuuggaaaggcguauaccauauucaacaagaccuugauggaggcugaugcucacuacaaaucaauccggacuuggaaugaaaucauccccuccaaaggguguuuaagaguuggggggagaugucauccucaugugaacgggguguucuucaacggcauuauacuggguccugacggacauguucucaucccagagaugcagucgucccuccuccaccagcauauggaauuguuggaguccucagucaucccuuugaugcaucccuuagcagacccgucaacagucuuuaaagacggcgacgaggcagaggacuuuguugagguucaccuuccggaugugcacaagcagaucucggggguugaucuuggucucccaaacugggggaaguaugugcugauaagugcaggugcucugacugcauuaauguugaugauuuucuuaaugacguguugcagaaagacuaauagagcagagucaauacaacacaguccuggagagacagggaggaaagugucggugacuucucacaacggaagggucauaucuucaugggaaucauauaaaagcggaagugagaccaagcuguga

SEQ ID NO: 63227 - RNA, 1575 nt, Artificial Sequence
  derived and/or modified CDS sequence (wt) from glycoprotein__RABV__JN936757.1
augauuccucaaguacuuuuguuuguuccccuucuaguuuucucgucguguuuugggaaauuccccauuuacacgauaccagacaaacuugguccauggagucccaucgauauacaucaucucagcuguccgaacaaucugguuguggaagaugaaggaugcaccaaucugucuggauuuuccuacauggaacucaaagugggauauauuucagccauaaaagugaacggauucaccuguacagguguggugacagaagcagaaaccuacacgaacuuuguugguuaugucaccaccacguuuaagagaaagcacuuucgcccuacgccagaugcgugcagagccgcguacaacuggaagauggcuggugaccccagguaugaagagucucugcacaauccguacccugauuaucacuggcuccgaacugucaagaccuccaaggagucccuugucaucauaucuccgagcguugcagauuuggacccguacgauaaaucccuucacucgagaguuuuuccuggcggaaaaugcucuggaauaaccguguccuccacuugcugcucuacuaaccacgacuacaccaucuggaugccugaaaauccuagacugggaacuucgugugacauuuucaccaauaguagagggaagagggcaucaaaagggggcaagacuuguggauuuguggaugaaagaggcuuguacaagucucuaaagggagcaugcaagcugaagcuaugugggguucuaggacuuagacuuauggacggaacaugggucgcaauucagacaucagaugagaucaaauggugcucuccugaucagcuaguaaaucuacacgacuuucacucagaugagauugaacaucuuguuguggaggaguuggucaaaaagagggaagagugucuggacgcacuggagacuauuaugaccacaaaguccgugaguuucaggcgucuuagucauuugaggaagcuagucccuggguuuggaaaggcguauaccauauucaacaaaaccuugauggaggcugaugcucacuauaaaucaauccggacuuggaaugaaaucauccccucuaaaggguguuuaagaguuggggggagaugucauccucaugugaacgggguguucuucaacggcauuauacuggguccugacggacauguucuaaucccagagaugcaaucgucccuccuccaccagcauauggaauuguuggaguccucagucaucccuuugaugcaucccuuagcagacccgucaacaguuuuuaaagacggcgacgaggcagaggacuuuguugagguucaccuuccggaugugcacaagcagaucucggggguugaucuuggucucccaaacugggggaaguacgugcugguaagugcaggugcucugacugcauuaauguugaugauuuucuuaaugacguguugcagaaagacugauagagcagagucaauacaacacaguccuggagagacaaggaggaaagugucgguaacuucucacaacggaagggucauaucuucaugggaaucauauaaaaguggaggugagaccaagcuguga

SEQ ID NO: 63228 - RNA, 1575 nt, Artificial Sequence
  derived and/or modified CDS sequence (wt) from glycoprotein__RABV__JN936758.1
augauuccucaaguucuuuuguuuguuccccuucuaguuuucucgucguguuuugggaaauuccccauuuacacgauaccagacaaacuugguccauggagucccaucgauauacaucaucucagcuguccgaacaaucugguuguggaagaugaaggaugcaccaaucugucuggauuuuccuacauggaacucaaagugggauauauuucagccauaaaagugaacggauucaccuguacagguguggugaccgaagcagaaaccuacacuaacuuuguugguuaugucaccaccacguuuaagagaaagcacuuucgcccuaugccggaugcgugcagagccgcauacaacuggaagauggcuggugaccccagguaugaagagucucugcacaauccguaccccgacuaccacuggcuccgaacugucaagaccaccaaggagucccuugucaucauaucuccgagcguugcagauuuggacccguacgauaaaucccuucacucgagaguuuuuccuggcggaaaaugcucaggaauaaccguguccuccacuugcugcucuacuaaccacgacuacaccaucuggaugccugaaaauccuagacugggaacuucaugugacauuuucaccaauaguagagggaagagggcaucaaaagggggcaagacuuguggauuuguggaugaaagaggcuuguacaagucucuaaagggagcaugcaagcugaagcuaugugggguucuaggacuuagacuuauggacggaacaugggucgcgauucagacaucagaugagaucaaauggugcucuccugaucagcuaguaaaucuacacgacuuucacucggaugagauugaacaucuuguuguggaggaguuggucaaaaagagggaagagugucuggacgcacuggagacuauuaugaccacaaaguccgugaguuucagacgucuuagucauuugaggaagcuagucccuggguuuggaaaggcguauacuauauucaacaaaaccuugauggaggcugaugcucacuacaaaucaauccggacuuggaaugaaaucauccccuccaaaggguguuuaagaguuggggggagaugucauccucaugugaacgggguguucuucaacggcauuauacuggguccugacggacauguucuaaucccagagaugcagucgucccuccuccaccagcauauggaauuguuggaguccucagucaucccuuugaugcaucccuuagcagacccgucaacagucuuuaaagacggcgacgaggcagaggacuuuguugagguucaccuuccggaugugcacaagcagaucucggggguugaucuuggucucccaaacugggggaaguaugugcugauaggugcaggugcucugacugcauuaauguugacgauuuucuuaaugacguguugcagaaagacuaauagagcagagucaauacaacacaguccuggagagacagggaggaaagugucggugacuucucacaacggaagggucauaucuucaugggaaucauauaaaagcggaagugagaccaagcuguga

SEQ ID NO: 63229 - RNA, 1575 nt, Artificial Sequence
  derived and/or modified CDS sequence (wt) from glycoprotein__RABV__JN936759.1
augauuccucaaguucuuuuguuuguuccccuucuaguuuucucgucguguuucgggaaauuccccauuuacacaauaccagacaaacuugguccauggagucccaucgauauacaucaccucagcuguccgaacaaucugguuguggaagaugaaggaugcaccaaucugucuggauuuuccuacauggaacucaaagugggauauauuucagccauaaaagugaacggauucaccuguacagguguagugaccgaagcagaaaccuacacuaacuuuguugguuaugucaccaccacguuuaagagaaagcacuuucgcccuaugccggaugcgugcagagccgcauacaacuggaagauggcuggugaccccagguaugaagagucucugcacaauccguaccccgacuaccacuggcuccgaacugucaagaccaccaaggagucccuugucaucauaucuccgagcguugcagauuuggacccguacgauaaaucccuucacucgagaguuuuuccuggcggaaaaugcucaggaauaaccguguccuccacuugcugcucuacuaaccacgacuacaccaucuggaugccugaaaauccuagacugggaacuucaugugacauuuucaccaauaguagagggaagagggccucaaaagggggcaagacuuguggauuuguggaugaaagaggcuuguacaagucucuaaggggagcaugcaagcugaagcuaugugggguucuaggacuuagacuuauggacggaacaugggucgcaauucagacaucagaugagaucaaauggugcucuccugaucagcuaguaaaucuacacgacuuucacucggaugagaucgaacaucuuguuguggaggaguuggucaaaaagagggaagagugucuggacgcacuggagacuauuaugaccacaaaguccgugaguuucagacgucuuagucauuugaggaagcuagucccuggguuuggaaaggcguauacuauauucaacaaaaccuugauggaggcugaugcucacuacaaaucaauccggacuuggaaugaaaucauccccuccaaaggguguuuaagaguuggggggagaugucauccucaugugaacgggguguucuucaacggcauuauacuggguccugacggacauguucuaaucccagagaugcagucgucccuccuccaccagcauauagaauuguuggaguccucagucaucccuuugaugcaucccuuagcagacccgucaacagucuuuaaagacggcgacgaggcagaggacuuuguugagguucaccuuccggaugugcacaagcagaucucggggguugaucuuggucucccaaacugggggaaguaugugcugauaagugcaggugcucugacugcauuaauguugacgauuuucuuaaugacguguugcagaaagacuaauagagcagagucaauacaacacaguccuggagagacagggaggaaagugucggugacuucucacaacggaagggucauaucuucaugggaaucauauaaaagcggaagugagaccaagcuguga

SEQ ID NO: 63230 - RNA, 1575 nt, Artificial Sequence
  derived and/or modified CDS sequence (wt) from glycoprotein__RABV__JN936760.1
augauuccucaaguucuuuuguuuguuccccuucuaguuuucucguuguguuuugggaaauuccccauuuacacgauaccagacaaacuugguccauggagucccaucgauauacaucaucucagcuguccgaacaaucugguuguggaagaugaaggaugcaccaaucugucuggauuuuccuacauggaacucaaagugggauauauuucagccauaaaagugaacggauucaccuguacagguguggugaccgaagcagaaaccuacacuaacuuuguugguuaugucaccaccacguuuaagagaaagcacuuucgcccuaugccggaugcgugcagagccgcauacaacuggaagauggcuggugaccccagguaugaagagucucugcacaauccguacccugacuaccacuggcuccgaacugucaagaccaccaaggagucccuugucaucauaucuccgagcguugcagauuuggacccguacgauaaaucccuucacucgagaguuuuuccuggcggaaaaugcucaggaauaaccguguccuccacuugcugcucuacuaaccacgacuacaccgucuggaugccugaaaauccuagacugggaacuucaugugacauuuucaccaauaguagagggaagagggcaucaaaagggggcaagacuuguggauuuguggaugaaagaggcuuguacaagucucuaaagggagcaugcaagcugaagcuaugugggguucuaggacuuagacuuauggacggaacaugggucgcgauucagacaucagaugagaucaaauggugcucuccugaucagcuaguaaaucuacacgacuuucacucggaugagauugaacaucuuguuguggaggaguuggucaaaaagagggaagagugucuggacgcacuggagacuauuaugaccacaaaguccgugaguuucagacgucuuagucauuugaggaagcuagucccuggguuuggaaaggcguauacuauauucaacaaaaccuugauggaggcugaugcucacuacaaaucaauccggacuuggaaugaaaucauccccuccaaaggguguuuaagaguuggggggagaugucauccucaugugaacgggguguucuucaacggcauuauacuggguccugacggacauguucuaaucccagagaugcagucgucccuccuccaccagcauauggaauuguuggaguccucagucaucccuuugaugcaucccuuagcagacccgucaacagucuuuaaagacggcgacgaggcagaggacuuuguugagguucaccuuccggaugugcacaagcagaucucggggguugaucuuggucucccaaacugggggaaguaugugcugauaagugcaggugcucugacugcacuaauguugacgauuuucuuaaugacguguugcagaaagacuaauagagcagagucaauacaacacaguccuggagagacagggaggaaagugucggugacuucucacaacggaagggucauaucuucaugggaaucauauaaaagcggaagugagaccaagcuguga

SEQ ID NO: 63231 - RNA, 1575 nt, Artificial Sequence
  derived and/or modified CDS sequence (wt) from glycoprotein__RABV__JN936761.1
augauuccucaaguucuuuuguuuguuccccuucuaguuuucucgucguguuuugggaaauuccccauuuacacgauaccagacaaacuugguccauggagucccaucgauauacaucaucucagcuguccgaacaaucugguuguggaagaugaaggaugcaccaaucugucuggauuuuccuacauggaacucaaagugggauauauuucagccauaaaagugaacggauucaccuguacagguguggugaccgaagcagaaaccuacacuaacuuuguugguuaugucaccaccacguuuaagagaaagcacuuucgcccuaugccggaugcgugcagagccgcauacaacuggaagauggcuggugaccccagguaugaagagucucugcacaauccguaccccgacuaccacuggcuccgaacugucaagaccaccaaggagucccuugucaucauaucuccgagcguugcagauuuggacccguacgauaaaucccuucacucgagaguuuuuccuggcggaaaaugcucaggaauaaccguguccuccacuugcugcucuacuaaccacgacuacaccaucuggaugccugaaaauccuagacugggaacuucaugugacauuuucaccaauaguagagggaagagggcaucaaaagggggcaagacuuguggauuuguggaugaaagaggcuuguacaagucucuaaagggagcaugcaagcugaagcuaugugggguucuaggacuuagacuuauggacggaacaugggucgcgauucagacaucagaugagaucaaauggugcucuccugaucagcuaguaaaucuacacgacuuucacucggaugagauugaacaucuuguuguggaggaguuggucaaaaagagggaagagugucuggacgcacuggagacuauuaugaccacaaaguccgugaguuucagacgucuuagucauuugaggaagcuagucccuggguuuggaaaggcguauaccauauucaacaagaccuugauggaggcugaugcucacuacaaaucaauccggacuuggaaugaaaucauccccuccaaaggguguuuaagaguuggggggagaugucauccucaugugaacgggguguucuucaacggcauuauacuggguccugacggacauguucucaucccagagaugcagucgucccuccuccaccagcauauggaauuguuggaguccucagucaucccuuugaugcaucccuuagcagacccgucaacagucuuuaaagacggcgacgaggcagaggacuuuguugagguucaccuuccggaugugcacaagcagaucucggggguugaucuuggucucccaaacugggggaaguaugugcugauaagugcaggugcucugacugcauuaauguugaugauuuucuuaaugacguguugcagaaagacuaauagggcagagucaauacaacacaguccuggagagacagggaggaaagugucggugacuucucacaacggaagggucauaucuucaugggaaucauauaaaagcggaagugagaccaagcuguga

SEQ ID NO: 63232 - RNA, 1575 nt, Artificial Sequence
  derived and/or modified CDS sequence (wt) from glycoprotein__RABV__JN936762.1
augauuccucaaguucuuuuguuuguuccccuucuaguuuucucgucguguuucgggaaauuccccauuuacacgauaccagacaaacuugguccauggagucccaucgauauacaucaccucagcuguccgaacaaucugguuguggaagaugaaggaugcaccaaucugucuggauuuuccuacauggaacucaaagugggauauauuucagccauaaaagugaacggauucaccuguacagguguagugacugaagcagaaaccuacacuaacuuuguugguuaugucaccaccacguuuaagagaaagcacuuucgcccuaugccggaugcgugcagagccgcauacaacuggaagauggcuggugaccccagguaugaagagucucugcacaauccguaccccgacuaccacuggcuccgaacugucaagaccaccaaggagucccuugucaucauaucuccgagcguugcagauuuggacccguacgauaaaucccuucacucgagaguuuuuccuggcggaaaaugcucaggaauaaccguguccuccacuugcugcucuacuaaccacgacuacaccaucuggaugccugaaaauccuagacugggaacuucaugugacauuuucaccaauaguagagggaagagggccucaaaagggggcaagacuuguggauuuguggaugaaagaggcuuguacaagucucuaaggggagcaugcaagcugaagcuaugugggguuuuaggacuuagacuuauggacggaacaugggucgcaauucagacaucagaugagaucaaauggugcucuccugaucagcuaguaaaucuacacgacuuucacucggaugagaucgaacaucuuguuguggaggaguuggucaaaaagagggaagagugucuggacgcacuggagacuauuaugaccacaaaguccgugaguuucagacgucuuagucauuugaggaagcuagucccuggguuuggaaaggcguauaccauauucaacaagaccuugauggaggcugaugcucacuacaaaucaauccggacuuggaaugaaaucauccccuccaaaggguguuuaagaguuggggggagaugucauccucaugugaacgggguguucuucaacggcauuauacuggguccugacggacauguucucaucccagagaugcagucgucccuccuccaccagcauauggaauuguuggaguccucagucaucccuuugaugcaucccuuagcagacccgucaacagucuuuaaagacggcgacgaggcagaggacuuuguugagguucaccuuccggaugugcacaagcagaucucggggguugaucuuggucucccaaacugggggaaguaugugcugauaagugcaggugcucugacugcauuaauguugaugauuuucuuaaugacguguugcagaaagacuaauagagcagagucaauacaacacaguccuggagagacagggaggaaagugucggugacuucucacaacggaagggucauaucuucaugggaaucauauaaaagcggaagugagaccaagcuguga

SEQ ID NO: 63233 - RNA, 1575 nt, Artificial Sequence
  derived and/or modified CDS sequence (wt) from glycoprotein__RABV__JN936763.1
augauuccucaaguucuuuuguuuguuccccuucuaguuuucucgucguguuuugggaaauuccccauuuacacgauaccagacaaacuugguccauggagucccaucgauauacaucaucucagcuguccgaacaaucugguuguggaagaugaaggaugcaccaaucugucuggauuuuccuacauggaacucaaagugggauauauuucagccauaaaagugaacggauucaccuguacagguguggugacagaagcagaaaccuacacgaacuuuguugguuaugucaccaccacguuuaagagaaagcacuuucgcccuacgccagaugcgugcagagccgcguacaacuggaagauggcuggugaccccagguaugaagagucucugcacaauccguacccugauuaucacuggcuccgaacugucaagaccuccaaggagucccuugucaucauaucuccgagcguugcagauuuggacccguacgauaaaucccuucacucgagaguuuuuccuggcggaaaaugcucuggaauaaccguguccuccacuugcugcucuacuaaccacgacuacaccaucuggaugccugaaaauccuagacugggaacuucgugugacauuuucaccaauaguagagggaagagggcaucaaaagggggcaagacuuguggauuuguggaugaaagaggcuuguacaagucucuaaagggagcaugcaagcugaagcuaugugggguucuaggacuuagacuuauggacggaacaugggucgccauucagacaucagaugagaucaaauggugcucuccugaucagcuaguaaaucuacacgacuuucacucagaugagauugaacaucuuguuguggaggaguuggucaaaaagagggaagagugucuggacgcacuggagacuauuaugaccacaaaguccgugaguuucaggcgucuuagucauuugaggaagcuagucccuggguuuggaaaggcguauaccauauucaacaaaaccuugauggaggcugaugcucacuauaaaucgauccggacuuggaaugaaaucauccccucuaaaggguguuuaagaguuggggggagaugucauccucaugugaacgggguguucuucaacggcauuauacuggguccugacggacauguucuaaucccagagaugcaaucgucccuccuccaccagcauauggaauuguuggaguccucagucaucccuuugaugcaucccuuagcagacccgucaacaguuuuuaaagacggcgacgaggcagaggacuuuguugagguucaccuuccggaugugcacaagcagaucucggggguugaucuuggucucccaaacugggggaaguacgugcugguaagugcaggugcucugacugcauuaauguugaugauuuucuuaaugacguguugcagaaagacuaauagagcagagucaauacaacacaguccuggagagacagggaggaaagugucgguaacuucucacaacggaagggucauaucuucaugggaaucauauaaaaguggaggugagaccaagcuguga

SEQ ID NO: 63234 - RNA, 1575 nt, Artificial Sequence
  derived and/or modified CDS sequence (wt) from glycoprotein__RABV__JN936764.1
augauuccucaaguucuuuuguuuguucccuuucuaguuuucucgucguguuuugggaaauuccccauuuacacgauaccagacaaacuugguccauggagucccaucgauauacaucaucucagcuguccgaacaaucugguuguggaagaugaaggaugcaccaauuugucuggauuuuccuacauggaacucaaagugggauauauuucagccauaaaagugaacggauucaccuguacagguguggugacugaagcagaaaccuacacuaacuuuguugguuaugucaccaccacguuuaagagaaagcacuuucgcccuaugccggaugcgugcagagccgcauacaacuggaagauggcuggugaccccagguaugaagagucucugcacaauccguaccccgacuaccacuggcuccgaacugucaagaccaccaaggagucccuugucaucauaucuccgagcguugcagauuuggacccguacgauaaaucccuucacucgagaguuuuuccuggcggaaaaugcucaggaauaaccguguccuccacuugcugcucuacuaaccacgacuacaccaucuggaugccugaaaauccuagacugggaacuucaugugacauuuucaccaauaguagagggaagagggcaucaaaagggggcaagacuuguggauuuguggaugaaagaggcuuguacaagucucuaaagggagcaugcaagcugaagcuaugugggguucuaggacuuagacuuauggacggaacaugggucgcgauucagacaucagaugagaucaaauggugcucuccugaucagcuaguaaaucuacacgacuuucacucggaugagauugaacaucuuguuguggaggaguuggucaaaaagagggaagagugucuggacgcacuggagacuauuaugaccacaaaguccgugaguuucagacgucuuagucauuugaggaagcuagucccuggguuuggaaaggcguauacuauauucaacaaaaccuugauggaggcugaugcucacuacaaaucaauccggacuuggaaugaaaucauccccuccaaaggguguuuaagaguuggggggagaugucauccucaugugaacgggguguucuucaacggcauuauacuggguccugacggacauguucuaaucccagagaugcagucgucccuccuccaccagcauauggaauuguuggaguccucagucaucccuuugaugcaucccuuagcagacccgucaacagucuuuaaagacggcgacgaggcagaggacuuuguugagguucaccuuccggaugugcacaagcagaucucggggguugaucuuggucucccaaacugggggaaguaugugcugauaagugcaggugcucugacugcauuaauguugacgauuuucuuaaugacguguugcagaaagacuaauagagcagagucaauacaacacaguccuggagagacagggaggaaagugucggugacuucucacaacggaagggucauaucuucaugggaaucauauaaaagcggaagugagaccaagcuguga

SEQ ID NO: 63235 - RNA, 1575 nt, Artificial Sequence
  derived and/or modified CDS sequence (wt) from glycoprotein__RABV__JN936765.1
augauuccucaaguucuuuuguuuguuccccuucuaguuuucucgucguguuuugggaaauuccccauuuacacgauaccagacaaacuugguccauggagucccaucgauauacaucaucucagcuguccgaacaaucugguuguggaagaugaaggaugcaccaauuugucuggauuuuccuacauggaacucaaagugggauauauuucagccauaaaagugaacggauucaccuguacagguguggugaccgaagcagaaaccuacacuaacuuuguugguuaugucaccaccacguuuaagagaaagcacuuucgcccuaugccggaugcgugcagagccgcauacaacuggaagauggcuggugaccccagguaugaagagucucugcacaauccguaccccgacuaccacuggcuccgaacugucaagaccaccaaggagucccuugucaucauaucuccgagcguugcagauuuggacccguacgauaaaucccuucacucgagaguuuuuccuggcggaaaaugcucaggaauaaccguguccuccacuugcugcucuacuaaccacgacuacaccaucuggaugccugaaaauccuagacugggaacuucaugugacauuuucaccaauaguagagggaagagggcaucaaaagggggcaagacuuguggauuuguggaugaaagaggcuuguacaagucucuaaagggagcaugcaagcugaagcuaugugggguucuaggacuuagacuuauggacggaacaugggucgcgauucagacaucagaugagaucaaauggugcucuccugaucagcuaguaaaucuacacgacuuucacucggaugagauugaacaucuuguuguggaggaguuggucaaaaagagggaagagugucuggacgcacuggagacuauuaugaccacaaaguccgugaguuucagacgucuuagucauuugaggaagcuagucccuggguuuggaaaggcguauacuauauucaacaaaaccuugauggaggcugaugcucacuacaaaucaauccggacuuggaaugaaaucauccccuccaaaggguguuuaagaguuggggggagaugucauccucaugugaacgggguguucuucaacggcauuauacuggguccugacggacauguucuaaucccagagaugcagucgucccuccuccaccagcauauggaauuguuggaguccucagucaucccuuugaugcaucccuuagcagacccgucaacagucuuuaaagacggcgacgaggcagaggacuuuguugagguucaccuuccggaugugcacaagcagaucucggggguugaucuuggucucccaaacugggggaaguaugugcugauaagugcaggugcucugacugcauuaauguugacgauuuucuuaaugacguguugcagaaagacuaauagagcagagucaauacaacacaguccuggagagacagggaggaaagugucggugacuucucacaacggaagggucauaucuucaugggaaucauauaaaagcggaagugagaccaagcuguga

SEQ ID NO: 63236 - RNA, 1575 nt, Artificial Sequence
  derived and/or modified CDS sequence (wt) from glycoprotein__RABV__JN936766.1
augauuccucaaguucuuuuguuuguuccccuucuaguuuucucgucguguuuugggaaauuccccauuuacacgauaccagacaaacuugguccauggagucccaucgauauacaucaucucagcuguccgaacaaucugguuguggaagaugaaggaugcaccaauuugucuggauuuuccuacauggagcucaaagugggauauauuucagccauaaaagugaacggauucaccuguacagguguggugaccgaagcagaaaccuacacuaacuuuguugguuaugucaccaccacguuuaagagaaagcacuuucgcccuaugccggaugcgugcagagccgcauacaacuggaagauggcuggugaccccagguaugaagagucucugcacaauccguaccccgacuaccacuggcuccgaacugucaagaccaccaaggagucccuugucaucauaucuccgagcguugcagauuuggacccguacgauaaaucccuucacucgagaguuuuuccuggcggaaaaugcucaggaauaaccguguccuccacuugcugcucuacuaaccacgacuacaccaucuggaugccugaaaauccuagacugggaacuucaugugacauuuucaccaauaguagagggaagagggcaucaaaagggggcaagacuuguggauuuguggaugaaagaggcuuguacaagucucuaaagggagcaugcaagcugaagcuaugugggguucuaggacuuagacuuauggacggaacaugggucgcgauucagacaucagaugagaucaaauggugcucuccugaucagcuaguaaaucuacacgacuuucacucggaugagauugaacaucuuguuguggaggaguuggucaaaaagagggaagagugucuggacgcacuggagacuauuaugaccacaaaguccgugaguuucagacgucuuagucauuugaggaagcuagucccuggguuuggaaaggcguauaccauauucaacaaaaccuugauggaggcugaugcucacuacaaaucaauccggacuuggaaugaaaucauccccuccaaaggguguuuaagaguuggggggagaugucauccucaugugaacgggguguucuucaacggcauuauacuggguccugacggacauguucuaaucccagagaugcagucgucccuccuccaccagcauauggaauuguuggaguccucagucaucccuuugaugcaucccuuagcagacccgucaacagucuuuaaggacggcgacgaggcagaggacuuuguugagguucaccuuccggaugugcacaagcagaucucggggguugaucuuggucucccaaacugggggaaguaugugcugauaagugcaggugcuuugacugcauuaauguugacgauuuucuuaaugacguguugcagaaagacuaauagagcagagucaauacaacacaguccuggagagacagggaggaaagugucggugacuucucacaacggaagggucauaucuucaugggaaucauauaaaagcggaagugagaccaagcuguga

SEQ ID NO: 63237 - RNA, 1575 nt, Artificial Sequence
  derived and/or modified CDS sequence (wt) from glycoprotein__RABV__JN936767.1
augauuccccaaguucuuuuguuuguuccccuucuaguuuucucgucguguuuugggaaauuccccauuuacacgauaccagacaaacuugguccauggagucccaucgauauacaucaucucagcuguccgaacaaucugguuguggaagaugaaggaugcaccaauuugucuggauuuuccuacauggaacucaaagugggauauauuucagccauaaaagugaacggauucaccuguacagguguggugaccgaagcagaaaccuacacuaacuuuguugguuaugucaccaccacguuuaagagaaagcacuuucgcccuaugccggaugcgugcagagccgcauacaacuggaagauggcuggugaccccagguaugaagagucucugcacaauccguaccccgacuaccacuggcuccgaacugucaagaccaccaaggagucccuugucaucauaucuccgagcguugcagauuuggacccguacgauaaaucccuucacucgagaguuuuuccuggcggaaaaugcucaggaauaaccguguccuccacuugcugcucuacuaaccacgacuacaccaucuggaugccugaaaauccuagacugggaacuucaugugacauuuucaccaauaguagagggaagagggcaucaaaagggggcaagacuuguggauuuguggaugaaagaggcuuguacaagucucuaaagggagcaugcaagcugaagcuaugugggguucuaggacuuagacuuauggacggaacaugggucgcgauucagacaucagaugagaucaaauggugcucuccugaucagcuaguaaaucuacacgacuuucacucggaugagauugaacaucuuguuguggaggaguuggucaaaaagagggaagagugucuggacgcacuggagacuauuaugaccacaaaguccgugaguuucagacgucuuagucauuugaggaagcuagucccuggguuuggaaaggcguauacuauauucaacaaaaccuugauggaggcugaugcucacuacaaaucaauccggacuuggaaugaaaucauccccuccaaaggguguuuaagaguuggggggagaugucauccucaugugaacgggguguucuucaacggcauuauacuggguccugacggacauguucuaaucccagagaugcagucgucccuccuccaccagcauauggaauuguuggaguccucagucaucccuuugaugcaucccuuagcagacccgucaacagucuuuaaagacggcgacgaggcagaggacuuuguugagguucaccuuccggaugugcacaagcagaucucggggguugaucuuggucucccaaacugggggaaguaugugcugauaagugcaggugcucugacugcauuaauguugacgauuuucuuaaugacguguugcagaaagacuaauagagcagagucaauacaacacaguccuggagagacagggaggaaagugucggugacuucucacaacggaagggucauaucuucaugggaaucauauaaaagcggaagugagaccaagcuguga

SEQ ID NO: 63238 - RNA, 1575 nt, Artificial Sequence
  derived and/or modified CDS sequence (wt) from glycoprotein__RABV__JN936768.1
augauuccucaaguucuuuuguuuguuccccuucuaguuuucucgucguguuucgggaaauuccccauuuacacgauaccagacaaacucgguccauggagucccaucgauauacaucaccucagcuguccgaacaaucugguuguggaagaugaaggaugcaccaaucugucuggauuuuccuacauggaacucaaagugggauauauuucagccauaaaagugaacggauucaccuguacagguguggugaccgaagcagaaaccuacacuaacuuuguugguuaugucaccaccacguuuaagagaaagcacuuucgcccuaugccggaugcgugcagagccgcauacaacuggaagauggcuggugaccccagguaugaagagucucugcacaauccguaccccgacuaccacuggcuccgaacugucaagaccaccaaggagucccuugucaucauaucuccgagcguugcagauuuggacccguacgauaaaucucuucacucgagaguuuuuccuggcggaaaaugcucaggaauaaccguguccuccacuugcugcucuacuaaccacgacuacaccaucuggaugccugaaaauccuagacugggaacuucaugugacauuuucaccaauaguagagggaagagggccucaaaagggggcaagacuuguggauuuguggaugaaagaggcuuguacaagucucuaaggggagcaugcaagcugaagcuaugugggguucuaggacuuagacuuauggacggaacaugggucgcaauucagacaucagaugagaucaaauggugcucuccugaucagcuaguaaaucuacacgacuuucacucggaugagaucgaacaucuuguuguggaggaguuggucaaaaagagggaagagugucuggacgcacuggagacuauuaugaccacaaaguccgugaguuucagacgucuuagucauuugaggaagcuagucccuggguuuggaaaggcguauaccauauucaacaagaccuugauggaggcugaugcucacuacaaaucaauccggacuuggaaugaaaucauccccuccaaaggguguuuaagaguuggggggagaugucauccucaugugaacgggguguucuucaacggcauuauacuggguccugacggacauguucucaucccagagaugcagucgucccuccuccaccagcauauggaauuguuggaguccucagucaucccuuugaugcaucccuuagcagacccgucaacagucuuuaaagacggcgacgaggcagaggacuuuguugagguucaccuuccggaugugcacaagcagaucucggggguugaucuuggucuccccaacugggggaaguaugugcugauaagugcaggugcucugacugcauuaauguugacgauuuucuuaaugacguguugcagaaagacuaauagagcagagucaauacaacacaguccuggagagacagggaggaaagugucggugacuucucacaacggaagggucauaucuucaugggaaucauauaaaagcggaagugagaccaagcuguga

SEQ ID NO: 63239 - RNA, 1575 nt, Artificial Sequence
  derived and/or modified CDS sequence (wt) from glycoprotein__RABV__JN936769.1
augauuccucaaguucuuuuguuuguuccccuucuaguuuucucgucguguuuugggaaauuccccauuuacacgauaccagacaaacuugguccauggagucccaucgauauacaucaucucagcuguccgaacaaucugguuguggaagaugaaggaugcaccaauuugucuggauuuuccuacauggaacucaaagugggauauauuucagccauaaaagugaacggauucaccuguacagguguggugaccgaagcagaaaccuacacuaacuuuguugguuaugucaccaccacguuuaagagaaagcacuuucgcccuaugccggaugcgugcagagccgcauacaacuggaagauggcuggugaccccagguaugaagagucucugcacaauccguaccccgacuaccacuggcuccgaacugucaagaccaccaaggagucccuugucaucauaucuccgagcguugcagacuuggacccguacgauaaaucccuucacucgagaguuuuuccuggcggaaaaugcucaggaauaaccguguccuccacuugcugcucuacuaaccacgacuacaccaucuggaugccugaaaauccuagacugggaacuucaugugacauuuucaccaauaguagagggaagagggcaucaaaagggggcaagacuuguggauuuguggaugaaagaggcuuguacaagucucuaaagggagcaugcaagcugaagcuaugugggguucuaggacuuagacuuauggacggaacaugggucgcgauucagacaucagaugagaucaaauggugcucuccugaucagcuaguaaaucuacacgacuuucacucggaugagauugaacaucuuguuguggaggaguuggucaaaaagagggaagagugucuggacgcacuggagacuauuaugaccacaaaguccgugaguuucagacgucuuagucauuugaggaagcuagucccuggguuuggaaaggcguauaccauauucaacaaaaccuugauggaggcugaugcucacuacaaaucaauccggacuuggaaugaaaucauccccuccaaaggguguuuaagaguuggggggagaugucauccucaugugaacgggguguucuucaacggcauuauacuggguccugacggacauguucuaaucccagagaugcagucgucccuccuccaccagcauauggaauuguuggaguccucagucaucccuuugaugcaucccuuagcagacccgucaacagucuuuaaagacggcgacgaggcagaggacuuuguugagguucaccuuccggaugugcacaagcagaucucggggguugaucuuggucucccaaacugggggaaguaugugcugauaagugcaggugcuuugacugcauuaauguugacgauuuucuuaaugacguguugcagaaagacuaauagagcagggucaauacaacacaguccuggagagacagggaggaaagugucggugacuucucacaacggaagggucauaucuucaugggaaucauauaaaagcggaagugagaccaagcuguga

SEQ ID NO: 63240 - RNA, 1575 nt, Artificial Sequence
  derived and/or modified CDS sequence (wt) from glycoprotein__RABV__JN936770.1
augauuccucaaguucuuuuguuuguuccccuucuaguuuucucgucuuguuuugggaaauuccccauuuacacgauaccagacaaacuugguccauggagucccaucgauauacaucaucucagcuguccgaacaaccugguuguggaagaugaaggaugcaccaaucugucuggauuuuccuacauggaacucaaagugggauauauuucagccauaaaagugaacggauucaccuguacagguguggugaccgaagcagaaaccuacacuaacuuuguugguuaugucaccaccacguuuaagagaaagcacuuucgcccuaugccggaugcgugcagauccgcauacaacuggaagauggcuggugaccccagguaugaagagucucugcacaauccguaccccgacuaccacuggcuccgaacugucaagaccaccaaggagucccuugucaucauaucuccgagcguugcagauuuggacccguacgauaaaucccuucacucgagaguuuuuccuggcggaaaaugcucaggaauaaccguguccuccacuugcugcucuacuaaccacgacuacaccaucuggaugccugaaaauccuagacugggaacuucaugugacauuuucaccaauaguagagggaagagggcaucaaaagggggcaagacuuguggauuuguggaugaaagaggcuuguacaagucucuaaagggagcaugcaagcugaagcuaugugggguucuaggacuuagacuuauggacggaacaugggucgcgauucagacaucagaugagaucaaauggugcucuccugaucagcuaguaaaucuacacgacuuucacucggaugagauugaacaucuuguuguggaggaguuggucaaaaagagggaagagugucuggacgcacuggagacuauuaugaccacaaaguccgugaguuucagacgucuuagucauuugaggaagcuagucccuggguuuggaaaggcguauaccauauucaacaaaaccuugauggaggcugaugcucacuauaaaucaauccggacuuggaaugaaaucauccccuccaaaggguguuuaagaguuggggggagaugucauccucaugugaacgggguguucuucaacggcauuauacuggguccugacggacauguucuaaucccagagaugcagucgucccuccuccaccagcauauggaauuguuggaguccucagucaucccuuugaugcaucccuuagcagacccgucaacagucuuuaaagacggcgacgaggcagaggacuuuguugagguucaccuuccggaugugcacaagcagaucucggggguugaucuuggucucccaaacugggggaaguaugugcugauaagugcaggugcucugacugcauuaauguugacgauuuucuuaaugacguguugcagaaagacuaauagagcagagucaauacaacacaguccuggagagacagggaggaaagugucggugacuucucacaacggaagggucauaucuucaugggaaucauauaaaagcggaagugagaccaagcuguga

SEQ ID NO: 63241 - RNA, 1575 nt, Artificial Sequence
  derived and/or modified CDS sequence (wt) from glycoprotein__RABV__JN936771.1
augauuccucaaguucuuuuguuuguuccccuucuaguuuucucgucguguuuugggaaauuccccauuuacacgauaccagacaaacuugguccauggagucccaucgauauacaucaucucagcuguccgaacaaucugguuguggaagaugaaggaugcaccaaucugucuggauuuuccuacauggaacucaaagugggauauauuucagccauaaaagugaacggauucaccuguacagguguggugacagaagcagaaaccuacacgaacuuuguugguuaugucaccaccacguuuaagagaaagcacuuucgcccuacgccggaugcgugcagagccgcguacaacuggaagauggcuggugaccccagguaugaagagucucugcacaauccguacccugauuaucacuggcuccgaacugucaagaccuccaaggagucccuugucaucauaucuccgagcguugcagauuuggacccguacgauaaaucccuucacucgagaguuuuuccuggcggaaaaugcucaggaauaaccguguccuccacuugcugcucuacuaaccacgacuacaccaucuggaugccugaaaauccuagacugggaacuucgugugacauuuucaccaauaguagagggaagagggcaucaaaagggggcaagacuuguggauuuguggaugaaagaggcuuguacaagucucuaaagggagcaugcaagcugaagcuaugugggguucuaggacuuagacuuauggacggaacaugggucgcaauucagacaucagaugagaucaaauggugcucuccugaucagcuaguaaaucuacacgacuuucacucagaugagauugaacaucuuguuguggaggaguuggucaaaaagagggaagagugucuggacgcacuagagacuauuaugaccacaaaguccgugaguuucaggcgucuuagucauuugaggaagcuagucccuggguuuggaaaggcguauaccauauucaacaaaaccuugauggaggcugaugcucacuauaaaucaauccggacuuggaaugaaaucauccccucuaaaggguguuuaagaguuggggggagaugucauccucaugugaacgggguguucuucaacggcauuauacuggguccugacggacauguucuaaucccagagaugcaaucgucccuccuccaccagcauauggaauuguuggaguccucagucaucccuuugaugcaucccuuagcagacccgucaacaguuuuuaaagacggcgacgaggcagaggacuuuguugagguucaccuuccggaugugcacaagcagaucucggggguugaucuuggucucccaaacugggggaaguacgugcugguaagugcaggugcucugacugcauuaauguugaugauuuucuuaaugacguguugcagaaagacuaauagagcagagucaauacaacacaguccuggagagacagggaggaaagugucgguaacuucucacaacggaagggucauaucuucaugggaaucauauaaaaguggaggugagaccaagcuguga

SEQ ID NO: 63242 - RNA, 1575 nt, Artificial Sequence
  derived and/or modified CDS sequence (wt) from glycoprotein__RABV__JN936772.1
augauuccucaaguucuuuuguuuguuccccuucuaguuuucucgucguguuuugggaaauuccccauuuacacgauaccagacaagcuugguccauggagucccaucgauauacaucaucucagcuguccgaacaaucugguuguggaagaugaaggaugcaccaauuugucuggauuuuccuacauggaacucaaagugggauauauuucagccauaaaagugaacggauucaccuguacagguguggugaccgaagcagaaaccuacacuaacuuuguugguuaugucaccaccacguuuaagagaaagcacuuucgcccuaugccggaugcgugcagagccgcauacaacuggaagauggcuggugaccccagguaugaagagucucugcacaauccguaccccgacuaccacuggcuccgaacugucaagaccaccaaggagucccuugucaucauaucuccgagcguugcagauuuggacccguacgauaaaucccuucacucgagaguuuuuccuggcggaaaaugcucaggaauaaccguguccuccacuugcugcucuacuaaccacgacuacaccaucuggaugccugaaaauccuagacugggaacuucaugugacauuuucaccaauaguagagggaagagggcaucaaaagggggcaagacuuguggauuuguggaugaaagaggcuuguacaagucucuaaagggagcaugcaagcugaagcuaugugggguucuaggacuuagacuuauggacggaacaugggucgcgauucagacaucagaugagaucaaauggugcucuccugaucagcuaguaaaucuacacgacuuucacucggaugagauugaacaucuuguuguggaggaguuggucaaaaagagggaagagugucuggacgcacuggagacuauuaugaccacaaaguccgugaguuucagacgucuuagucauuugaggaagcuagucccuggguuuggaaaggcguauaccauauucaacaaaaccuugauggaggcugaugcucacuacaaaucaauccggacuuggaaugaaaucauccccuccaaaggguguuuaagaguuggggggagaugucauccucaugugaacgggguguucuucaacggcauuauacuggguccugacggacauguucuaaucccagagaugcagucgucccuccuccaccagcauauggaauuguuggaguccucagucaucccuuugaugcaucccuuagcagacccgucaacagucuuuaaagacggcgacgaggcagaggacuuuguugagguucaccuuccggaugugcacaagcagaucucggggguugaucuuggucucccaaacugggggaaguaugugcugauaagugcaggugcuuugacugcauuaauguugacgauuuucuuaaugacguguugcagaaagacuaauagagcagagucaauacaccacaguccuggagagacagggaggaaagugucggugacuucucacaacggaagggucauaucuucaugggaaucauauaaaagcggaagugagaccaagcuguga

SEQ ID NO: 63243 - RNA, 1575 nt, Artificial Sequence
  derived and/or modified CDS sequence (wt) from glycoprotein__RABV__JN936773.1
augauuccucaaguucuuuuguuuguuccccuucuaguuuucucgucguguuuugggaaauuccccauuuacacgauaccagacaaacuugguccauggagucccaucgauauacaucaucucagcuguccgaacaaucugauuguggaagaugaaggaugcaccaauuugucuggauuuuccuacauggaacucaaagugggauauauuucagccauaaaagugaacggauucaccuguacagguguggugaccgaagcagaaaccuacacuaacuuuguugguuaugucaccaccacguuuaagagaaagcacuuucgcccuaugccggaugcgugcagagccgcauacaacuggaagauggcuggugaccccagguaugaagagucucugcacaauccguaccccgacuaccacuggcuccgaacugucaagaccaccaaggagucccuugucaucauaucuccgagcguugcagacuuggacccguacgauaaaucccuucacucgagaguuuuuccuggcggaaaaugcucaggaauaaccguguccuccacuugcugcucuacuaaccacgacuacaccaucuggaugccugaaaauccuagacugggaacuucaugugacauuuucaccaauaguagagggaagagggcaucaaaagggggcaagacuuguggauuuguggaugaaagaggcuuguacaagucucuaaagggagcaugcaagcugaagcuaugugggguucuaggacuuagacuuauggacggaacaugggucgcgauucagacaucagaugagaucaaauggugcucuccugaucagcuaguaaaucuacacgacuuucacucggaugagauugaacaucuuguuguggaggaguuggucaaaaagagggaagagugucuggacgcacuggagacuauuaugaccacaaaguccgugaguuucagacgucuuagucauuugaggaagcuagucccuggguuuggaaaggcguauaccauauucaacaaaaccuugauggaggcugaugcucacuacaaaucaauccggacuuggaaugaaaucauccccuccaaaggguguuuaagaguuggggggagaugucauccucaugugaacgggguguucuucaacggcauuauacuggguccugacggacauguucuaaucccagagaugcagucgucccuccuccaccagcauauggaauuguuggaguccucagucaucccuuugaugcaucccuuagcagacccgucaacagucuuuaaagacggcgacgaggcagaggacuuuguugagguucaccuuccggaugugcacaagcagaucucggggguugaucuuggucucccaaacugggggaaguaugugcugauaagugcaggugcuuugacugcauuaauguugacgauuuucuuaaugacguguugcagaaagacuaauagagcagggucaauacaacacaguccuggagagacagggaggaaagugucggugacuucucacaacggaagggucauaucuucaugggaaucauauaaaagcggaagugagaccaagcuguga

SEQ ID NO: 63244 - RNA, 1575 nt, Artificial Sequence
  derived and/or modified CDS sequence (wt) from glycoprotein__RABV__JN936774.1
augauuccucaaguucuuuuguuuguuccccuucuaguuuucucgucguguuuugggaaauuccccauuuacacgauaccagacaaacuugguccauggagucccaucgauauacaucaucucagcuguccgaacaaucugguuguggaagaugaaggaugcaccaauuugucuggauuuuccuacauggaacucaaagugggauauauuucagccauaaaagugaacggauucaccuguacagguguggugacugaagcagaaaccuacacuaacuuuguugguuaugucaccaccacguuuaagagaaagcacuuucgcccuaugccggaugcgugcagagccgcauacaacuggaagauggcuggugaccccagguaugaagagucucugcacaauccguaccccgacuaccacuggcuccgaacugucaagaccaccaaggagucccuugucaucauaucuccgagcguugcagauuuggacccguacgauaaaucccuucacucgagaguuuuuccuggcggaaaaugcucaggaauaaccguguccuccacuugcugcucuacuaaccacgacuacaccaucuggaugccugaaaauccuagacugggaacuucaugugacauuuucaccaauaguagagggaagagggcaucaaaagggggcaagacuuguggauuuguggaugaaagaggcuuguacaagucucuaaagggagcaugcaagcugaagcuaugugggguucuaggacuuagacuuauggacggaacaugggucgcgauucagacaucagaugagaucaaauggugcucuccugaucagcuaguaaaucuacacgacuuucacucggaugagauugaacaucuuguuguggaggaguuggucaaaaagagggaagagugucuggacgcacuggagacuauuaugaccacaaaguccgugaguuucagacgucuuagucauuugaggaagcuagucccuggguuuggaaaggcguauacuauauucaacaaaaccuugauggaggcugaugcucacuacaaaucaauccggacuuggaaugaaaucauccccuccaaaggguguuuaagaguuggggggagaugucauccucaugugaacgggguguucuucaacggcauuauacuggguccugacggacauguucuaaucccagagaugcagucgucccuccuccaccagcauauggaauuguuggaguccucagucaucccuuugaugcaucccuuggcagacccgucaacagucuuuaaagacggcgacgaggcagaggacuuuguugagguucaccuuccggaugugcacaagcagaucucggggguugaucuuggucucccgaacugggggaaguaugugcugauaagugcaggugcucugacugcauugauguugacgauuuucuuaaugacguguugcagaaagacuaauagagcagagucaauacaacacaguccuggagagacagggaggaaagugucggugacuucucacaacggaagggucauaucuucaugggaaucauauaaaagcggaagugagaccaagcuguga

SEQ ID NO: 63245 - RNA, 1575 nt, Artificial Sequence
  derived and/or modified CDS sequence (wt) from glycoprotein__RABV__JN936775.1
augauuccucaaguucuuuuguuuguuccccuucuaguuuucucgucguguuuugggaaauuccccauuuacacgauaccagacaaacuugguccauggagucccaucgauauacaucaucucagcuguccgaacaaucugguuguggaagaugaaggaugcaccaauuugucuggauuuuccuacauggaacucaaagugggauauauuucagccauaaaagugaacggauucaccuguacagguguggugaccgaagcagaaaccuacacuaacuuuguugguuaugucaccaccacguuuaagagaaagcacuuucgcccuaugccggaugcgugcagagccgcauacaacuggaagauggcuggugaccccagguaugaagagucucugcacaauccguaccccgacuaccacuggcuccgaacugucaagaccaccaaggagucccuugucaucauaucuccgagcguugcagauuuggacccguacgauaaaucccuucacucgagaguuuuuccuggcggaaaaugcucaggaauaaccguguccuccacuugcugcucuacuaaccacgacuacaccaucuggaugccugaaaauccuagacugggaacuucaugugacauuuucaccaauagcagagggaagagggcaucaaaagggggcaagacuuguggauuuguggaugaaagaggcuuguacaagucucuaaagggagcaugcaagcugaagcuaugugggguucuaggacuuagacuuauggacggaacaugggucgcgauucagacaucagaugagaucaaauggugcucuccugaucagcuaguaaaucuacacgacuuucacucggaugagauugaacaucuuguuguggaggaguuggucaaaaagagggaagagugucuggacgcacuggagacuauuaugaccacaaaguccgugaguuuuagacgucuuagucauuugaggaagcuggucccuggguuuggaaaggcguauaccauauucaacaaaaccuugauggaggcugaugcucacuacaaaucaauccggacuuggaaugaaaucauccccuccaaaggguguuuaagaguuggggggagaugucauccucaugugaaugggguguucuucaacggcauuauacuggguccugacggacauguucuaaucccagagaugcagucgucccuccuccaccagcauauggaauuguuggaguccucagucaucccuuugaugcaucccuuagcagacccgucaacagucuuuaaagacggcgacgaggcagaggacuuuguugagguucaccuuccggaugugcacaagcagaucucggggguugaucuuggucucccaaacugggggaaguaugugcugauaagugcaggugcuuugacugcauuaauguugacgauuuucuuaaugacguguugcagaaagacuaauagagcagggucaauccaacacaguccuggagagacagggaggaaagugucggugacuucucacaacggaagggucauaucuucaugggaaucauauaaaagcggaagugagaccaagcuguga

SEQ ID NO: 63246 - RNA, 1575 nt, Artificial Sequence
  derived and/or modified CDS sequence (wt) from glycoprotein__RABV__JN936776.1
augauuccucaaguucuuuuguuuguuccccuucuaguuuucucgucguguuuugggaaauuccccauuuacacgauaccagacaaacuugguccauggagucccaucgauauacaucaucucagcuguccgaacaaucugguuguggaagaugaaggaugcaccaaucugucuggauuuuccuacauggaacucaaagugggauauauuucagccauaaaagugaacggauucaccuguacagguguggugacagaagcagaaaccuacacgaacuuuguugguuaugucaccaccacguuuaagagaaagcacuuucgcccuacgccggaugcgugcagagccgcauacaacuggaagauggcuggugaccccagguaugaagagucucugcacaauccguacccugauuaccacuggcuccgaacugucaagaccuccaaggagucccuugucaucauaucuccgagcguugcagauuuggacccguacgauaaaucccuucacucgagaguuuuuccuggcggaaaaugcucaggaauaaccguguccuccacuugcugcucuacuaaccacgacuacaccaucuggaugccugaaaauccuagacugggaacuucgugugacauuuucaccaauaguagagggaagagggcaucaaaagggggcaagacuuguggauuuguggaugaaagaggcuuguacaagucucuaaagggagcaugcaagcugaagcuaugugggguucuaggacuuagacuuauggacggaacaugggucgcaauucagacaucagaugagaucaaauggugcucuccugaucagcuaguaaaucuacacgacuuucacucagaugagauugaacaucuuguuguggaggaguuggucaaaaagagggaagagugucuggacgcacuggagacuauuaugaccacaaaguccgugaguuucaggcgucuuagucauuugaggaagcuagucccuggguuuggaaaggcguauaccauauucaacaaaaccuugauggaggcugaugcucacuauaaaucaauccggacuuggaaugaaaucauccccucuaaaggguguuuaagaguuggggggagaugucauccucaugugaacgggguguucuucaacggcauuauacuggguccugacggacauguucuaaucccagagaugcaaucgucccuccuccaccagcauauggaauuguuggaguccucagucaucccuuugaugcaucccuuagcagacccgucaacaguuuuuaaagacggcgacgaggcagaggacuuuguugagguucaccuuccggaugugcacaagcaaaucucggggguugaucuuggucucccaaacugggggaaguacgugcugguaagugcaggugcucugacugcauuaauguugaugauuuucuuaaugacguguugcagaaagacuaauagagcagagucaauacaacacaguccuggagagacagggaggaaagugucgguaacuucucacaacggaagggucauaucuucaugggaaucauauaaaaguggaggugagaccaagcuguga

SEQ ID NO: 63247 - RNA, 1575 nt, Artificial Sequence
  derived and/or modified CDS sequence (wt) from glycoprotein__RABV__JN936777.1
augauuccucaaguucuuuuguuuguuccccuucuaguuuucucgucguguuuugggaaauuccccauuuacacgauaccagacaaacuugguccauggagucccaucgauauacaucaucucagcuguccgaacaaucugguuguggaagaugaaggaugcaccaauuugucuggauuuuccuacauggaacucaaagugggauauauuucagccauaaaagugaacggauucaccuguacagguguggugaccgaagcagaaaccuacacuaacuuuguugguuaugucaccaccacguuuaagagaaagcacuuucgcccuaugccggaugcgugcagagccgcauacaacuggaagauggcuggugaccccagguaugaagagucucugcacaauccguaccccgacuaccacuggcuccgaacugucaaaaccaccaaggagucccuugucaucauaucuccgagcguugcagacuuggacccguacgauaaaucccuucacucgagaguuuuuccuggcggaaaaugcucaggaauaaccguguccuccacuugcugcucuacuaaccacgacuacaccaucuggaugccugaaaauccuagacugggaacuucaugugacauuuucaccaauaguagagggaagagggcaucaaaagggggcaagacuuguggauuuguggaugaaagaggcuuguacaagucucuaaagggagcaugcaagcugaagcuaugugggguucuaggacuuagacuuauggacggaacaugggucgcgauucagacaucagaugagaucaaauggugcucuccugaucagcuaguaaaucuacacgacuuucacucggaugagauugaacaucuuguuguggaggaguuggucaaaaagagggaagagugucuggacgcacuggagacuauuaugaccacaaaguccgugaguuucagacgucuuagucauuugaggaagcuagucccuggguuuggaaaggcguauaccauauucaacaaaaccuugauggaggcugaugcucacuacaaaucaauccggacuuggaaugaaaucauccccuccaaaggguguuuaagaguuggggggagaugucauccucaugugaacgggguguucuucaacggcauuauacuggguccugacggacauguucuaaucccagagaugcagucgucccuccuccaccagcauauggaauuguuggaguccucagucaucccuuugaugcaucccuuagcagacccgucaacagucuuuaaagacggcgacgaggcagaggacuuuguugagguucaccuuccggaugugcacaagcagaucucggggguugaucuuggucucccaaacugggggaaguaugugcugauaagugcaggugcuuugacugcauuaauguugacgauuuucuuaaugacguguugcagaaagacuaauagagcagggucaauacaacacaguccuggagagacagggaggaaagugucggugacuucucacaacggaagggucauaucuucaugggaaucauauaaaagcggaagugagaccaagcuguga

SEQ ID NO: 63248 - RNA, 1575 nt, Artificial Sequence
  derived and/or modified CDS sequence (wt) from glycoprotein__RABV__JN936778.1
augauuccucaaguucuuuuguuuguuccccuucuaguuuucucgucguguuuugggaaauuccccauuuacacgauaccagacaaacuugguccauggagucccaucgauauacaucaucucagcuguccgaacaaucugguuguggaagaugaaggaugcaccaauuugucuggauuuuccuacauggaacucaaagugggauauauuucagccauaaaagugaacggauucaccuguacagguguggugaccgaagcagaaaccuacacuaacuuuguugguuaugucaccaccacguuuaagagaaagcacuuucgcccuaugccggaugcgugcagagccgcauacaacuggaagauggcuggugaccccagguaugaagagucucugcacaauccguaccccgacuaccacuggcuccgaacugucaagaccaccaaggagucccuugucaucauaucuccgagcguugcagauuuggacccguacgauaaaucccuucacucgagaguuuuuccuggcggaaaaugcucaggaauaaccguguccuccacuugcugcucuacuaaccacgacuacaccaucuggaugccugaaaauccuagacugggaacuucaugugacauuuucaccaauaguagagggaagagggcaucaaaagggggcaagacuuguggauuuguggaugaaagaggcuuguacaagucucuaaagggagcaugcaagcugaagcuaugugggguucuaggacuuagacuuauggacggaacaugggucgcgauucagacaucagaugagaucaaauggugcucuccugaucagcuaguaaaucuacacgacuuucacucggaugagauugaacaucuuguuguggaggaguuggucaaaaagagggaagagugucuggacgcacuggagacuauuaugaccacaaaguccgugaguuucagacgucuuagucauuugaggaagcuagucccuggguuuggaaaggcguauaccauauucaacaaaaccuugauggaggcugaugcucacuacaaaucaauccggacuuggaaugaaaucauccccuccaaaggguguuuaagaguuggggggagaugucauccucaugugaacgggguguucuucaacggcauuauacuggguccugacggacauguucuaaucccagagaugcagucgucccuccuccaccagcauauggaauuguuggaguccucagucaucccuuugaugcaucccuuagcagacccgucaacagucuuuaaagacggcgacgaggcagaggacuuuguugagguucaccuuccggaugugcacaagcagaucucggggguugaucuuggucucccaaacugggggaaguaugugcugauaagugcaggugcuuugacugcauuaauguugacgauuuucuuaaugacguguugcagaaagacuaauagagcagggucaauacaacacaguccuggagagacagggaggaaagugucggugacuucucacaacggaagggucauaucuucaugggaaucauauaaaagcggaagugagaccaagcuguga

SEQ ID NO: 63249 - RNA, 1575 nt, Artificial Sequence
  derived and/or modified CDS sequence (wt) from glycoprotein__RABV__JN936779.1
augauuccucaaguucuuuuguuuguuccccuucuaguuuucucgucauguuucgggaaauuccccauuuacacgauaccagacaaacucgguccauggagucccaucgauauacaucaccucagcuguccgaacaaucugguuguggaagaugaaggaugcaccaaucugucuggauuuuccuacauggaacucaaagugggauauauuucagccauaaaagugaacggauucaccuguacagguguggugaccgaagcagaaaccuacacuaacuuuguugguuaugucaccaccacguuuaagagaaagcacuuucgcccuaugccggaugcgugcagagccgcauacaacuggaagauggcuggugaccccagguaugaagagucucugcacaauccguaccccgacuaccacuggcuccgaacugucaagaccaccaaggagucccuugucaucauaucuccgagcguugcagauuuggacccguacgauaaaucucuucacucgagaguuuuuccuggcggaaaaugcucaggaauaaccguguccuccacuugcugcucuacuaaccacgacuacaccaucuggaugccugaaaauccuagacugggaacuucaugugacauuuucaccaauaguagagggaagagggccucaaaagggggcaagacuuguggauuuguggaugaaagaggcuuguacaagucucuaaggggagcaugcaagcugaagcuaugugggguucuaggacuuagacuuauggacggaacaugggucgcaauucagacaucagaugagaucaaauggugcucuccugaucagcuaguaaaucuacacgacuuucacucggaugagaucgaacaucuuguuguggaggaguuggucaaaaagagggaagagugucuggacgcacuggagacuauuaugaccacaaaguccgugaguuucagacgucuuagucauuugaggaagcuagucccuggguuuggaaaggcguauaccauauucaacaagaccuugauggaggcugaugcucacuacaaaucaauccggacuuggaaugaaaucauccccuccaaaggguguuuaagaguuggggggagaugucauccucaugugaacgggguguucuucaacggcauuauacuggguccugacggacauguucucaucccagagaugcagucgucccuccuccaccagcauauggaauuguuggaguccucagucaucccuuugaugcaucccuuagcagacccgucaacagucuuuaaagacggcgacgaggcagaggacuuuguugagguucaccuuccggaugugcacaagcagaucucggggguugaucuuggucuccccaacugggggaaguaugugcugauaagugcaggugcucugacugcauuaauguugacgauuuucuuaaugacguguugcagaaagacuaauagagcagagucaauacaacacaguccuggagagacagggaggaaagugucggugacuucucacaacggaagggucauaucuucaugggaaucauauaaaagcggaagugagaccaagcuguga

SEQ ID NO: 63250 - RNA, 1575 nt, Artificial Sequence
  derived and/or modified CDS sequence (wt) from glycoprotein__RABV__JN936780.1
augauuccucaaguucucuuguuuguuccccuucuaguuuucucgucguguuuugggaaauuccccauuuacacgauaccagacaaacuugguccauggagucccaucgauauacaucaucucagcuguccgaacaaucugguuguggaagaugaaggaugcaccaaucugucuggauuuuccuacauggaacucaaagugggauauauuucagccauaaaagugaacggauucaccuguacagguguggugaccgaagcagaaaccuacacuaacuuuguugguuaugucaccaccacguuuaagagaaagcacuuucgcccuaugccggaugcgugcagagccgcauacaacuggaagauggcuggugaucccagguaugaagagucuuugcacaauccguaccccgacuaccacuggcuccgaacugucaagaccaccaaggagucccuugucaucauaucuccgagcguugcagauuuggacccguacgauaaaucccuucacucgagaguuuuuccugguggaaaaugcucaggaauaaccguguccuccacuugcugcucuacuaaccacgacuacaccaucuggaugccugaaaauccuagacugggaacuucgugugacauuuucaccaauaguagagggaagagggcaucaaaagggggcaagacuuguggauuuguggaugaaagaggcuuguacaagucucuaaagggagcaugcaagcugaagcuaugugggguucuaggacuuagacuuauggacggaacaugggucgcaauucagacaucagaugagaucaaauggugcucuccugaucagcuaguaaaucuacacgacuuucacucggaugagauugaacaucuuguuguggaggaguuagucaaaaagagggaagagugucuggacgcacuggagacuauuaugaccacaaaguccgugaguuucagacgucuuagucauuugagaaagcuagucccuggguuuggaaaggcguauaccauauucaacaaaaccuugauggaggcugaugcucacuacaaaucaauccggacuuggaaugaaaucauccccuccaaaggguguuuaagaguuggggggagaugucauccucaugugaacgggguguucuucaacggcauuauacuggguccugacggacauguucuaaucccagagaugcagucgucccuccuccaccagcauauggaauuguuggaguccucagucaucccuuugaugcaucccuuagcagacccguuaacagucuuuaaagauggcgacgaggcagaggacuuuguugagguucaccuuccggaugugcacaagcagaucucggggguugaucuuggucucccaaacugggggaaguaugugcugauaagugcaggugcucugacugcauuaauguugacgauuuucuuaaugacguguugcagaaagacuaauagagcagagucaauacaacacaguccuggagagacagggaggaaagugucggugacuucucacaacggaagggucauaucuucaugggaaucauauaaaagcggaagugagacuaagcuguga

SEQ ID NO: 63251 - RNA, 1575 nt, Artificial Sequence
  derived and/or modified CDS sequence (wt) from glycoprotein__RABV__JN936781.1
augauuccucaaguucucuuguuuguuccccuucuaguuuucucgucguguuuugggaaauuccccauuuacacgauaccagacaaacuugguccauggagucccaucgauauacaucaucucagcuguccgaacaaucugguuguggaagaugaaggaugcaccaaucugucuggauuuuccuacauggaacucaaagugggauauauuucagccauaaaagugaacggauucaccugcacagguguggugaccgaagcagaaaccuacacuaacuuuguugguuaugucaccaccacguuuaagagaaagcacuuucgcccuaugccggaugcgugcagagccgcauacaacuggaagauggcuggugaucccagguaugaagagucuuugcacaauccguaccccgacuaccacuggcuccgaacugucaagaccaccaaggagucccuugucaucauaucuccgagcguugcagauuuggacccguacgauaaaucccuucacucgagaguuuuuccugguggaaaaugcucaggaauaaccguguccuccacuugcugcucuacuaaccacgacuacaccaucuggaugccugaaaauccuagacugggaacuucgugugacauuuucaccaauaguagagggaagagggcaucaaaagggggcaagacuuguggauuuguggaugaaagaggcuuguacaagucucuaaagggagcaugcaagcugaagcuaugugggguucuaggacuuagacuuauggacggaacaugggucgcaauucagacaucagaugagaucaaauggugcucuccugaucagcuaguaaaucuacacgacuuucacucggaugagauugaacaucuuguuguggaggaguuagucaaaaagagggaagagugucuggacgcacuggagacuauuaugaccacaaaguccgugaguuucagacgucuuagucauuugaggaagcuagucccuggguuuggaaaggcguauaccauauucaacaaaaccuugauggaggcugaugcucacuacaaaucaauccggacuuggaaugaaaucauccccuccaaaggguguuuaagaguuggggggagaugucauccucaugugaacgggguguucuucaacggcauuauacuggguccugacggacauguucuaaucccagagaugcagucgucccuccuccaccagcauauggaauuguuggaguccucagucaucccuuugaugcaucccuuagcagacccgucaacagucuuuaaagauggcgacgaggcagaggacuuuguugagguucaccuuccggaugugcacaagcagaucucggggguugaucuuggucucccaaacugggggaaguaugugcugauaagugcaggugcucugacugcauuaauguugacgauuuucuuaaugacuuguugcagaaagacuaauagagcagagucaauacaacacaguccuggagagacagggaggaaagugucggugacuucucacaacggaagggucauaucuucaugggaaucauauaaaagcggaagugagacuaagcuguga

SEQ ID NO: 63252 - RNA, 1575 nt, Artificial Sequence
  derived and/or modified CDS sequence (wt) from glycoprotein__RABV__JN936782.1
augauuccucaaguucucuuguuuguuccccuucuaguuuucucgucguguuuugggaaauuccccauuuacacgauaccagacaaacuugguccauggagucccaucgauauacaucaucucagcuguccgaacaaucugguuguggaagaugaaggaugcaccaaucugucuggauuuuccuacauggaacucaaagugggauauauuucagccauaaaagugaacggauucaccuguacagguguggugaccgaagcagaaaccuacacuaacuuuguugguuaugucaccaccacguuuaagagaaagcacuuucgcccuaugccggaugcgugcagagccgcauacaacuggaagauggcuggugaucccagguaugaagagucuuugcacaauccguaccccgacuaccacuggcuccgaacugucaagaccaccaaggagucccuugucaucauaucuccgagcguugcagauuuggacccguacgauaaaucccuucacucgagaguuuuuccugguggaaaaugcucaggaauaaccguguccuccacuugcugcucuacuaaccacgacuacaccaucuggaugccugaaaauccuagacugggaacuucgugugacauuuucaccaauaguagagggaagagggcaucaaaagggggcaagacuuguggauuuguggaugaaagaggcuuguacaagucucuaaagggagcaugcaagcugaagcuaugugggguucuaggacuuagacuuauggacggaacaugggucgcaauucagacaucagaugagaucaaauggugcucuccugaucagcuaguaaaucuacacgacuuucacucggaugagauugaacaucuuguuguggaggaguuagucaaaaagagggaagagugucuggacgcacuggagacuauuaugaccacaaaguccgugaguuucagacgucuuagucauuugaggaagcuagucccuggguuuggaaaggcguauaccauauucaacaaaaccuugauggaggcugaugcucacuacaaaucaauccggacuuggaaugaaaucauccccuccaaaggguguuuaagaguuggggggagaugucauccucaugugaacgggguguucuucaacggcauuauacuggguccugacggacauguucuaaucccagagaugcagucgucccuccuccaccagcauauggaauuguuggaguccucagucaucccuuugaugcaucccuuagcagacccgucaacagucuuuaaagauggcgacgaggcagaggacuuuguugagguucaccuuccggaugugcacaagcagaucucggggguugaucuuggucucccaaacugggggaaguaugugcugauaagugcaggugcucugacugcauuaauguugacgauuuucuuaaugacguguugcagaaagacuaauagagcagagucaauacaacacaguccuggagagacagggaggaaagugucggugacuucucacaacggaagggucauaucuucaugggaaucauauaaaagcggaagugagacuaagcuguga

SEQ ID NO: 63253 - RNA, 1575 nt, Artificial Sequence
  derived and/or modified CDS sequence (wt) from glycoprotein__RABV__JN936783.1
augauuccucaaguucucuuguuuguuccccuucuaguuuucucgucguguuuugggaaauuccccauuuacacgauaccagacaaacuugguccauggagucccaucgauauacaucaucucagcuguccgaacaaucugguuguggaagaugaaggaugcaccaaucugucuggauuuuccuacauggaacucaaagugggauauauuucagccauaaaagugaacggauucaccuguacagguguggugaccgaagcagaaaccuacacuaacuuuguugguuaugucaccaccacguuuaagagaaagcacuuucgcccuaugccggaugcgugcagagccgcauacaacuggaagauggcuggugaucccagguaugaagagucuuugcacaauccguaccccgacuaccacuggcuccgaacugucaagaccaccaaggagucccuugucaucauaucuccgagcguugcagauuuggacccguacgauaaaucccuucacucgagaguuuuuccugguggaaaaugcucaggaauaaccguguccuccacuugcugcucuacuaaccacgacuacaccaucuggaugccugaaaauccuagacugggaacuucgugugacauuuucaccaauaguagagggaagagggcaucaaaagggggcaagacuuguggauuuguggaugaaagaggcuuguacaagucucuaaagggagcaugcaagcugaagcuaugugggguucuaggacuuagacuuauggacggaacaugggucgcaauucagacaucagaugagaucaaauggugcucuccugaucagcuaguaaaucuacacgacuuucacucggaugagauugaacaucuuguuguggaggaguuagucaaaaagagggaagagugucuggacgcacuggagacuauuaugaccacaaaguccgugaguuucagacgucuuagucauuugaggaagcuagucccuggguuuggaaaggcguauaccauauucaacaaaaccuugauggaggcugaugcucacuacaaaucaauccggacuuggaaugaaaucauccccuccaaaggguguuuaagaguuggggggagaugucauccucaugugaacgggguguucuucaacggcauuauacuggguccugacggacauguucuaaucccagagaugcagucgucccuccuccaccagcauauagaauuguuggaguccucagucaucccuuugaugcaucccuuagcagacccgucaacagucuuuaaagauggcgacgaggcagaggacuuuguugagguucaccuuccggaugugcacaagcagaucucggggguugaucuuggucucccaaacugggggaaguaugugcugauaagugcaggugcucugacugcauuaauguugacgauuuucuuaaugacguguugcagaaagacuaauagagcagagucaauacaacacaguccuggagagacagggaggaaagugucggugacuucucacaacggaagggucauaucuucaugggaaucauauaaaagcggaagugagacuaagcuguga

SEQ ID NO: 63254 - RNA, 1575 nt, Artificial Sequence
  derived and/or modified CDS sequence (wt) from glycoprotein__RABV__JN936784.1
augauuccucaaguucucuuguuuguuccccuucuaguuuucucgucguguuuugggaaauuccccauuuacacgauaccagacaaacuugguccauggagucccaucgauauacaucaucucagcuguccgaacaaucugguuguggaagaugaaggaugcaccaaucugucuggauuuuccuacauggaacucaaagugggauauauuucagccauaaaagugaacggauucaccuguacagguguggugaccgaagcagaaaccuacacuaacuuuguugguuaugucaccaccacguuuaagagaaagcacuuucgcccuaugccggaugcgugcagagccgcauacaacuggaagauggcuggugaucccagguaugaagagucuuugcacaauccguaccccgacuaccacuggcuccgaacugucaagaccaccaaggagucccuugucaucauaucuccgagcguugcagauuuggacccguacgauaaaucccuucacucgagaguuuuuccugguggaaaaugcucaggaauaaccguguccuccacuugcugcucuacuaaccacgacuacaccaucuggaugccugaaaauccuagacugggaacuucgugugacauuuucaccaauaguagagggaagagggcaucaaaagggggcaagacuuguggauuuguggaugaaagaggcuuguacaagucucuaaagggagcaugcaagcugaagcuaugugggguucuaggacuuagacuuauggacggaacaugcgucgcaauucagacaucagaugagaucaaauggugcucuccugaucagcuaguaaaucuacacgacuuucacucggaugagauugaacaucuuguuguggaggaguuagucaaaaagagggaagagugucuggacgcacuggagacuauuaugaccacaaaguccgugaguuucagacgucuuagucauuugaggaagcuagucccuggguuuggaaaggcguauaccauauucaacaaaaccuugauggaggcugaugcucacuacaaaucaauccggacuuggaaugaaaucauccccuccaaaggguguuuaagaguuggggggagaugucauccucaugugaacgggguguucuucaacggcauuauacuggguccugacggacauguucuaaucccagagaugcagucgucccuccuccaccagcauauagaauuguuggaguccucagucaucccuuugaugcaucccuuagcagacccgucaacagucuuuaaagauggcgacgaggcagaggacuuuguugagguucaccuuccggaugugcacaagcagaucucggggguugaucuuggucucccaaacugggggaaguaugugcugauaagugcaggugcucugacugcauuaauguugacgauuuucuuaaugacguguugcagaaagacuaauagagcagagucaauacaacacaguccuggagagacagggaggaaagugucggugacuucucacaacggaagggucauaucuucaugggaaucauauaaaagcggaagugagacuaagcuguga

SEQ ID NO: 63255 - RNA, 1575 nt, Artificial Sequence
  derived and/or modified CDS sequence (wt) from glycoprotein__RABV__JN936786.1
augauuccucaaguucuuuuguuuguuccccuucuaguuuucucgucguguuucgggaaauuccccauuuacacaauaccagacaaacuugguccauggagucccaucgauauacaucaccucagcuguccgaacaaucuggucguggaagaugaaggaugcaccaaucugucuggauuuuccuacauggaacucaaaguaggauauauuucagccauaaaagugaacggauucaccuguacagguguagugaccgaagcagaaaccuacacuaacuuuguugguuaugucaccaccacguuuaagagaaagcacuuucgcccuaugccggaugcgugcagagccgcauacaacuggaagauggcuggugaccccagguaugaagagucucugcacaauccguaccccgacuaccacuggcuccgaacugucaagaccaccaaggagucccuugucaucauaucuccgagcguugcagauuuggacccguacgauaaaucccuucacucgagaguuuuuccuggcggaaaaugcucaggaauaaccguguccuccacuugcugcucuacuaaccacgacuacaccaucuggaugccugaaaauccuagacugggaacuucaugugacauuuucaccaauaguagagggaagagggccucaaaagggggcaagacuuguggauuuguggaugaaagaggcuuguacaagucucuaaggggagcaugcaagcugaagcuaugugggguucuaggacuuagacuuauggacggaacaugggucgcaauucagacaucagaugagaucaaauggugcucuccugaucagcuaguaaaucuacacgacuuucacucggaugagaucgaacaucuuguuguggaggaguuggucaaaaagagggaagagugucuggacgcacuggagacuauuaugaccacaaaguccgugaguuucagacgucuuagucauuugaggaagcuagucccuggguuuggaaaggcguauaccauauucaacaagaccuugauggaggcugaugcucacuacaaaucaauccggacuuggaaugaaaucauccccuccaaaggguguuuaagaguuggggggagaugucauccucaugugaacgggguguucuucaacggcauuauacuggguccugacggacauguucucaucccagagaugcagucgucccuccuccaccagcauauggaauuguuggaguccucagucaucccuuugaugcaucccuuagcagacccgucaacagucuuuaaagacggcgacgaggcagaggacuuuguugagguucaccuuccggaugugcacaagcagaucucggggguugaucuuggucucccaaacugggggaaguaugugcugauaagugcaggugcucugacugcauuaauguugaugauuuucuuaaugacguguugcagaaagacuaauagagcagagucaauacaacacaguccuggagagacagggaggaaagugucggugacuucucacaacggaagggucauaucuucaugggaaucauauaaaagcggaagugagaccaagcuguga

SEQ ID NO: 63256 - RNA, 1575 nt, Artificial Sequence
  derived and/or modified CDS sequence (wt) from glycoprotein__RABV__JN936788.1
augauuccucaagcucuucuguuuguaccccuucugguugucucauuguguuuugggaaauuccccauuuacacgauaccagacaaacucggucccuggagucccauugauauacaucaucucagcuguccgaauaauuugguuguggaggaugaaggauguaccaaucugucaggauucucauacauggaacuuaaagugggauauauuucagccauaaaggugaauggguucacuuguacggguguggugacagaagcagaaaccuacacuaacuuuguuggcuaugucaccaccacguuuaagagaaagcacuuccgaccaacgccggaugcaugcagaucugcauacaauuggaagauggcuggugaccccagauaugaagagucucugcacaaucccuauccggauuaucauuggcuccgaacuguaaaaaccaccaaggaguccuuuguuaucauaucuccgaguguggcagaucuagacccguacgauaaaucccuucauucgagaguuuuuccuagagggaaaugcucaggaauaacgguguccucuaccuacugcucuaccaaccaugacuacaccaucuggaugccugagaaucccagauuggggaccucuugugauauuuucaccaauagccgagggaagagagcauucaaagggagcaagaccuguggauuuguagaugagagaggcuuguacaaaucucuaaaaggagcaugcaaacugaagcugugcggaguucuuggacucagacuuauggauggaacaugggucgcgauucagacaucagacgagaccaaguggugcccuccugaccagcuaguaaaucuacaugacuuucauucggaugagauugaacaucuuguuguggaggaguuggucaagaaaagagaagagugucuagaugcacuggaguccaucaugaccaccaaguccgugaguuuccgacgucucagucacuugaggaaacuugugccuggguuuggaaaagcauacaccauauucaauaagaccuugauggaggcugaugcucacuacaagucgguccgaacuuggaacgagaucauccccucuaaaggguguuuaagaguugggggcagaugucacccccaugugaacggaguguuuuucaacgguaucauccugggcccugacggacauguccugaucccggaaaugcagucaucccuccuccagcagcauauggagcuguuggaauccucaguuauccccuugaugcauccuuuggcagauccaucaacgguuuuuaaaaauggugacgaggcggaggauuuuguugagguacaccuuccagaugugcauaagcaggucucagggguugaucucggucucccaagcugggggaaguauguguugaugagugcaggcguucugacugcacugauguugaugauuuucuuaaugacguguugccgaaggaccaauagaccagaaucaauacaacacagucuuggagagacggggaggaaagugucgguaaccucccaaaacggaagggucauaucuucaugggagucauauaaaaguggaggugagaccaagcuguaa

SEQ ID NO: 63257 - RNA, 1575 nt, Artificial Sequence
  derived and/or modified CDS sequence (wt) from glycoprotein__RABV__JN936790.1
augauuccucaaguucuauuguuuguucccuuucuaguuuucucgucguguuuugggaaauuccccauuuacacgauaccagacaaacuugguccauggagucccaucgauauacaucaucucagcuguccgaacaaucugguuguggaagaugaaggaugcaccaaucugucuggauuuuccuacauggaacucaaagugggauauauuucagccauaaaagugaacggauucaccuguacagguguggugaccgaagcagaaaccuacacuaacuuuguugguuaugucaccaccacguuuaagagaaagcacuuucgcccuaugccggaugcgugcagagccgcauacaacuggaagauggcuggugaccccagguaugaagagucucugcacaauccguaccccgacuaccacuggcuccgaacugucaagaccaccaaggagucccuugucaucauaucuccgagcguugcagauuuggacccguacgauaaaucccuucacucgagaguuuuuccuggcggaaaaugcucaggaauaaccguguccuccacuugcugcucuacuaaccacgacuacaccaucuggaugccugaaaauccuagacugggaacuucaugugacauuuucaccaauaguagagggaagagggcaucaaaagggggcaagacuuguggauuuguggaugaaagaggcuuguacaagucucuaaagggagcaugcaagcugaagcuaugugggguucuaggacuuagacuuauggacggaacaugggucgcgauucagacaucagaugagaucaaauggugcucuccugaucagcuaguaaaucuacaugacuuucacucggaugagauugaacaucuuguuguggaggaguuggucaaaaagagggaagagugucuggacgcacuggagacuauuaugaccacaaaguccgugaguuucagacgucuuagucauuugaggaagcuagucccuggguuuggaaaggcguauaccauauucaacaaaaccuugauggaggcugaugcucacuacaaaucaauccggacuuggaaugaaaucauccccuccaaaggguguuuaagaguuggggggagaugucauccucaugugaacgggguguucuucaauggcauuauacuggguccugacggacauguucuaaucccagagaugcagucgucccuccuccaccagcauauggaauuguuggaguccucagucaucccuuugaugcaucccuuagcagacccgucaacagucuuuaaagacggcgacgaggcagaggacuuuguugagguucaccuuccggaugugcacaagcagaucucggggguugaucuuggucucccaaacugggggaaguaugugcugauaagugcaggugcucugacugcauuaauguugacgauuuucuuaaugacguguugcagaaagacuaauagagcagagucaauacaacacaguccuggagagacagggaggaaagugucggugacuucucacaacggaagggucauaucuucaugggaaucauauaaaagcggaagugagaccaagcuguga

SEQ ID NO: 63258 - RNA, 1575 nt, Artificial Sequence
  derived and/or modified CDS sequence (wt) from glycoprotein__RABV__JN936791.1
augauuccucaaguucuuuuguuuguuccccuucuaguuuucucgucguguuucgggaaauuccccauuuacacgauaccagacaaacuugguccauggagucccaucgauauacaucaccucagcuguccgaacaaucugguuguggaagaugaaggaugcaccaaucugucuggauuuuccuacauggaacucaaagugggauauauuucagccauaaaagugaacggauucaccuguacagguguggugaccgaagcagaaaccuacacuaacuuuguugguuaugucaccaccacguuuaagagaaagcacuuucgcccuaugccggaugcgugcagagccgcauacaacuggaagauggcuggugaccccagguaugaagagucucugcacaauccguaccccgacuaccacuggcuccgaacugucaagaccaccaaggagucccuugucaucauaucuccgagcguugcagauuuggacccguacgauaaaucccuucacucgagaguuuuuccuggcggaaaaugcucaggaauaaccguguccuccacuugcugcucuacuaaccacgacuacaccaucuggaugccugaaaauccuagacugggaacuucaugugacauuuucaccaauaguagagggaagagggccucaaaagggggcaagacuuguggauuuguggaugaaagaggcuuguacaagucucugaggggagcaugcaagcugaagcuaugugggguucuaggacuuagacuuauggacggaacaugggucgcaauucagacaucagaugagaucaaauggugcucuccugaucagcuaguaaaucuacacgacuuucacucggaugagaucgaacaucuuguuguggaggaguuggucaaaaagagggaagagugucuggacgcacuggagacuaucaugaccacaaaguccgugaguuucagacgucuuagucauuugaggaagcuagucccuggguuuggaaaggcguauaccauauucaacaagaccuugauggaggcugaugcucacuauaaaucaauccggacuuggaaugaaaucauccccuccaaaggguguuuaagaguuggggggagaugucauccucaugugaacgggguguucuucaacggcauuauacuggguccugacggacauguucucaucccagagaugcagucgucccuccuccaccagcauauggaauuguuggaguccucagucaucccuuugaugcaucccuuagcagacccgucaacagucuuuaaagacggcgacgaggcagaggacuuuguugagguucaccuuccggaugugcacaagcagaucucggggguugaucuuggucucccaaacugggggaaguaugugcugauaagugcaggugcucugacugcauuaauguugaugauuuucuuaaugacguguugcagaaagacuaauagagcagagucaauacaacacaguccuggagagacagggaggaaaguaucggugacuucucacaacggaagggucauaucuucaugggaaucauauaaaagcggaagugagaccaagcuguga

SEQ ID NO: 63259 - RNA, 1575 nt, Artificial Sequence
  derived and/or modified CDS sequence (wt) from glycoprotein__RABV__JN936793.1
augauuccucaaguucuauuguuuguuccccuucuaguuuucucgucguguuuugggaaauuccccauuuacacgauaccagacaaacuugguccauggagucccaucgauauacaucaucucagcuguccgaacaaucugguuguggaagaugaaggaugcaccaaucugucuggauuuuccuacauggaacucaaagugggauauauuucagccauaaaagugaacggauucaccuguacagguguggugaccgaagcagaaaccuacacuaacuuuguugguuaugucaccaccacguuuaagagaaagcacuuucgcccuaugccggaugcgugcagagccgcauacaacuggaagauggcuggugaccccagguaugaagagucucugcacaauccguaccccgacuaccacuggcuccgaacugucaagaccaccaaggagucccuugucaucauaucuccgagcguugcagauuuggacccguacgauaaaucccuucacucgagaguuuuuccuggcggaaaaugcucaggaauaaccguguccuccacuugcugcucuacuaaccacgacuacaccaucuggaugccugaaaauccuagacugggaacuucaugugacauuuucaccaauaguagagggaagagggcaucaaaagggggcaagacuuguggauuuguggaugaaagaggcuuguacaagucucuaaagggagcaugcaagcugaagcuaugugggguucuaggacuuagacuuauggacggaacaugggucgcgauucagacaucagaugagaucaaauggugcucuccugaucagcuaguaaaucuacaugacuuucacucggaugagauugaacaucuuguuguggaggaguuggucaaaaagagggaagagugucuggacgcacuggagacuauuaugaccacaaaguccgugaguuucagacgucuuagucauuugaggaagcuagucccuggguuuggaaaggcguauaccauauucaacaaaaccuugauggaggcugaugcucacuacaaaucaauccggacuuggaaugaaaucauccccuccaaaggguguuuaagaguuggggggagaugucauccucaugugaacgggguguucuucaauggcauuauacuggguccugacggacauguucuaaucccagagaugcagucgucccuccuccaccagcauauggaauuguuggaguccucagucaucccuuugaugcaucccuuagcagacccgucaacagucuuuaaagacggcgacgaggcagaggacuuuguugagguucaccuuccggaugugcacaagcagaucucggggguugaucuuggucucccaaacugggggaaguaugugcugauaagugcaggugcucugacugcauuaauguugacgauuuucuuaaugacguguugcagaaagacuaauagagcagagucaauacaacacaguccuggagagacagggaggaaagugucggugacuucucacaacggaagggucauaucuucaugggaaucauauaaaagcggaagugagaccaagcuguga

SEQ ID NO: 63260 - RNA, 1575 nt, Artificial Sequence
  derived and/or modified CDS sequence (wt) from glycoprotein__RABV__JQ595307.1
augaucccucaggcucuucuguuugugccucuccugauucccucgcugugucucggggaauuccccaucuauacgauaccagacaaacucggcccuuggaccccuaucgacauacaucaucucagcugucccaacaaucugguugcagagaacgacgggugcaccagucugucaggguuuuccuauauggaacuaaaggugggauacaucucugccauaaaggugaacggguucacuuguaccgguguugugacagaagccgagaccuacacaaacuuuguagguuaugucacuacuacauucaagagaaagcacuuccgcccgaugccagaugccugcagagcugcacaugacuggaagauggccggugauccuagauaugaagauucccuucaaaauccuuauccugauuaccauugguuacggaccguaaagaccaccaaggagucgcucguuauuauauccccgaguguugcugauuuggaccccuacgacaagucccuucauucaagaguuuuccccagugggaaguguuuggggauaacagucucuuccaccuacugcuccaccaaccaugauuacaccaucuggaugcccguagaaccaagacuuggaacaucuugugauauuuuuaccaauagcagagggaagagagcaucuaagggaggcaggguuugcggauuuguggaugaaaggggcuuauacaaaucucucaaaggagcaugcaaacucaagcugugcggaguccccgggauuaggcugauggauggaaccugggucucaauccagacaucagaagauauuaaguggugcccuccugaucgauuagugaaucuacacgacuuucauucggaugaacuagaacaucuuguuguagaggaauugaucaagaggagggaaaauugucuagaugcacuggaguccaucaugaccaccaaaucagugagcuucagacgucucagccacuugaggaagcuuguuccuggguuugggaaggcauacaccauauucaacaagaccuuaauggaagcugaugcucauuacaagucagucaagacuuggaacgaggucaucccuucgaaagguugccuggaaguuggagggaaaugucaccccccugugaacggaguauucuucaaugguauaauuuuggguccagauggaaauguucugaucccugagaugcaaucuucccugcuucaacaacauauggagcuguuagagucuucuguuaucccucugaugcaucccuuggcagacccaucaacagucuucaaggaaggugaugaggcggaagacuuugucgagguucaucuuccagauguccacaaacagguuucugauguugaccuuggucuuccgaguugggggaaguaucuguugaugagugcaggugcucuggcaauacugauucuggcgaucgucuuaauaauauguuguaggagggucaauaagacaggaucaacacagagaggucauagggaaucaagagggaaaaugucaguagcaccucaaaaugggaagaucauauccucaugggaguuguacaaaagugaaagugagacugggcuguga

SEQ ID NO: 63261 - RNA, 1575 nt, Artificial Sequence
  derived and/or modified CDS sequence (wt) from glycoprotein__RABV__JQ595308.1
augauuccucaggcucuucuguuugugccucuccugauucccucucugugucuuggggaauuccccaucuacacgauaccagacaagcucggccccuggagcccuaucgacauacaucaucucagcugucccaacaaucugguugcagaaaacgacgggugcaccagucugucaggguuuuccuauauggaacugaaggugggauacaucucugccauaaaggugaacggguucacuuguaccgguguugugacagaagcagagaccuacaccaacuuugucgguuaugucacuaccacauucaagaggaagcacuuccgcccgacgccagaugccugcagagccgcacacgacuggaagauggccggugaucccagauaugaagcuucccuucaaaauccuuauccugauuaccauuggcuacggaccguaaaaaccaccaaggagucacuuguuauuauauccccgaguguugcugauuuggacccuuacgacaagucccuucauuccagaguuuuccccagugggaaguguuuggggauaacagucucuuccaccuacugcucaaccaaccaugauuacaccaucuggaugcccguagaaccaagacuuggaacaucuugugauauuuuuaccaauagcagagggaagagagcaucuaaggggggcaggguuuguggauucguggaugaaaggggcuuauacaagucucucaaaggagcaugcagacucaagcugugcggaguccccgggauccggcuguuggacggaacaugggucucaauccagacaucagaagauaucaaguggugcccuccugaucgauuagugaaucuacacgacuuucacucggaugaaauagaacaucuuguuguagcggaauuaaucaagaggagggaaaauugucuagaugcacuggaguccaucaugaccaccaaaucagugagcuucagacgucucagucacuugaggaaacuuguuccuggguuugggaaggcauacaccauauucaacaagaccuuaauggaagcugaugcucauuacaagucaguuaagacuuggaacgaaguuaucccuucgaaagguugccuggaagucggagggagaugucauccccaugugaacggaguauucuucaaugguauaauuuuggguccggauggaaauguucugaucccugagaugcagucuucccugcuucaacaacauauggagcuguuagagucuucugucaucccucugaugcaucccuuggcagacccaucaacagucuucaaggagggcgaugaggcggaagacuuuguugagguucaucuuccagauguccacaagcagguuucggauguugaccuuggccuuccgaguugggggaaguaucuguugauuagugcaggugcuuuggcaauacugauucuggcuaucgucuugauaauauguuguaggagggucaauaagacaggauccacacagagaggucauagggaaucaggagggaaaaugucuguaguaccucaaaacgggaagaucauauccucaugggaguuguacaaaagugaaagugagacugggcuguga

SEQ ID NO: 63262 - RNA, 1575 nt, Artificial Sequence
  derived and/or modified CDS sequence (wt) from glycoprotein__RABV__JQ595309.1
augauuccucaggcucuucuguuugugccucuccugauucccucucugugucuuggggaauuccccaucuacacgauaccagacaagcuuggcccuuggagcccuaucgacauacaucaucucagcugucccaacaaucugguugcagaaaacgacgggugcaccagucugucaggguuuuccuauauggaacugaaggugggauacaucucugccauaaaggugaacggguucacuuguaccggugucgugacagaagcagagaccuacaccaacuuugucgguuaugucacuaccacauucaagaggaagcacuuccgcccgacgccagaugccugcagagccgcacacgacuggaagauggccggugaucccagauaugaagcuucccuucaaaauccuuauccugauuaccauuggcuacggaccguaaaaaccaccaaggagucacuuguuauuauauccccgaguguugcugauuuggacccuuacgacaagucccuucauucaagaguuuuccccagugggaaguguuuggggauaacagucucuuccaccuacugcucaaccaaccaugauuacaccaucuggaugcccguagaaccaagacuuggaacaucuugugauauuuuuaccaauagcagagggaagagagcaucuaaggggggcaggguuuguggauucguggaugaaaggggcuuauacaagucucucaaaggagcaugcagacucaagcugugcggaguccccgggauccggcuguuggacggaacaugggucucaauccagacaucagaagauaucaaguggugcccuccugaucgauuagugaauuuacacgacuuucacucggaugaaauagaacaucuuguuguagcggaauuaaucaagaggagggaaaauugucuagaugcacuggaguccaucaugaccaccaaaucagugagcuucagacgucucagucacuugaggaaacuuguuccuggguuuggaaaggcauacaccauauucaacaagaccuuaauggaagcugaugcucauuacaagucaguuaagacuuggaacgaaguuaucccuucgaaagguugccuggaagucggagggagaugucauccccaugugaacggaguauucuucaaugguauaauuuuggguccggauggaaauguucugaucccugagaugcagucuucccugcuucaacaacauauggagcuguuagagucuucugucaucccucugaugcaucccuuggcagacccaucaacagucuucaaggagggugaugaggcggaagacuuuguugagguucaucuuccagauguccacaagcagguuucggauguugaccuuggccuuccgaguugggggaaguaucuguugauuagugcaggugcuuuggcaauacugauucuggcgaucgucuuaauaauauguuguaggagggucaaaaagacaggauccacacagagaggucauagggaaucaggagggaaaaugucuguaguaccucaaaacgggaagaucauauccucaugggaguuguacaaaagugaaagugagacugggcuguga

SEQ ID NO: 63263 - RNA, 1575 nt, Artificial Sequence
  derived and/or modified CDS sequence (wt) from glycoprotein__RABV__JQ595310.1
augaucccucaggcucuucuguuugugccucuccugauucccuuguugugucgcggggaauuccccaucuacacgauaccagacaagcucggcccuuggagcccuaucgacauacaucaucucagcugucccaacaaucugguugcagaaaacgacgggugcaccagucugucaggguuuuccuauauggaacugaaggugggauacaucucagccauaaaggugaacggguucacuuguaccgguguugugacagaagccgagaccuacaccaacuucgucgguuaugucacuaccacauucaagagaaagcacuuccgcccgacgccagaugccugcagagcugcacacgacuggaagauggccggugaucccagauaugaagauucccuucaaaauccuuauccugauuaccauuggcuacggaccguaaagaccaccaaggagucgcucguuauuauauccccgaguguugcugauuuagaccccuacgacaagucccuucauucaagaguuuuccccagugggaaguguuuggggauaacagucuccuccaccuacugcucaaccaaccaugauuacaccaucuggaugcccguagaaccaagacuuggaacaucuugugauauuuuuaccaauagcagagggaagagagcaucuaaggggggcaggguuugcggauuuguggaugaaaggggcuuauacaagucucucaaaggagcaugcaaacucaagcuguguggaguccccgggauuaggcugcuggaugggaccugggucucaauccagacaucagaagauauuaaguggugcccuccugaucgauuagugaaucuacacgacuuucacucggaugaaauagaacaucuuguuguagaggaauugaucaagaggagggaaaauugucuagaugcacuggaguccaucaugaccaccaaaucagugagcuucagacgucucagccacuugaggaagcuuguuccuggguuugggaaggcauacaccauauucaacaauaccuuaauggaagcugaugcucauuacaaaucaguuaagacuuggaacgaggucaucccuucgaaagguugccuugaagucggagggagaugucaucccccugugaacggaguauucuucaaugguauaauuuuggguccggauggaaauguucugaucccugagaugcaaucuucccugcuucaacaacauauggagcuuuuagagucuucuguuaucccucugaugcaucccuuggcggacccaucaacggucuuuaaggaaggugaugaggcggaagacuuugucgagguucaucuuccagauguccacaaacagguuucggauguugaccuuggucuuccgaguugggggaaguaucuguugaugagugcaggugcucuggcaauacugauucuagcgaucgucuuaauaauauguuguaggagggucaacaagacaagaucaucacagagaggucacagggaaucaggagggaaaaugucaguagcaccucaaaacgggaagaucauauccucaugggaguuguacaagagcgaaagcgagacugggcuguga

SEQ ID NO: 63264 - RNA, 1575 nt, Artificial Sequence
  derived and/or modified CDS sequence (wt) from glycoprotein__RABV__JQ595312.1
augaucccucaggcucuucuguuugugccucuccuaauuccgucgcugugucucggggaauuccccuucuacacgauaccagauaagcuuggccccuggagcccgaugcacauacaucaccucagcugucccaacaaucugguugcugaagacgacgggugcacaagucugucaggguuuuccuauauggaacugaaggugggauacaucucugccauaaaggugaacggguucacuugcaccgguguugugacagaagccgagaccuacaccaacuuugucgguuaugucacuacaacauucaagagaaagcacuuccgcccgaugccugaugcuugcagagcugcacacgacuggaagauggccggugaucccagauaugaagauucucuucaaaauccuuauccugauucccauuggcuacggacuguaaagacaaccaaggagucgcucguuauuauauccccgaguguugcugauuuggacccauacgauaagucccuucauucaagaguuuuccccagugggaaguguuuggggauaacagucuccuccaccuacugcucaaccaaccaugauuacaccaucuggaugcccguagaaccaagacuuggaacaucuugugauauuuuuaccaauagcagagggaagagagcauccaaggggggcaggguuugcggauuuguggaugaaaggggcuuauacaagucucucaaaggagcaugcaaacucaaacuguguggaguccccgggauuaggcugauggauggaaccugggucucaauccagacaucagaagauauuaaguggugcccuccugaucgauuagugaaucuacacgacuuucacucggaugaaauagaacaucuuguuguagaggaauugaucaagaggagggaaaauugucuagaugcacuggaguccaucaugaccaccaaaucagugagcuucagacgucucagccaccugaggaagcuuguuccuggguucggaaaggcauacaccauauucaacaagaccuuaauggaagcugaugcucauuacaagucaguuaagaauuggaacgaggucaucccuucgaaagguugccuggaagucggagggagaugucaucccccugugaacggagucuucuucaaugguauaauuuuggguccagauggaaauguucugaucccugaaaugcaaucuucccugcuucaacaacauauggagcuguuagagucuucuguuaucccucugaugcaucccuuggcagacccaucaacagucuuuaaggaaggugaugaggcagaagacuuugucgagguucaucuuccagauguccacaagcaaguuucagauguugaccuuggucuuccgaguugggggaaguaucuguugaugagugcaggugcucuagcaauacugcuucuggcgaucgucucaauaauauguuguaggagggucaguaagacaagaucaacacagaggggucauagggaaucaggagggagaaugucagucgcaccucaaaaugggaagaucauauccucaugggaguuguacaaaagugaaagcgagacugggcuguga

SEQ ID NO: 63265 - RNA, 1575 nt, Artificial Sequence
  derived and/or modified CDS sequence (wt) from glycoprotein__RABV__JQ595313.1
augaucccccaggcucuucuguuugugccucuccugauucccucgcugggucucgggaaguuccccaucuauacgauaccagauaagcuuggccccuggagcccgauagacauacaucaucucagcugucccaacaauuugguuguggaagacgaagggugcaccagucugucaggguucuccuauauggaacugaaggugggauacaucucauccauaaaggugaacggguucacuuguaccgguguugugacagaagccgagaccuacaccaacuuugucgguuaugucaccaccacauuuaagagaaaacacuuccgcccgaugccagaugccugcagagcugcacacgacuggaagauagccggcgauccuagauaugaagauucucuucaaaauccuuauccugauuaccauuggcuacggaccguaaagaccaccaaggagucucucguuauuauaucuccgaguguggcugaguuggaccccuacgacaaaucccuucauucaagaguuuuccccagugggaaguguuuggggauaacagucuccucuaccuacugcucaacuaaccacgauuacaccaucuggaugcccguagaagcaagacuugggacaucuugugauauuuucaccaauagcagagggaagaaagcaucuaaggggggcaggacuugcggauuuguagaugaaaggggcuuauacaagucucugaaaggagcaugcaaacucaagcuaugcggaguccccgggcuccggcugauggauggaaccugggucucaauccagacaucagaugauauuaaauggugcccuccugaucaauuggugaaucuacaugacuuucacucagaugaaauagaacaucucgucguagaggaauugaucaagaaaagggaaggauguuuagaugcacuggaguccauaaugaccacuaaaucagugagcuucagacgucucagccacuugagaaagcuuguucccggguuugggaaggcauacaccauauucaauaauaccuuaauggaagcugaugcucauuacaagucaguucggacuuggaacgaagucauccccucaaaagguugccuaaaagucggagggaggugucaucccccugugaacggaguauucuucaaugguauaauuuuggguccagaugggaauguucugaucccugagaugcaaucgucccugcuucaacaacauauggaacuguuggaguccucuguuaucccucugaugcaccccuuggcagacccaucaacagucuucaaagacggugaugaggcggaagacuuuguugagguucaucuuccggauguucacaaacaggucucggauguugaccuuggucuuccgaguugggggaaguauuuguugaugagcgcaggugcucuggcgacacugauucuggcgaucuucuuaauaacauguuguaggagggccaauaggacagaaucaacacagagaggucauagggagucaggagggaaagugucaguagccccucaaaacgggaaaaucauauccucaugggaguuguacaaaagugaaagugagaccgggauguga

SEQ ID NO: 63266 - RNA, 1575 nt, Artificial Sequence
  derived and/or modified CDS sequence (wt) from glycoprotein__RABV__JQ595315.1
augaucccucaggcucuucuguuugugccucuccugauucccucgcugugucucgggaaauuccccaucuacacgauaccagacaagcucggccccuggagcccgaucgacauacaucaucucagcugucccaacaaucugguugcagaagacgaagggugcaccagucugucaggguucuccuauauggaacugaaggugggauacaucucugccauaaaggugaacggguucacuuguaccgguguugugacagaagcugagaccuacaccaacuuugucgguuaugucaccaccacauuuaagagaaaacacuuccgcccgaugccagacgccugcagagcugcacacgacuggaagauggccggugauccuagauaugaagauucucuucagaauccuuauccugauuaccauuggcuacggaccguaaagaccaccaaggagucgcucguuauuauauccccgaguguggcugauuuggaccccuacgacaagucccuucauucaagaguuuuccccagugggaaguguuuggggauaacagucuccucuaccuacugcucaacuaaccaugauuacaccaucuggaugcccguagaagcaagacuugggacaucuugugauauuuuuaccaacagcaaagggaagaaagcaucuaaggggggcaggacuugcggauuuguagaugagaggggcuuguacaagucucugaaaggagcaugcaaacucaagcuaugcggaguccccgggcucaggcuaauggauggaaccugggucucaauccagacaucagaugauauuaaauggugcccuccugaucaauuggugaaucuacaugacuuucacucagaugaaauagaacaucuugucguagaggaauugaucaagaaaagagaaggaugucuagaugcacuggaguccaucaugaccaccaaaucagugagcuucagacgucucagccacuugagaaagcuuguuccuggguuugggaaggcauacaccauauucaacaauaccuuaauggaagcugaugcucauuacaagucaguucggacuuggaacgaagucauccccucaaaagguugccuaaaggucggagggaggugucaucccccugugaauggaguauucuucaaugguauaauuuuggguccagaugggaauguucugaucccugagaugcaaucgucccugcuucaacaacauauggaacuguuggagucuucuguuaucccucugaugcaucccuuggcagacccaucaacagucuucaaggacggugaugaggcggaagauuuuguugagguucaucuuccggauguucacaaacaggucucggagauugaccuuggucucccgaguugggggaaguaucuguugaugagugcagguguuuuggcaacacugauucuggcgaucuucuugauaacaugcuguagaagggccaauaggacagaaucaacacagagaggucguagggagucaggagggaaagugucaguagccccucaaaacgugaaaaucauauccucaugggaguuguacaaaagugaaagugagaccgggcuguga

SEQ ID NO: 63267 - RNA, 1575 nt, Artificial Sequence
  derived and/or modified CDS sequence (wt) from glycoprotein__RABV__JQ595316.1
augaucccucaggcucuucuguuugugccucuccugauucccucgcugugucucgggaauuuccccaucuacacgauaccagacaagcucggccccuggagcccgaucgacauacaucaucucagcugucccaacaaucugguugcagaagacgaagggugcaccagucugucaggguucuccuauauggaacugaaggugggauacaucucugccauaaaggugaacggguucacuuguaccgguguugugacagaagcugagaccuacaccaacuuugucgguuaugucaccaccacauuuaagagaaaacacuuccgcccgaugccagacgccugcagagcugcacacgacuggaagauggccggugauccuagauaugaagauucucuucagaauccuuaucccgauuaccauuggcuacggaccguaaagaccaccaaggagucgcucguuauuauauccccgaguguggcugauuuagaccccuacgacaagucccuucauucaagaguuuuccccagugggaaguguuuggggauaacagucuccucuaccuacugcucaacuaaccaugauuacaccaucuggaugcccguagaagcaagacuugggacaucuugugauauuuuuaccaauagcaaagggaagaaagcaucuaaggggggcaggacuugcggauuuguagaugaaaggggcuuguacaagucucugaaaggagcauguaaacucaagcuaugcggaguccccgggcucaggcuaauggacggaaccugggucucaauccagacaucagaugauauuaaauggugcccuccugaucaauuggugaaucuacaugacuuucacucagaugaaauagaacaucuugucguagaggaauugaucaagaaaagagaaggaugucuagaugcacuggaguccaucaugaccaccaaaucagugagcuucagacgucucagccacuugagaaagcuuguuccuggguuugggaaggcauacaccauauucaacaauaccuuaauggaagcugaugcucauuacaagucaguucggacuuggaacgaagucauccccucaaaagguugccugaaggucggagggaggugucaucccccugugaauggaguauucuucaaugguauaauuuuggguccagaugggaauguucugaucccugagaugcaaucgucccugcuucaacaacauauggaacuguuggagucuucuguuaucccucugaugcaucccuuggcagacccaucaacagucuucaaggacggugaugaggcggaagauuuuguugagguucaucuuccggauguucacaaacaggucucggagaucgaccuuggucucccgaguugggggaaguaucuguugaugagugcagguguuuuggcaacacugauucuggcgaucuucuugauaacaugcuguagaagggccaauaggacagaaucaacacagagaggucguagggagucaggagggaaagugucaguagccccucaaaacgggaaaaucauauccucaugggaguuguacaaaagugaaagugagaccgggcuguga

SEQ ID NO: 63268 - RNA, 1575 nt, Artificial Sequence
  derived and/or modified CDS sequence (wt) from glycoprotein__RABV__JQ595317.1
augauuccccaggcucuucuguuugugccucuccugaucuccucgcuguguuucgggaaauuccccaucuacacuauaccagacaagcucggccccuggagcccuauagacauacaucaucucugcuguccuaauaauuuaguugcagaggaggaggggugcaccaguuugucuggguuuuccuacauggaacugaaggugggauacaucucugccauaaaagugaacggguucacuuguaccggggucgugacagaggcugagaccuacaccaacuuuguugguuaugucaccacaacauucaagagaaaacacuuucgcccgaugccagaugcaugcagggcugcauacgacuggaagauggccggugacccuagauaugaagauucucuucaaaauccuuacccugauuaccauuggcuacggaccguaaagaccaccaaagagucucuuauuaucauaucuccaaguguggcugauuuggacccauacgauaaaucccuucauucaagaguuuucccuggugguaaguguuugggaauaacaaucucuuccaccuacugcucaaccaaccaugauuauacuaucuggaugccugaagaagcaagacucgggacaucuuguaacauuuuuaccaacagcagagggaagaaagcaucuaaggggggcaggacuuguggauucguggaugaaaggggcuuguacaagucucuaaaaggagcaugcaaacucaagcuaugcggaguucccggacuuagacuuauggauggaacuugggucucaauucagacaucgaaugagaccaaauggugcccuccugaucaauuggugaaucugcaugacuuucacucagaugagauagaacaucucguuguggaggaguugguaaagaaaagggaagaaugucuggaugcauuggaguccaucaugaccaccaaauccguaagcuucagacgucucagccacuugagaaaacuuguuccgggguucggaaaggcguacaccauauucaacaagaccuuaauggaggcugaugcucauuacaagucaguucggacuuggaacgagaucauucccucaaaagggugccuaaaagucggagggaggugccacccucauguggauggaguguucuucaaugguauaauucuggguccagaugggcauguccugaucccugagaugcaaucgucccuacuucaacaacauauggagcuguuggaguccucuguaaucccucuaauacaucccuuggcagaccccucaacagucuucaaggacggugaugaggcggaugacuuuguugagguucaccuuccggauguucacaaacaggucucagggguugaccucggucucccaggcugggggaaguaucugcugaugagugcaggugcucuggcaacacuaaucuugacaaucuuuuuaauaaaauguugcagaggggucaauagaacagaaucuguacaacgaagucugagggauucaggagggaaaguaucagugcccccccaaaacgggaaagucauaucuucaugggaguuguauaaaaguggaggcgagaccggacuguga

SEQ ID NO: 63269 - RNA, 1575 nt, Artificial Sequence
  derived and/or modified CDS sequence (wt) from glycoprotein__RABV__JQ595319.1
augaucccucaggcucuuuugucugugccucuccugauuuccucguugugucucgggaaauucccgaucuacacaauaccagacaagcucggcccuuggaguccuauugacauacaucaucucagcuguccuaauaacuugguuguagaggacgaggggugcacuaguuugucaggguuuucuuacauggaacugaaggugggauacauuucugcuauuaaagugaacgguuucacuuguaccgguguagugacagaggcugagaccuauaccaacuucguugguuauguuaccacaacauucaagagaaagcacuuucgcccaaugccagaugcaugcagagcugcacacgaauggaaaauggccggugauccuagauaugaagauucucuucaaaaucccuauccugauuaccauuggcuacggaccguaaagaccaccaaagagucucuuauuauaauaucuccaaguguggcugauuuggacccguaugacaagucucuucacucaaggguuuuuccuggugggaauuguuugggaauaacaaucucuucuaccuacugcucaacuaaucaugauuacaccaucuggaugcccgaggaagcgagacuugggacaucuugugacauuuuuaccaacagcagagggaagagagcaucuaaggggggcaagauuugcggauucguggacgaaaggggcuuguacaagucucugaaaggagcauguaaacuuaagcuaugcggaguucccggacuuagacuuauggacggaaccuggguaucaauucaaacaucggaugagaccaaaugguguccuccugaucaauuggugaauguacaugacuuucacucagacgagauagaacaucucauuguggaggagcuagucaagaaaagggaagaaugucuagaugcacuggagucuaucaugaccacuaaauccgugaguuucagacgucucagccacuuaaggaaacuuguuccuggguuuggaaaggcauauacuauauucaacaauaccuuaauggaagcugaugcccacuacaagucgguucggacuuggaaugagaucaucccuuccaaggggugccuaaaagucggagguaugugccauccucaugugggcgggguguuuuuuaaugguauaauucuagguccagacgggacugucuugaucccugaaaugcaaucguccuugcuccaacaacauauggagcuguuggaguccucugugaucccccugaugcaccccuuagcggacccgucaacuguuuucaaggaaggugaugaggcagaagacuuuguugagauucaccuuccagauguucacaagcaaaucucagggguugaccuuggucucccuagcugggggaaguaucuguugauaagugcaggugcucuggcaacacugauucugacaaucuucuuaauaacauguugcagaaaggucaauagaacagaaucaauacagcgaggucauggagaaucagaaaggaaagugucuguaaguccccaaaacgggagagucauauccuccugggagcuguacaaaaguggaggagaaaccaaucuguga

SEQ ID NO: 63270 - RNA, 1575 nt, Artificial Sequence
  derived and/or modified CDS sequence (wt) from glycoprotein__RABV__JQ595320.1
augaucuuucaggcucuucuauuugugccucuccuaauuucuucguugugucuugggaaauuccccaucuacacgauaccagacaagcucgguccuuggagccccaucgacauacaucaccucagcuguccaaacaauuugguuguggaggacgaggggugcaccagccugucaggguuuucuuacauggaacuaaaggugggauacaucucugccauaaaggugaacggguuuaccuguaccgguguugugacagaagcugagaccuauacuaacuuuguugguuaugucaccaccacauucaagaggaaacauuuucgcccuauaccagaugcauguagggcugcauacaacuggaagauagcuggugaucccagauacgaggagucucuucaaaauccuuauccugauuaucauuggcuacggacaguaaagaccaccaaggagucucuuaucaucauaucuccaaguguggcugauuuggacccauaugacaaaucccuucauucuagguuguucccuggugggaaguguuugggaauaacaauuucuucuaccuacugcuccaccaaccaugauuacacuaucuggaugccugaagaaccaagacucgggacaucuugugacauuuuuacuaauagcaaagggaaaaaggcaucuaaggggggcaagguuugcggauuuguggaugaaaggggcuuguauaagucucuaaagggagcauguaaacucaagcugugcggaguuuccggacuuagacuuauggauggaaccuggguuacaauucagacgucagaugagaccaaauggugcccuccagaucaauugguaaaucuacaugacuuucacucagaugaaauagagcaucucgucguggaggaauugguuaagaagagggaggaguguuuggaugcauuagaguccaucaugaccaccaaaucuguaaguuucagacgucuaagcuauuugagaaaacuuguccccggguuuggaaaggcauauacuauauucaacaagacuuugauggaagcugacgcccacuacaagucaguucggacuuggaaugagaucauccccucaaaaggauguuugaaagucagugauaggugucauccucauguggacggaguguucuucaaugguauaauucuggguccugacgggaaugucuugauaccugaaaugcaaucgucccuacuucaacaacauauggagcuguuggaguccucuguaauccccuugaugcaucccuuggcagacccaucaacaguauucaaggauggagacgaagcggaggacuuuguugaaguucaccucccggauguucacaaacagaucucagggguugaccucggucucccuaguugggggaaguaucuccucaugauugcagguggucuagcgacacuaguucugauaaucuucuugauggcauguuguagaagaaccaagagaacagaaucgagaccgcgaggcucuggggaaucaggagagaagguauuggcaacuccccaacccaagaaagucguaucuucaugggaguuguacaagagagaaggcgaugccaggcuguga

SEQ ID NO: 63271 - RNA, 1575 nt, Artificial Sequence
  derived and/or modified CDS sequence (wt) from glycoprotein__RABV__JQ595321.1
augaucuuucaggcucuucuauuugugccucuccuaauuucuucguugugucuugggaaauuccccaucuacacgauaccagacaagcucgguccuuggagccccaucgacauacaucaccucagcuguccaaacaauuugguuguggaggacgaggggugcaccagccugucaggguuuucuuacauggaacuaaaggugggauacaucucugccauaaaggugaacggguuuaccuguaccggugucgugacagaagcugagaccuauacuaacuuuguugguuaugucaccaccacauucaagaggaaacauuuucgcccuauaccagaugcauguagggcugcauacaacuggaagauagcuggugaucccagauacgaggagucucuucagaauccuuauccugauuaucauuggcuacggacagugaagaccaccaaggagucucuuaucaucauaucuccaaguguggcugauuuggacccauaugacaaaucccuucauucuagguuguucccuggugggaaguguuugggaauaacaauuucuucuaccuacugcuccaccaaccaugauuacacuaucuggaugccugaagaaccaagacucgggacaucuugugacauuuuuacuaauagcaaagggaaaaaggcaucuaaggggggcaagguuugcggauuuguggaugaaaggggcuuguauaagucucuaaagggagcauguaaacucaagcugugcggaguuuccggacuuagacuuauggauggaacuuggguuacaauucagacgucagaugagaccaaauggugcccuccagaucaauugguaaaucuacaugacuuucacucagaugaaauagagcaucucgucguggaggaauugguuaagaagagggaggaguguuuggaugcauuagaguccaucaugaccaccaaaucuguaaguuucagacgucuaagcuauuugagaaaacuuguccccggguuuggaaaggcauauacuauauucaacaagacuuugauggaagcugacgcccacuacaagucaguucggacuuggaaugagaucauccccucaaaaggauguuugaaagucagugauaggugucauccucauguagacggaguguucuucaauggcauaauucuggguccugacgggaaugucuugauaccugaaaugcaaucgucccuacuucaacaacauauggagcuguuggaguccucuguaauccccuugaugcaucccuuggcagacccaucaacaguauucaaggauggagacgaagcggaggacuuuguugaaguucaccucccggauguucacaaacagaucucagggguugaccucggucucccuaguugggggaaguaucuccucaugauugcagguggucuagcgacacuaguucugauaaucuucuugauggcauguuguagaagaaccaagagaacagaaucaagacggcgagcucuuggggaaucaggagagaagguauuggcaacuccccaacccaagaaagucguaucuucaugggaguuguacaagagagaaggcgaugccaggcuguga

SEQ ID NO: 63272 - RNA, 1575 nt, Artificial Sequence
  derived and/or modified CDS sequence (wt) from glycoprotein__RABV__JQ595322.1
augaucccucaggcucuucugucugugccucuucuaauuuccucguuguguuucgggaaauuccccaucuacacgauaccagagaagcucggcccuuggagucccaucgacauacaucaccucagcuguccuaacaauuugguuguggaggaugagggaugcaacagucugucaggguuuucuuacauggaacugaaggugggauacaucucugccauaaaaguuaauggguucacuuguacugguguugugacagaagcugagaccuacaccaacuuugucgguuacgucaccaccacauucaagagaaaacacuuccgcccuaugccggaugcaugcagagccgcauacaacuggaagacggccggcgauccuagauaugaagagucccuucacaauccuuauccugauuaccauuggcuaaggaccguaaaaaccaccaaagaaucccuuauuaucauaucgccaaguguggcugauuuggaccccuacgacaaaucucuucauucaagaaucuucccuggugggaaaugcuugggaauaacaaucucuuccaccuacuguucaacuaaccaugauuauacuaucuggaugcccgaagaagcaagacucgggacaucuugugacauuuuuaccaacagcaaagggaagagagcauccaagggggguaggacuuguggauucguggaugaacggggcuuguauaagucucuaaaaggggcauguaaacuuaagcugugcggaguuccuggacuuagacuuauggauggaacgugggucgcuauucagacaccaaaugagaccaaaugguguucuccugaucagcuaguaaauguacaugacuuucgcucagaugagauagaacaucucgucguggaggaguugaucaggaaaagggaagaaugucuagaugcacuggaguccaucaugacuacaaaaucaguaagcuucaggcgucucagcaacuugagaaaacuuguuccuggguuuggaaaggcauauacuauauucaacaaaaccuuaauggaggcugaugcucacuacaagucaguucggacuuggaaugaaaucauccccucaagagggugccugaaagucggagggaggugucauccucaugugaauggaguguuuuucaaugguauaauuuuggguccggaugggcauauccugauuccggagaugcaaucaucccuccuccaacagcauauggagcuguuagaauccucuguaauccccuuaauacauccucuggcagacccaucaacagucuucaaggacggugaugaggcugaggacuuuguugagguucaccuuccggacguucaccaacaggucucagggguugaccucggucucccggacugggggaaguaugugcugaugagugcaggugcucuagcgaccgugaugcugacaauauucuugauaaccuguugcagaagggucaagagaacagaaucaauccaccaaggucuuggugagucaggaaggaaagugucgguaacuccccaaaacggaaaagucauguccucaugggaauauuacaagagugaaggcgggaccaggcuguga

SEQ ID NO: 63273 - RNA, 1575 nt, Artificial Sequence
  derived and/or modified CDS sequence (wt) from glycoprotein__RABV__JQ595323.1
augaucucucaggcuguccuguaugugccucuccuaauuccaucgcuguguaucggggaauuccccaucuacacgauaccagacaagauuggcccuuggagcccgaucgacauacaucaucucagcuguccuaauaauuugguuguggaggaugagggaugcaccagucugucaggauucucuuacauggaacugaaggugggguacaucucugccauaaaggugaacggauucacuuguaccggcguugugacagaagccgagaccuacacuaauuuuguggguuaugucaccacuacguucaagagaaaacacuuucgcccgaugccagaugcaugcagagcggcauacaacuggaagauggccggugauccuagauaugaagagucucuucaaaauccuuauccugauuacaauuggcuacggaccguaaagaccaccaaagagucucucauuaucauaucuccaaguguggcugauuuggacccauacgacaaaucccuucacucaagaguuuucccuaaugggaaguguuugggaguaacgauuucuucuacauacugcucaacuaaccaugauuacacuaucuggaugcccgaagaagcaagacucgggacaucuugugacauuuuuaccaacagcaaggggaagagagcaucuaaggggggcaggacuugcggauucguggaugaaaggggccuguacaagucucuaagaggagcauguaaacuuaagcugugugggguuccuggacuuagacugauggauggaaccugggucucaauccagacaucagaugauaccaaauggugcccuccagaucagcuggugaauguacaugauuuucacucagaugagauagaacaucucgucguggaggaguuggucaagaagagggaagaaugucuggaugcacuggaguccaucaugaccaccaaauccguaaguuucagacgucucagucacuugagaaaacuuguuccuggguuuggaaaggcauauacuauauucaacaagacccugauggaagcugaugcucacuacaagucaauucagacuuggaacgagaucauccccucaaaagggugccucaaagucggagggaugugucauccccauguggacggaguguuuuucaacgguauaauuuuggguccagacggaaaugucuuaaucccugagaugcaaucaucccuacuucaacaacauauggagcuguuggagucuucuguaaucccucuaaugcaucccuuggcagacccaucaacagucuucaaggacggugaugaggcggaagacuuuguugaaguucaccuuccagauauucacaaacaggucucagggauagaccuuggucucccagacugggggaaauaucugcugaugagugcaggugcucuggcaauauuauuguuaacaaucuuuuuaaugacauguugcagaagggucaauagaacaaaaucagcacagcgagauccuggagaguuaggacggaaaguaucagcaacuccucagaacaggaaagucauaucuucgugggaguuguacaagaguggaggcgauacuaggcuguga

SEQ ID NO: 63274 - RNA, 1575 nt, Artificial Sequence
  derived and/or modified CDS sequence (wt) from glycoprotein__RABV__JQ595324.1
augaucccucaggcucuuuugucugugccucuucuaauuuccucguuguguuucgggaaauuccccaucuacacgauaccagagaagcucggcccuuggagucccaucgacauacaucaccucagcuguccuaacaauuugguuguggaggaugagggaugcaacagucugucaggguuuucuuacauggaacugaaggugggauacaucucugccauaaaaguuaauggguucacuuguacugguguugugacagaagcugagaccuacaccaacuuuguugguuacgucaccaccacauucaagagaaaacacuuccgcccuaugccggaugcaugcagagccgcauauaacuggaagacggccggcgauccuagauaugaagagucccuucacaauccuuauccugauuaccauuggcuaaggacuguaaaaaccaccaaagaaucccuuauuaucauaucgccaaguguggcugauuuggaccccuacgacaaaucucuucauucaagaaucuucccuggugggaaaugcuugggaauaacaaucucuuccaccuacuguucaacuaaucaugauuauacuaucuggaugcccgaagaagcaagacucgggacaucuugugacauuuuuaccaacagcaaagggaagagagcuuccaagggggguaggacuuguggauucguggaugaacggggcuuguauaagucucuaaaaggggcauguaaacuuaagcugugcggaguuccuggacucagacuuauggauggaacgugggucgcuauucagacaccaaaugagaccaaauggugcucuccugaucagcuggugaauguacaugacuuucgcucagaugagauagaacaucucgucguggaggaguugaucaggaaaagggaagaaugucuagaugcacuggaguccaucaugacuacaaaaucaguaagcuucaggcgucucagcaacuugagaaaacuuguuccuggguuuggaaaggcauauacuauauucaacaaaaccuugauggaggcugaugcucacuacaagucaguucggacuuggaaugaaaucauccccucaagagggugccugaaagucggagggaggugucauccucaugugaauggaguguuuuucaaugguauaauuuuggguccggaugggcauauccugauuccggagaugcaaucaucccuccuccaacagcauauggagcuguuagaauccucuguaauccccuuaauacauccucuggcagacccaucaacagucuucaaggacggugaugaggcggaggacuuuguugagguucaccuuccggacguucaccaacaggucucagggguugaccucggucucccagacugggggaaguaugugcugaugagugcaggugcucuagcgaccgugaugcugacaauauucuugauaaccuguugcagaagggucaagagaacagaaucaguacaccaaggucuuggugagucaggaaggaaagugucgguagcuccccaaaacggaaaagucauguccucaugggaauauuacaagaguggaggcgggaccaggcuguga

SEQ ID NO: 63275 - RNA, 1575 nt, Artificial Sequence
  derived and/or modified CDS sequence (wt) from glycoprotein__RABV__JQ595325.1
augaucccucaagcucuucugucugugccucuucuaauuuccucguuguguuucgggaaauuccccaucuacacgauaccagagaagcucggcccuuggagucccaucgacauacaucaccucagcuguccuaacaauuugguuguggaggaugagggaugcaacagucugucaggguuuucuuacauggaacugaaggugggauacaucucugccauaaaaguuaauggguucacuuguacugguguugugacagaagcugagaccuacaccaacuuuguugguuacgucaccaccacauuuaagagaaaacacuuccgcccuauggcggaugcaugcagagccgcauacaacuggaagacggccggcgauccuagauaugaagagucccuucacaauccuuauccagauuaccauuggcuaaggaccgugaaaaccaccaaagaaucccuuauuaucauaucgccaaguguggcugauuuggaccccuacgacaaaucucuucauucaagaaucuucccuggugggaaaugcuuggggauaacaaucucuuccaccuacuguucaacuaaccaugauuauacuaucuggaugcccgaagaagcaagacucgggacaucuugugacauuuuuaccaacagcaaggggaagagagcauccaagggggguaggacuuguggauucguggaugaacggggcuuguauaagucucuaaaaggggcauguaaacuuaagcugugcggaguuccuggacuuagacuuauggauggaacguggguggcuauucagacaccaaaugagaccaaauggugcucucccgaucagcuggugaauguacaugacuuucgcucagaugagauagaacaucucgucguggaggaguugaucaggaaaagggaagaaugucuagaugcacuggaguccaucaugacuacaaaaucaguaagcuucaggcgucucagcaacuugagaaaacuuguuccuggguuuggaaaggcauauacuauauucaacaaaaccuuaauggaggcugacgcucacuacaagucaguucggacuuggaaugaaaucauccccucaagagggugccugaaagucggagggaggugucauccucaugugaauggaguguuuuucaaugguauaauuuuggguccggaugggcauauccugauuccggaaaugcaaucaucccuccuccaacagcauauggagcuguuagaauccucuguaaucccuuuaauacauccucuggcagacccaucaacagucuucaaggacggugaugaggcggaggacuuuguugagguucaccuuccggacguucaccaacaggucucagggguugaccucggucucccagacugggggaaguaugugcugaugagugcaggugcucuagcgaccgugaugcugacaauauucuugauaaccuguugcagaagggucaagaaaacagaaucaauacaccaagguccuggugagucaggaaggaaaguaucgguuacuccccaaaacggaaaagucauguccucaugggaauauuacaagaguggaggcgggaccagguuguga

SEQ ID NO: 63276 - RNA, 1575 nt, Artificial Sequence
  derived and/or modified CDS sequence (wt) from glycoprotein__RABV__JQ595326.1
augaucccccaggcucuucuguuugugccucuccuauuucccucguugugucucgggaaauuccccaucuacaccauaccggaaaagcucggcccuuggagucccaucgacauacaucaucucagcuguccuaacaauuugguuguggaggacgaggguugcgacagucugucaggguuuucuuacauagaacugaagguggguuacaucucugccauaaaggugaacggguucacuuguaccggugucgugacagaagcugagaccuacaccaacuuuguugguuaugucaccaccacguucaagagaaaacacuuccgcccuaugccagaugcaugcagagcugcguacaacuggaagacagccggugacccuagauaugaggagucucuucacaauccuuauccugauuaccauuggcuacggaccgugaaaaccaccaaagaaucucuuauuaucauaucgccgaguguggcugacuuggacccauaugacaaaucccuucauucaagaguuuucccuggugggaaauguuuggggauaacagucucuucuaccuacugcucaacuaaccaugacuauacuaucuggaugcccgaagaagcaagacucgggacaucuugugacauuuuuaccaacagcaaagggaagagggcaucuaagggggguaggacuugcggauucguggaugaaaggggcuuauauaagucucuaaaaggggcauguaaacuuaagcugugcggaguuccuggacuuagacuuauggauggaacgugggucgcuauucagacaccaggugagaccaaauggugcucuccugaucagcugguaaaucuacaugacuuucguucagaugagauagaacaucucgucguagaggaguugaucaagaagagagaagaaugucuagaugcacuagaguccaucaugaccaccaaaucaguaagcuucagacgucucagcaacuugaggaaacuugucccuggguuuggaaaggcauacacuauauucaacaaaaccuugauggaggcugaugcucacuacaagucaguucggacuugggaugaaaucauucccucaaaggggugccuaagagucggagggaggugucauccucauguaaacggaguguuuuucaaugguauaauucuggguccggauggacauguccugauuccagagaugcaaucgucccuccuccaacagcauauggagcuguuggaauccucuguaaucccccuaauacaucccuuggccgacccgucaacagucuucaaagacggugaugaagcggaggacuuuguugagguucaccuuccggacguucacaagcaggucucaggggucgaucuuggucucccaaacugggggaaauaugugcugaugagugcagguguucuagcgaccgugauacugacaauuuucuuguuaacauguugcagaaggguuaacagaacaaaaccaaaacaacaaagucuugaggagucaggaaggaaaguaucgguuacuccucaaaaugggaaggucaugucuucaugggaguauuacaagagugagggcaggaccagucuguga

SEQ ID NO: 63277 - RNA, 1575 nt, Artificial Sequence
  derived and/or modified CDS sequence (wt) from glycoprotein__RABV__JQ595327.1
augauccuccaggcucuucuauuugugccucuccuuauuuccucgcuguguuucggggacuuccccaucuacacgauaccagagaaacuuggcccuuggagucccaucgacauacaucaucucagcugccccaacaaccuagucguggaagaugagggaugcagcagucugucaggguuuucuuacauggagcugaaggugggauacaucucugccauaaaggugaauggguucaccuguaccggugucgugacagaggcugagaccuacaccaauuuuguagguuaugucaccaccacguuuaagaggaagcacuuccguccgaugccagaugcaugcagagccgcauacaacuggaagacagccggugauccuagauaugaagagucccuucaaaaucccuauccugauuaccauuggcuacggacaguaaaaaccaccaaagagucucucguuaucauaucaccaaguguggcugauuuggaucccuacgauaaaucccuucauucaagagucuucucagaugggaaguguuugggaauaacaaucucuucuaccuacugcuccacuaaucaugauuacacuaucuggaugcccgaggaagcaagacuuggaacgucuugugacaucuucacaaccagcagagggaagagagccucuaaagggggcaagacuugcggauucguugaugaaagggguuuauauaagucucucaaaggggcauguaagcucaaacugugcggaguuucugggcuuagacuuauggauggaaccuggguaucaauucaggcaccagacgaggccaaauggugcucuacugaucaacuggugaauauacaugauauucgcucggaugagauagaacaucuuguuguagaggaguuggucaagaagagggaagagugucuggaugcauuggagucuauuaugaccaccaaaucgguaagcuucaggcgucucagccacuugagaaaacuuguuccuggguucggaaaggcauauacuauauucaacaagacauugauggaggcugaugcucacuacaagucaguucggacuuggagugaggucaucccaucgaaagggugccuaagugucggaggaaggugucauccccaugagaacggaguguuuuucaaugguauaauucuggguccugaugggagugucuugaucccggagaugcaaucuucccuacuucaacagcauauggagcuguuagaaucaucuguaaucccccuaaugcaucccuuggcaaacccaucaacggucuucaaggauggugacgaggcggaggacuuuguugaaguucaccuuccagacguucaagaacagaucucagggguugaccuuggucucccaaacugggggaaguaugugaugaugagugcaggugcucuggcgauccuaaugcugacaaucuucuugaugacauguugcagaagagcuaauagaacaagaucaacacaacgagaucuugggggguuagaaaggaaaguaucgguuccucccaaagaugggagagucaugucuucaugggagucauacaaaaguggaggugagacuagucuguaa

SEQ ID NO: 63278 - RNA, 1575 nt, Artificial Sequence
  derived and/or modified CDS sequence (wt) from glycoprotein__RABV__JQ595328.1
augaucacucaagcucuucuguuugugccucuccugauuuccucguuguguuuagggcaguuccccaucuacacgauaccggauaagcuuggccccuggagucccaucgacauacaucaucucaguugcccuaacaauuugguuguggaggacgagggaugcaacagucugucaggguuuucuuacauggaacugaaggugggauacaucucuuccauaaaagugaauggguucacuuguaccggugucgugacagaagcugagaccuacaccaacuuuguugguuaugucaccaccacauucaagagaaaacacuuccgcccgaugccagaugcauguagagcugcauacagcuggaagauggccggagauccuagauaugaagagucucuucacacuccuuacccugauuaccauuggcuaagaacaguaaaaaccaccaaagagucucuugucaucauaucgccaaguguggcugacuuggauccauacgacaaaucccuucauucaagggucuucucuggugggaaguguuugggaauaacaaucucuuccaccuacugcuccacuaaccaugauuacacuaucuggaugcccgaagaagcaaggcuugggaccucuugugacauuuuuaccaacagcaaagggaagagagcaucuaagggaggcaggacuugcggauucguggaugaaaggggauuauacaagucucuaaaaggggcaugcaaacuuaaacuaugcggaguuccuggacuuagacuuauggauggaacuugggucucaauucagacaucagaugagaccaaauggugcccuccugaucaacugguaaauauacaugauuuucgcucagaugagauagaacaucucgucguggaggaguuggucaagaagagggaagaaugccuugaugcacuggaguccauuaugaccaccaaaucagugagcuucagacgucuuagccacuugagaaaacuuguucccggguucggaaaggcguauacuauauucaacaaaaccuuaauggaggcugaugcucacuacaagucaguucggacuuggaaugagaucauccccucaaaagggugcuuaagcgucggagggagaugccauccucaugugaacggaguguuuuucaaugguauaauucuggguccggacgggaguguccugaucccugagaugcaaucaucccugcuucaacagcauauggagcuguuggaguccucuguaaucccccuaaugcaucccuuagcaaacccaucaacagucuucaaggacggugaugaggcggaggacuuuguugagguucaccuuccggacguucaggaacaggucucagggguugaccucggucucccaaacugggggaaguaugugcugaugagugccgguguucuggcuauccuaauccugacaaucuucuuaaugauauguugcagaagggccaauagaacaaaaucaauacaacaagguccuggggagucaggaaggaaagugucgguuccuccccaaaacgggaaagucauaucuucaugggagucguuuaagagcggaggcgaaaccaggcuguga

SEQ ID NO: 63279 - RNA, 1575 nt, Artificial Sequence
  derived and/or modified CDS sequence (wt) from glycoprotein__RABV__JQ647510.1
augauuccucaaguucuuuuguuuguuccccuucuaguuuucucgucguguuuugggaaauuccccauuuauacgauaccagacaaacuugguccauggagccccaucgauauacaucaucucagcuguccgaacaaucugguuguggaagaugaaggaugcaccaaucugucugguuuuuccuacauggaacucaaagugggauauauuucagccauaaaagugaacggauucaccuguacagguguggugacagaagcagaaaccuacacuaacuuuguugguuaugucaccaccacguuuaagagaaagcacuuucgcccuaugccggaugcaugcagaaccgcauacaauuggaagauggcuggugaccccagguaugaagagucucugcacaauccguacccugacuaccacuggcuccgaacugucaagaccaccaaggagucccuugucaucauaucuccgagcguugcagauuuggacccguacgauaaaucccuccacucgagaguuuuuccuggcggaaaaugcucaggaauaaccguguccuccacucgcugcucuaccaaccacgauuacaccaucuggaugccugaaaauccuagacugggaacuucgugugacauuuucaccaauaguagagggaagagggcaucaaaagggggcaagacuuguggauuuguggaugaaagaggcuuguacaagucucuaaagggagcaugcaagcugaaacuaugugggguucuaggacuuagacuuauggacggaacaugggucgcaauucagacaucagaugagaucaaauggugcucuccugaucagcuaguaaaucuacacgacuuucacucggaugagauugaacaucuuguuguggaggaguuggucaaaaagagggaagagugucuggacgcacuggagacuauuaugaccacaaaguccgugaguuucagacgucuuagucauuugaggaagcuagucccuggguuuggaaaggcguauacuauauucaauaaaacccugauggaggcugaugcucacuauaaaucaauccggacuuggaaugaaaucauccccucuaaaggguguuugagaguuggggggagaugucauccucaugugaacgggguguucuucaacggcauuauacuggguccugacggacauguucuaaucccagagaugcaaucgucccuccuccaccagcauauggaauuguuggaguccucagucaucccuuugaugcaucccuuagcagacccgucaacagucuuuaaagacggcgacgaggcagaggacuuuguugagguucaccuuccggaugugcacaagcagaucucggggguugaucuuggucucccaaacugggggaaguaugugcugauaagugcagguucucugacugcauuaauguugaugauuuucuuaaugacguguugcagaaagacuaauagagcagagucaauacaacacaguccuggagagacagggaggaaagugucgguaacuucucacaacggaagggucauaucuucaugggaaucauauaaaagcggaggugagaccaagcuguga

SEQ ID NO: 63280 - RNA, 1575 nt, Artificial Sequence
  derived and/or modified CDS sequence (wt) from glycoprotein__RABV__JQ685892.1
augaucccucaggcucuucuguaugugccucuccugaucuccucguuguguuucgggggauuccccaucuacacgauaccagacaagcucggccccuggagucccauugacauacaucaucucagcugucccaacaauuugguuguggaggacgaggggugcaccagucugucaggguuuucuuacauggaacugaaggugggguacaucucugccauaaaggugaauggguucacuuguacuggugucgugacagaagccgagaccuacaccaacuuuguugguuaugucaccacuacauucaagagaaaacacuuucgcccuaugccagacgcaugcagagcugcauacaauuggaagauggccggugauccuagauaugaagaaucucuucaaaauccuuauccugacuacaguuggcuacggaccguaaagaccaccaaagagucucuuauuaucauaucuccaaguguagcggauuuggacccauacgacaaaucccuucauucaagaguuuucccuggugggaaguguuugggaauaacaaucucuucuaccuacugcucaacuaaccaugauuacaccaucuggaugccugaagaagcaagacucgggacuucuugugacauuuuuaccaacagcagagggaagagagcauccaaggggggcaagaccugcggauucguggacgaaaggggcuuguacaagucucuaaaaggagcauguaaacuuaagcugugcggaguucccggacucagacuuauggauggaaccugggucacaauucagacaucagaugaaaccaaauggugcccuucugaucaauugguaaaucuacaugacuuucacucagaugagauagaacaucuugucguggaggaguuggucaagaagagggaagaaugucuggaugcacuggaguccaucaugaccaccaaauccguaagcuucagacgucuuagccacuugagaaaacuuguuccuggguuuggaaaggcauauacuauauucaacaagaccuuaauggaagcugacgcucauuacaagucaauucggaccuggaacgaaaucauccccucaaaagggugccuaaaagucggagggaggugucauccucauguggacggaguguucuucaaugguauaauucuggguccggacgggaauguccugaucccugagaugcaaucgucccuacuucaacaacauguggagcuguuggaguccucuguaaucccucuaaugcaucccuuggcagacccaucaacagucuuuaaggacggugaugaagcggaggacuuuguugagguucaccuuccggauauucacaaacaggucucaggggucgaccuuggucucccaaacugggggaaguaucugcuaaugagugcaggugcucuggcaacacuaaugcugauaaucuucuuaauggcauguugcagaagagcuaaucgaacagaaucaauacaacgagaucccggggagucaggaaggaaaguaucgauaccuucccaagacgggaaagucauaucuucaugggaguuguacaagaguggaggcgagaccaggcuguga

SEQ ID NO: 63281 - RNA, 1575 nt, Artificial Sequence
  derived and/or modified CDS sequence (wt) from glycoprotein__RABV__JQ685893.1
augaucccucaggcucuucuguaugugccucuccugauccccucguuguguuucgggggauuccccaucuacacgauaccagacaagcucggccccuggagucccauugauauacaucaucucagcugucccaacaauuugguuguggaggacgaggggugcaccagucugucaggguuuucuuacauggaacugaaggugggguacaucucugccauaaaggugaacggguucacuuguacuggugucgugacagaggccgagaccuacaccaacuuuguugguuaugucaccacuacauucaagagaaaacacuuucgcccuaugccagaugcaugcagagcugcauacaauuggaagguggccggugauccuagauaugaagaaucucuucaaaauccuuauccugacuacaguuggcuacggaccguaaagaccaccaaagagucucuuauuauuauaucuccaaguguagcggauuuggacccauacgauaaaucccuucauucaagaguuuucccuggugggaaguguuugggaauaacaaucucuucuaccuacugcucaacuaaccaugauuacaccaucuggaugccugaagaagcaagacucgggacaucuugugacauuuuuaccaacagcagagggaagagagcauccaaggggggcaagaccugcggauucguggacgaaaggggcuuguacaagucucuaaaaggagcauguaaacuuaagcugugcggaguucccggacucagacuuauggauggaaccugggucacaauucagacaucagaugaaaccaaauggugcccuucugaucaauugguaaaucuacaugacuuucacucagaugagauagaacaucuugucguggaggaguuggucaagaagagggaagaaugucuggaugcacuggaguccaucaugaccaccaaauccguaagcuucagacgucuuagccacuugagaaaacuuguuccuggguuuggaaaggcauauacuauauucaacaagaccuuaauggaagcugaugcucauuacaagucaauucggaccuggaacgagaucauccccucaaaagggugccuaaaagucggagggaggugucauccgcauguggacggaguguucuucaaugguauaauucuggguccggacgggaauguccuaaucccugagaugcaaucgucccuacuucaacaacauguggagcuguuggaguccucuguaaucccucuaaugcaucccuuggcagacccaucaacagucuuuaaggacggugaugaagcggaggacuuuguugagguucaccuuccggauauucacaaacaggucucaggggucgaccuuggucucccaaacugggggaaguaucugcuaaugagugcaggugcucuggcaacacuaaugcugacaaucuuuuuaaugacauguugcagaagagcuaaucgaacagaaucaauacaacgagaucccggggagucaggaaagaaaguaucgauaacuucccaagacgggaaagucauaucuucuugggaguuguacaagaguggaggcgagaccaggcuguga

SEQ ID NO: 63282 - RNA, 1575 nt, Artificial Sequence
  derived and/or modified CDS sequence (wt) from glycoprotein__RABV__JQ685894.1
auguucccucaggcucuuuuguuuguaucucuucugauuucuucauuguguuucgggaaguuucccauuuacacgauaccggacaaacuagguccuuggagcccaauugacauacaucaucucagcuguccaaacaacuuggucguggaggacgagggaugcaccaaccugucaggauucuccuacauggagcucaaagugggauacaucuccgccauaaaagugaacggguucacuuguacagguguugugacagaggcagaaaccuacaccaacuuuauugguuaugucacaaccguguucaaaagaaagcauucccgcccuacaccagacgcauguagagccgcguacaacuggaagauggccggugaccccagauaugaggagucccuacacaauccguacccagacuaccauuggcuucgaacuguaaaaaccaccaaggagucucucguuaucauauccccaaguguggcagaucuggacccauacgacaaaucccuucacucgaggguguuuccuaguggaaagugcucagggauaacugugucuucuaccuacugccugacuaaccaugaauacaccauuuggaugccagagaaucugagacuagggacgucuugugacauuuucacuaauagcagagguaagagagcauccagagggagcaagacuuguggcuuuguagaugagagaggcuuauauaagucccuaaaaggagcaugcaaacucaaguuaugugggguucuugggcuuagacucauggaugggacaugggucgcaaugcaaacaucggaugagacgaaaugguguccucccgaucaauuggugaaucugcacgacuuucguucagacgagauugaacaucuuguuguggaggaguuggucaagaaaagagaggagugucuggaugcaauagaguccaucaugaccaccaagucagugaguuuuagacgucucagccacuuaagaaaacuugucccugguuuuggaaaagcauauacuauauucaacaaaaccuugauggaggcugaugcucacuacaagucaguucggaccuggaacgagauuaucccaucuaaaggguguuuaagaguuggggggagaugucauccucaugugaaagggguguucuucaacgggauaauacugggaccugacggccauguucuaaucccagagaugcaaucaucucuccuccagcaacauauggaguuguuggagucaucaauuauccccuugaugcaucccuuggcagacccuucugcaguuuucaaggacggugaugaggcugaggauuuuguugaaguucaccuucccgaugugcacaaacaggucucagggguugacuugggucucccgaacugggggaaguauauauuagugagugcuggggcucugauugccuugauguugauaauuuuccuaaugacauguuucagaggauuuaaucuaccaaaauccacacaacacagccuuggagaaacagagagaaagaugucagucacuccccaaagcgggaagaucauaucuuccugggagucauauaagaguggaggugagaccagacuguga

SEQ ID NO: 63283 - RNA, 1575 nt, Artificial Sequence
  derived and/or modified CDS sequence (wt) from glycoprotein__RABV__JQ685896.1
augaucccucaggcucuucuguaugugccucuccugaucuccucguuguguuucgggggauuccccaucuacacgauaccagacaagcucggccccuggagucccauugacauacaucaucucagcugucccaacaauuugguuguggaggacgaggggugcaccagucugucaggguuuucuuacauggaacugaaggugggguacaucucugccauaaaggugaauggguucacuuguacuggugucgugacagaagccgagaccuacaccaacuuuguugguuaugucaccacuacauucaagagaaaacacuuucgcccuaugccagacgcaugcagagcugcauacaauuggaagauggccggugauccuagauaugaagaaucucuucaaaauccuuauccugacuacaguuggcuacggaccguaaagaccaccaaagagucucuuauuaucauaucuccaaguguagcggauuuggacccauacgacaaaucccuucauucaagaguuuucccuggugggaaguguuugggaauaacaaucucuucuaccuacugcucaacuaaccaugauuacaccaucuggaugccugaagaagcaagacucgggacuucuugugacauuuuuaccaacagcagagggaagagagcauccaaggggggcaagaccugcggauucguggacgaaaggggcuuguacaagucucuaaaaggagcauguaaacuuaagcugugcggaguucccggacucagacuuauggauggaaccugggucacaauucagacaucagaugaaaccaaauggugcccuucugaucaauugguaaaucuacaugacuuucacucagaugagauagaacaucuuguccuggaggaguuggucaagaagagggaagaaugucuggaugcacuggaguccaucaugaccaccaaauccguaagcuucagacgucuuagccacuugagaaaacuuguuccuggguuuggaaaggcauauacuauauucaacaagaccuuaauggaagcugaugcucauuacaagucaauucggaccuggaacgaaaucauccccucaaaagggugccuaaaagucggagggaggugucauccucauguggacggaguguucuucaaugguauaauucuggguccggacgggaauguccugaucccugagaugcaaucgucccuacuucaacaacauguggagcuguuggaguccucuguaaucccucuaaugcaucccuuggcagacccaucaacagucuuuaaggacggugaugaagcggaggacuuuguugagguucaccuuccggauauucacaaacaggucucaggggucgaccuuggucucccaaacugggggaaguaucugcuaaugagugcaggugcucuggcaacacuaaugcugauaaucuucuuaauggcauguugcagaagagcuaauccaacagaaucaauacaacgagaucccggggagucaggaaggaaaguaucgauaccuucccaagacgggaaagucauaucuucaugggaguuguacaagaguggaggcgagaccaggcuguga

SEQ ID NO: 63284 - RNA, 1575 nt, Artificial Sequence
  derived and/or modified CDS sequence (wt) from glycoprotein__RABV__JQ685897.1
augaucccucaggcucuucuguaugugccucuccugaucuccucguuguguuucgggggauuccccaucuacacgauaccagacaagcucggccccuggagucccauugacauacaucaucucagcugucccaacaauuugguuguggaggacgaggggugcaccagucugucaggguuuucuuacauggaacugaaggugggguacaucucugccauaaaggugaacggguucacuuguacuggugucgugacagaggccgagaccuacaccaacuuuguugguuaugucaccaccacauucaagagaaaacacuuucgcccuaugccagaugcaugcagagcugcauacaauuggaagguggccggugauccuagauaugaagaaucucuucaaaauccuuauccugacuacaguuggcuacggaccguaaagaccaccaaagagucucuuauuauuauaucuccaaguguagcggauuuggacccauacgacaaaucccuucauucaagaguuuucccuggugggaaguguuugggaauaacaaucucuucuaccuacugcucaacuaaccaugauuacaccaucuggaugccugaagaagcaagacucgggacaucuugugacauuuuuaccaacagcagagggaagagagcauccaaggggggcaagaccugcggauucguggacgaaaggggcuuguacaagucucuaaaaggagcauguaaacuuaagcugugcggaguucccggacucagacuuauggauggaaccugggucacaauucagacaucagaugaaaccaaauggugcccuucugaucaauugguaaaucuacaugacuuucacucagaugagauagaacaucuugucguggaggaguuggucaagaagagggaagaaugucuggaugcacuggaguccaucaugaccaccaaauccguaagcuucagacgucuuagccacuugagaaaacuuguuccuggguuuggaaaggcauauacuauauucaacaagaccuuaauggaagcugaugcucauuacaagucaauucggaccuggaacgagaucauccccucaaaagggugccuaaaagucggagggaggugucauccgcauguggacggaguguucuucaaugguauaauucuggguccggacgggaauguccuaaucccugagaugcaaucgucccuacuucaacaacauguggagcuguuggaguccucuguaaucccucuaaugcaucccuuggcagacccaucaacagucuuuaaggacggugaugaagcggaggacuuuguugagguucaccuuccggauauucacaaacaggucucaggggucgaccuuggucucccaaacugggggaaguaucugcuaauaagugcaggugcucuggcaacacuaaugcugacaaucuuuuuaaugacauguugcagaagagcuaaucgaacagaaucaauacaacgagaucccggggagccaggaaagaaaguaucgauaacuucccaagacgggaaagucauaucuucaugggaguuguacaagaguggaggcgagaccaggcuguga

SEQ ID NO: 63285 - RNA, 1575 nt, Artificial Sequence
  derived and/or modified CDS sequence (wt) from glycoprotein__RABV__JQ685898.1
augaucccucaggcucuucuguaugugccucuccugaucuccucguuguguuucgggggauuccccaucuacacgauaccagacaagcucggccccuggagucccauugacauacaucaucucagcugucccaacaauuugguuguggaggacgaggggugcaccagucugucaggguuuucuuacauggaacugaaggugggguacaucucugccauaaaggugaacggguucacuuguacuggugucgugacagaagccgagaccuacaccaacuuuguugguuaugucaccacuacauucaagagaaaacacuuucgcccuaugccagacgcaugcagagcugcauacaauuggaagauggccggugauccuagauaugaagaaucucuucaaaauccuuauccugacuacaguuggcuacggaccguaaagaccaccaaagagucucuuauuaucauaucuccaaguguagcggauuuggacccauacgacaaaucccuucauucaagaguuuucccuggugggaaguguuugggaauaacaaucucuucuaccuacugcucaacuaaccaugauuacaccaucuggaugccugaagaagcaagacucgggacuucuugugacauuuuuaccaacagcagagggaagagagcauccaaggggggcaagaccugcggauucguggacgaaaggggcuuguacaagucucuaaaaggagcauguaaacuuaagcugugcggaguucccggacucagacuuauggauggaaccugggucacaauucagacaucagaugaaaccaaauggugcccuucugaucaauugguaaaucuacaugacuuucacucagaugagauagaacaucuugucguggaggaguuggucaagaagagggaagaaugucuggaugcacuggaguccaucaugaccaccaaauccguaagcuucagacgucuuagccacuugagaaaacuuguuccuggguuuggaaaggcauauacuauauucaacaagaccuuaauggaagcugaugcucauuacaagucaauucggaccuggaacgaaaucauccccucaaaagggugccuaaaagucggagggaggugucauccucauguggacggaguguucuucaaugguauaauucuggguccggacgggaauguccugaucccugagaugcaaucgucccuacuucaacaacauguggagcuguuggaguccucuguaaucccucuaaugcaucccuuggcagacccaucaacagucuuuaaggacggugaugaagcggaggacuuuguugagguucaccuuccggauauucacaaacaggucucaggggucgaccuuggucucccaaacugggggaaguaucugcuaaugagugcaggugcucuggcaacacuaaugcugauaaucuucuuaauggcauguugcagaagagcuaaucgaacagaaucaauacaacgagaucccggggagucaggaaggaaaguaucgauaccuucccaagacgggaaagucauaucuucaugggaguuguacaagaguggaggcgagaccaggcuguga

SEQ ID NO: 63286 - RNA, 1575 nt, Artificial Sequence
  derived and/or modified CDS sequence (wt) from glycoprotein__RABV__JQ685899.1
augguuccucaggcucuuuuguuuguaccccuucuaguuuuuccaucuugucuugggaaauucccaauuuacacgauaccagacaaacuuggucccuggagcccgaucgacauacaccaucucagcuguccaaauaacuugguuguggaggacgagggauguaauaaccugucaggguucuccuacauggaacuuaaaguaggauacaucucagccauaaaaguuaacggguucaccuguacagguguugugacagaagcagaaaccuacaccaacuuuguugguuaugucacaaccacauucaagagaaagcauuuccgcccuacaccagaugcauguagagccgcauauaacuggaaaauggccggugacccccgauaugaagagucucuacacacuccguacccugacuaccauuggcuucgaacuguuaaaaccaccaaagagucucucguuaucauauccccaaguguggcagauuuagauccauaugacaaaucccuucacucgagagucuucccuagcggaaaaugcucaggaaugacggugucuucuaccuguugcucaaccaaccaugauuacaccaucuggaugcccgagaauccgagacuagggacgucuugugacauuuucaccaauagcagagggaagagagcauccaaagggagcaagacuugcggcuuuguagaugagagaggccuauauaagucucuaaaaggagccuguaaacucaaguuauguggaguucuuggacuuagacuuauggauggaacauggguugccaugcaaauaucagaugagaccaaauggugcccuccagaucaguuagugaaucugcacgacuuucgcucggacgagauugaacaucuuguuguggaggaguuggucaagaaaagagaggagugucuggaugcacuagagucaaucaugaccaccaagucagugaguuucagacgucucagucacuuaagaaaacuugucccgggauuuggaaaagcauacaccauauucaacagaaccuugauggaggcugaugcucacuacaagucaguccggaccuggaaugagguuaucccuucaaaaggguguuugagaguuggggggaggugucauccucaugugaacgggguguuuuucaaugguauaauauuggggccugacggucauguucugaucccagagaugcaaucaucccuccuccagcaacauauggaguuguuggaguccucaguuauccccuuaaugcacccccuggcaaacccuucuacaguuuucaaagagggugaugaggcugaggauuuuguugaaguucaccuccccgaugugcauaaacaagucucagggguugaccugggucucccaaauugggggaaguauguauugaugagugcaggggcccugauugcccugauguugauaauuuuucuaaugacauguugccgaagagucagucgaccagaaucuaugcaacgcagucuuggaggaacagggagaaaggugucggccgcuucccagagcgggaaggucauaucuucaugggagucauauaagaguggaggugagacccgacuguga

SEQ ID NO: 63287 - RNA, 1575 nt, Artificial Sequence
  derived and/or modified CDS sequence (wt) from glycoprotein__RABV__JQ685900.1
augaucccucaggcucuucuguuugugccucuccugauucccucgcugugucucggggaauuccccauauacacaauaccagacaagcucggcccuuggaucccuaucgacauacaucaucucagcugucccaacaaucugguugcagaaaacgacgggugcaacagucugucaggguuuuccuauauggaacugaaggugggauacaucucugccauaaaggugaacggguucacuuguaccgguguugugacagaagccgagaccuacaccaacuuugucgguuaugucaccaccacauucaagagaaagcacuuccgcccgaugccagaugcuugcagagcugcacacgacuggaagauggccggugaucccagauaugaagauucucuucaaaauccuuauccugauuaccauuggcuacggaccguaaagaccaccaaggagucgcucguuauuauauccccgaguguugcugauuuggaccccuacgacaagucccuucauucaagaguuuuccccagugggaaguguuuggggauaacaguuucuuccaccuacugcucaaccaaccaugauuacaccaucuggaugcccguagaaccaagacuuggaacaucuugugauauuuuuaccaauagcagagggaagagagcaucuaaggggggcaaaguuugcggauuuguggaugaaaggggcuuauacaagucucucaaaggagcaugcaaacucaagcugugcggaguccccgggauuaggcugauggauggaacuugggucucaauccagacaucggaagauauuaaguggugcccuccugaucgauuagugaaucuacacgacuuucacucggaugaaauagaacaccuuguuguagaggaauugaucaagaggagggaaaauugucuagaugcacuggaguccaucaugaccaccaaaucagugagcuucagacgucucagccacuugaggaagcuuguuccuggguuugggaaggcauacaccauauucaacaagaccuuaauggaagcugaugcucauuacaagucaguuaagacuuggaacgaggucaucccuucgaaagguugccuggaagucggagggagaugucaucccccugugaacggaguauucuucaaugguauaauuuuggguccagauggaaauguucugaucccugagaugcaaucuucccugcuucaacaacauauggagcuguuagagucuucuguuaucccucugaugcaucccuuggcagacccaucaacaguuuucaaggaaggugaugaggcagaagacuuuguugagguucaucuuccagauguccacaaacagguuucggauguugaccuuggucuuccgaguugggggaaguaucuguugaugagugcaggugcucuggcaauauugauucuggcgaucgucuuaauaauauguuguaggagggucaauaagacaggaucaacacagagaggucauagggaaucaggagggaaaaugucaguggcaccucaaaaugggaagaucauauccucaugggaguuguacaaaagugaaagugagacugggcuguga

SEQ ID NO: 63288 - RNA, 1575 nt, Artificial Sequence
  derived and/or modified CDS sequence (wt) from glycoprotein__RABV__JQ685901.1
auggucccuuggguccuucuguucgugccuuuucuaaucucuucauuguguuuugggaaguucccuaucuacacaauaccagacaagcuagguccuuggaguccuaucgacauacaucaucucaguugucccaauaaucuuguuguggaagacgagggguguaauagucugucgggguuuucuuacauggaacuaaaagugggauacaucucugccauaaaagugaacggguucacuuguacuggugucgugacggaagccgagacauacacuaacuuuguugguuaugucaccaccacauucaagagaaaacacuuucgcccaaugcccgaugcauguagauccgcauacaauuggaaaauggcaggcgauccuagguaugaagagucccuucacaacccauacccugauuaucauuggcugcggaccguuaaaaccaccaaggagucucuuauuaucaucucaccaaguguggcugaccuagacccguaugacaaaucccuucauucaaggauuuucccuggggggaaaugcacgggucuaacagucucuuccaccuacugcucgaccaaccaugacuacaccaucuggaugccugaaaaagcagggcucggaacaucuugugacaucuucaccaauaguaaagggaagagagcguccaaaggaggcaagacuugcggauuuguggacgagagagguuuguauaaguccuugaaaggagcauguaagcucaagcugugcgggguuucugggcuuagacuuauggauggaacuuggguugcgauucagacauuggaugaaaccaaauggugcucuccugaucaacuggugaaucugcaugacuuccacucggaugagcuugagcaucuuguuguagaggagcugguuagaaagagggaggaaugucuggaugcauuagaauccaucaugaccacuaaaucaguaagcuucagacgucuaagccacuugagaaaacuaguuccuggguuugggaaggcauacaccauauucaacaaaacccuaauggaggccgaugcccacuacaagucuguucggacuuggagcgagaucauccccucaaaaggguguuugaggguaggggggagaugucauccucaugugaauggaguguuuuucaacgguaucauucuagguccggacgggcauguguugaucccagaaaugcagucaucccuucuccaacaacauguggaacuguuggaguccucugugaucccccucaugcacccacuggcagauccuucagcgguuuucaaagauggugacgaggcagaggauuuuguugagguucaucucccagauguucacaaacagaucucagggguggaccugggccucccaagcuggggaaaguauaugcugaugauugcaggugcucuaaugacucuaauguuguucaucuucuugaugacauguugcagaagagucaacaggacggaaucaauacgacaaggccccagggaguuagaaagcaaaguaucaguuacuccccaaaacagaaaaguuauaucuucaugggagucuuacaagagcggaggcgagaccaagcuguga

SEQ ID NO: 63289 - RNA, 1575 nt, Artificial Sequence
  derived and/or modified CDS sequence (wt) from glycoprotein__RABV__JQ685902.1
augauuccucaggcucuucuguuugugccucuccugauucccucucugugucuuggggaauuccccaucuacacgauaccagacaagcucggcccuuggagcccuaucgacauacaucaucucagcugucccaacaaucugguugcagaaaacgacgggugcaccagucugucaggguuuuccuauauggaacugaaggugggauacaucucugccauaaaggugaacggguucacuuguaccgguguugugacagaagcagagaccuacaccaacuuugucgguuaugucacuaccacauucaagaggaagcacuuccgcccgacgccagaugccugcagagccgcacacgacuggaagauggccggugaucccagauaugaagcuucccuucaaaauccuuauccugauuaccauuggcugcggaccguaaaaaccaccaaggagucacuuguuauuauauccccgaguguugcugauuuggacccuuacgacaagucccuucauucaagaguuuuccccagugggaaguguuuggggauaacagucucuuccaccuacugcucaaccaaccaugauuacaccaucuggaugcccguagaaccaagacuuggaacaucuugugauauuuuuaccaauagcagagggaagagagcaucuaaggggggcaggguuuguggauucguggaugaaaggggcuuauacaagucucucaaaggagcaugcagacucaagcugugcggaguccccgggauccggcuguuggacggaacaugggucucaauccagacaucagaagauaucaaguggugcccuccugaucgauuagugaaucuacacgacuuucacucggaugaaauagaacaucuuguuguagcggaauuaaucaagaggagggaaaauugucuagaugcacuggaguccaucaugaccaccaaaucagugaccuucagacgucucacucacuugagaaaacuuguuccuggguuugggaaggcauacaccauauucaacaagaccuuaauggaagcugaugcucauuacaagucaguuaagacuuggaacgaaguuaucccuucgaaagguugccuggaagucggagggagaugucauccccaugugaacggaguauucuucaaugguauaauuuuggguccggauggaaauguucugaucccugagaugcagucuucccugcuucaacaacauauggagcuguuagagucuucugucaucccucugaugcaucccuuggcagacccaucaacagucuucaaggagggugaugaggcggaagacuuuguugagguucaucuuccagauguccacaagcagguuucggauguugaccucggccuuccgaguugggggaaguaucuguugauuagugcaggugcuuuggcaauacugauucuggcgaucgucuuaauaauauguuguaggaggguuaauaagacaggauccacacagagaggucauagggaaucaggagggaaaaugucuguaguaccucaaaacgggaagaucauauccucaugggaguuguacaaaagugaaagugagacugggcuguga

SEQ ID NO: 63290 - RNA, 1575 nt, Artificial Sequence
  derived and/or modified CDS sequence (wt) from glycoprotein__RABV__JQ685903.1
augauccuucaggcucuucucuuugugccucuccugauuuccucguuguguuucgggggauuccccaucuacacgauaccugacaagcuuggaccuuggagucccaucgacauacaucaucucagcuguccuaacaauuuggucguggaagacgaggggugcaccagucugucgggguuuucuuacauggaacugaaggugggauacaucuccgccauaaaagugaacggguucacuuguaccggugucgugacagaagccgaaaccuacaccaacuuuguugguuaugucaccaccacauucaagagaaaacacuuucgcccgaugccggauucaugcagagcugcauacaacuggaagacggccggugauccucgauaugaagagucucuucaaaauccuuauccagauuaccauuggcuacggaccguaaagaccaccaaagagucucucauuaucauaucucccaguguagcggauuuggacccauacgacaaaucccuucauucaagaguuuucccuggugggaaguguuugggaauaacagucucuucuaccuacuguucaacuaaccaugauuacacuaucuggaugccugaagaagcaagacucgggacaucuugugauauuuucaccaacagcagagggaagagagcauccaaggggggcaggacuugcggauucguggacgaaagggguuuguauaagucucuaaaaggggcauguaaacuuaagcugugcggaguucucggacuuagacuuauggauggaaccugggucacaauucauacuucaaaugaaaccaaauggugcccuucugaucaauugguaaaucuacaugacuuucacucagaugagauagaacaucucgucguggaggaguuggucaagaagagggaagaaugucuagaugcacuagaguccaucaugaccacuaaauccguaagcuucagacgucucagccacuugagaaaacuuguuccuggguuuggaaaggcauauacuauauucaacaagaccuuaauggaagcugaugcucacuacaagucaauucggacuuggaacgagaucauccccucaaaagggugccuaaaagucggagggaggugucauccucauguggacggaguguuuuucaaugguauaauucuagguccggacgggaauguuuugaucccugagaugcaaucgucccuacuucaacaacauguggagcuguuggagucuucuguaaucccucuaaugcaucccuuggcagacccaucaacagucuucaaggacggugaugaagcggaggacuuuguugagguucaccuuccagauguucacaaacaagucucagggguugaccuaggucucccaaacugggggaaguaucugcugaugagugcagguguucuggcuacacuaaugcugacgaucuucuuaauaacauguuguagaagagucgauagaacagaaucaauacaacgaggucccggggaguuaggaagggaaaugucggugacuucccaaaacgggaaagucauaucuucaugggaguuguacaagaguggaggcgagaccaggcuguga

SEQ ID NO: 63291 - RNA, 1575 nt, Artificial Sequence
  derived and/or modified CDS sequence (wt) from glycoprotein__RABV__JQ685905.1
augaucuuucaggcucuucuauuugugccucuccuaauuucuucguugugucuugggaaauuccccaucuacacgauaccagacaagcucgguccuuggagccccaucgacauacaucaccucagcuguccaaacaauuugguuguggaggacgaggggugcaccagccugucaggguuuucuuacauggaacuaaaggugggauacaucucugccauaaaggugaacggguuuaccuguaccgguguugugacagaagcugaaaccuauacuaacuuuguugguuaugucaccaccacauucaagaggaaacauuuucgcccuauaccagaugcauguagggcugcauacaacuggaagauagcuggugaucccagauacgaggagucucuucaaaauccuuauccugauuaucauuggcuacggacagugaagaccaccaaggagucucuuaucaucauaucuccaaguguggcugauuuggacccauaugacaaaucccuucauucuagguuguucccuggugggaaguguuugggaauaacaauuucuucuaccuacugcuccaccaaccaugauuacacuaucuggaugccugaagaaccaagacucgggacaucuugugacauuuuuacuaauagcaaagggaaaaaggcaucuaaggggggcaagguuugcggauuuguggaugaaaggggcuuguauaagucucuaaagggagcauguaaacucaagcugugcggaguuuccggacuuagacuuauggauggaacuuggguuacaauucagacgucagaugagaccaaauggugcccuccagaucaauugguaaaucuacaugacuuucacucagaugaaauagagcaucucgucguggaggaauugguuaagaagagggaggaguguuuggaugcauuagaguccaucaugaccaccaaaucuguaaguuucagacgucuaagcuauuugagaaaacuuguccccggguuuggaaaggcauauacuauauucaacaagacuuugauggaagcugacgcccacuacaagucaguucggacuuggaaugagaucauccccucaaaaggauguuugaaagucagugauaggugucauccucauguagacggaguguucuucaauggcauaauucuggguccugacgggaaugucuugauaccugaaaugcaaucgucccuacuucaacaacauauggagcuguuggaguccucuguaauccccuugaugcaucccuuggcagacccaucaacaguauucaaggauggagacgaagcggaggacuuuguugaaguucaccucccggauguucacaaacagaucucagggguugaccucggucucccuaguugggggaaguaucuccucaugauugcagguggucuagcgacacuaguucugauaaucuucuugauggcauguuguagaagaaccaagagaacagaaucaagacggcgaggcucuggggaaucaggagagaagguauuggcaacuccccaacccaagaaagucguaucuucaugggaguuguacaagagagaaggcgaugccaggcuguga

SEQ ID NO: 63292 - RNA, 1575 nt, Artificial Sequence
  derived and/or modified CDS sequence (wt) from glycoprotein__RABV__JQ685906.1
augaucccucaggcucuucuguaugugccucuccugauccccucguuguguuucgggggauuccccaucuacacgauaccagacaagcucggccccuggagucccauugauauacaucaucucagcugucccaacaauuugguuguggaggacgaggggugcaccagucugucaggguuuucuuacauggaacugaaggugggguacaucucugccauaaaggugaacggguucacuuguacuggugucgugacagaggccgagaccuacaccaacuuuguugguuaugucaccacuacauucaagagaaaacacuuucgcccuaugccagaugcaugcagagcugcauacaauuggaagguggccggugauccuagauaugaagaaucucuucaaaauccuuauccugacuacaguuggcuacggaccguaaagaccaccaaagagucucuuauuauuauaucuccaaguguagcggauuuggacccauacgauaaaucccuucauucaagaguuuucccuggugggaaguguuugggaauaacaaucucuucuaccuacugcucaacuaaccaugauuacaccaucuggaugccugaagaagcaagacucgggacaucuugugacauuuuuaccaacagcagagggaagagagcauccaaggggggcaagaccugcggauucguggacgaaaggggcuuguacaagucucuaaaaggagcauguaaacuuaagcugugcggaguucccggacucagacuuauggauggaaccugggucacaauucagacaucagaugaaaccaaauggugcccuucugaucaauugguaaaucuacaugacuuucacucagaugagauagaacaucuugucguggaggaguuggucaagaagagggaagaaugucuggaugcacuggaguccaucaugaccaccaaauccguaagcuucagacgucuuagccacuugagaaaacuuguuccuggguuuggaaaggcauauacuauauucaacaagaccuuaauggaagcugaugcucauuacaagucaauucggaccuggaacgagaucauccccucaaaagggugccuaaaagucggagggaggugucauccgcauguggacggaguguucuucaaugguauaauucuggguccggacgggaauguccuaaucccugagaugcaaucgucccuacuucaacaacauguggagcuguuggaguccucuguaaucccucuaaugcaucccuuggcagacccaucaacagucuuuaaggacggugaugaagcggaggacuuuguugagguucaccuuccggauauucacaaacaggucucaggggucgaccuuggucucccaaacugggggaaguaucugcuaaugagugcaggugcucuggcaacacuaaugcugacaaucuuuuuaaugacauguugcagaagagcuaaucgaacagaaucaauacaacgagaucccggggagucaggaaagaaaguaucgacaacuucccaagacgggaaagucauaucuucuugggaguuguacaagaguggaggcgagaccaggcuguga

SEQ ID NO: 63293 - RNA, 1575 nt, Artificial Sequence
  derived and/or modified CDS sequence (wt) from glycoprotein__RABV__JQ685907.1
augaucccucaggcucuucuguaugugccucuccugaucuccucguuguguuucgggggauuccccaucuacacgauaccagacaagcucggccccuggagucccauugacauacaucaucucagcugucccaacaauuugguuguggaggacgaggggugcaccagucugucaggguuuucuuacauggaacugaaggugggguacaucucugccauaaaggugaacggguucacuuguacuggugucgugacagaagccgagaccuacaccaacuuuguugguuaugucaccacuacauucaagagaaaacacuuucgcccuaugccagaugcaugcagagcugcauacaauuggaagauagccggugauccuagauaugaagagucucuucaaaauccuuauccugacuacaguuggcuacggaccguuaagaccaccaaagagucucuuauuaucauaucuccaaguguagcggauuuggacccauacgacaaaucccuucauucaagaguuuucccuggugggaaguguuugggaauaacaaucucuucuaccuacugcucaacuaaccaugauuacaccaucuggaugccugaagaagcaagacucgggacuucuugugacauuuuuaccaacagcagagggaagagagcauccaaggggggcaagaccugcggauucguggacgaaaggggcuuguacaagucucuaaaaggagcauguaaacuuaagcugugcggaguucccggacucagacuuauggauggaaccugggucacaauucagacaucagaugaaaccaaauggugcccuucugaucaauugguaaaucuacaugacuuucacucagaugagauagaacaucuugucguggaggaguuggucaagaagagggaagaaugucuggaugcacuggaguccaucaugaccacuaaauccguaagcuucagacgucuuagccacuugagaaaacuuguuccuggguuuggaaaggcauauacuauauucaacaagaccuuaauggaggcugaugcucauuacaagucaauucggaccuggaacgagaucauccccucaaaagggugccuaaaagucggagggaggugucauccucauguggacggaguguucuucaaugguauaauucuggguccggacgggaauguccugaucccugagaugcaaucgucccuacuucaacaacauguggagcuguuggaguccucuguaaucccucuaaugcaucccuuggcagacccaucaacaguauuuaaggacggugaugaagcggaggacuuuguugagguucaccuuccggacauucacaaacaggucucaggggucgaccuuggucucccaaacugggggaaguaucugcuaaugagugcaggugcucuggcaacacuaaugcugauaaucuucuuaauggcauguugcagaagagcuaaucgaacagaaucaauacaacgagaucccggggagucaggaaggaaaguaucgauaccuucccaagacgggaaagucauaucuucaugggaguuguacaagaguggaggcgagaccaggcuguga

SEQ ID NO: 63294 - RNA, 1575 nt, Artificial Sequence
  derived and/or modified CDS sequence (wt) from glycoprotein__RABV__JQ685909.1
augaucccucaagcucuucuguaugugccucuccugaucuccucguuguguuucgggggauuccccaucuacacgauaccagacaagcucggccccuggagucccauugacauacaucaucucagcugucccaacaauuugguuguggaggacgaggggugcaccagucugucaggguuuucuuacauggaacugaaggugggguacaucucugccauaaaggugaacggguucacuuguacuggugucgugacagaagccgagaccuacaccaacuuuguugguuaugucaccaccacauucaagagaaaacacuuucgcccuaugccagaugcaugcagagcugcauacaauuggaagauggccggugauccuagauaugaagaaucucuucaaaauccuuauccugacuacaguuggcuacggaccguaaagaccaccaaagagucucuuauuaucauaucuccaaguguagcggauuuggacccauacgacaaaucccuucauucaagaguuuucccuggugggaaguguuugggaauaacaaucuccucuaccuacugcucaacuaaccaugauuacaccaucuggaugccugaagaagcaagacucgggacaucuugugacauuuuuaccaacaguagagggaagagagcauccaaggggggcaagaccugcggauucguggacgaaaggggcuuguacaagucucuaaaaggagcauguaaacuuaagcugugcggaguucccggacucagacuuauggauggaaccugggucacaauucagacaucagaugaaaccaaauggugcccuucugaucaauugguaaaucugcaugacuuucacucagaugagauagaacaucuugucguggaggaguuggucaagaagagggaagaaugucuggaugcacuggaguccaucaugaccaccaaauccguaaguuucagacgucuuagucacuugagaaaacuuguuccuggguuuggaaaggcauauacuauauucaacaagaccuuaauggaagcugaugcucauuauaagucaauucggaccuggaacgagauuauccccucaaaagggugccuaaaagucggagggaggugucauccucauguggacggaguguucuucaaugguauaauucuggguccggacgggaauguccugaucccugagaugcaaucgucccuacuucaacaacauguggagcuguuggaguccucuguaaucccucuaaugcaucccuuggcagacccaucaacagucuuuaaggacggugaugaagcggaggacuuuguugagguucaccuuccggauauucacaaacaggucucaggggucgaccuuggucucccaaacugggggaaguaucugcuaaugagugcaggugcucuggcaacacuaaugcugacaaucuucuuaaugacauguugcagaagagcuaaucgaacagaaucaauacaacgagaucccggggagucaggaaggaaagugucgauaacuuccccagaugggaaagucauaucuucaugggaguuguacaagaguggaggcgagaccgggcuguga

SEQ ID NO: 63295 - RNA, 1575 nt, Artificial Sequence
  derived and/or modified CDS sequence (wt) from glycoprotein__RABV__JQ685910.1
augaucccucaggcuuuuuuguuugugccucuccugauucccucgcugugucucggggaauuccccaucuacacgauaccagacaagcucggcccuuggagcccuaucgacauacaucaucucagcugucccaacaaucugguugcagaaaacgacgggugcacaagucugucaggguuuuccuauauggaacugaaggugggauacaucucugccauaaaggugaacggauucacuuguaccgguguuaugacagaagccgagaccuacaccaacuuugucgguuaugucaccaccacauucaagagaaagcacuuccgcccgaugccagaugccugcagagcugcacacgacuggaaaauagccggugaucccagauaugaagauucccuucaaaauccuuauccugauuaccauuggcuacggacuguaaagaccaccaaggagucgcucguuauuauauccccgaguguugcugauuuggaccccuacgacaagucccuucauucaagaguuuuccccagugggaaguguuuggggauaacagucucuuccaccuacugcucaaccaaccaugauuacaccaucuggaugcccguagaaccaagacuuggaacaucuugugauauuuuuaccaacagcagagggaagagagcaucuaaggggggcaggguuugcggauuuguggaugaaaggggcuuauacaagucucucaaaggagcaugcaaacucaagcugugcggaguccccgggauuaggcugauggauggaaccugggucucaauccagacaucagaagagauuaaguggugcccuccugaucgauuagugaaucuacacgacuuucacucggaugaaauagaacaucuuguuguagaggaauugaucaagaggagggaaaauugucuagaugcacuggaguccaucaugaccaccaaaucagugagcuucagacgucucagccacuugagaaagcuuguuccuggguuugggaaggcauacaccauauucaacaagaccuuaauggaggcugaugcucauuacaagucaguuaagacuuggaacgaggucaucccuucgaaggguugccuggaagucggagggagaugucaucccccugugaacggaguauucuucaaugguauaauuuuggguccagauggaaauguucugaucccugagaugcaaucuucccugcuucaacaacauauggagcuguuagagucuucuguuaucccucugaugcaucccuuggcagacccaucaacagucuucaaggaaggugaugaggcggaagacuuuguugagguucaucuuccagauguccacaaacagguuucggauguugaccuuggucuuccgaguugggggaaguaucuguugaugagugcaggugcucuggcaauacugauucuggugaucgucuuaauaauauguuguaggagggucaauaagacaggaucaacacagagaggucauagggaaucaggagggaaaaugucaguagcaccucaaaaugggaagaucauauccucaugggaguuguacaaaagugaaagcgagaccggacuguga

SEQ ID NO: 63296 - RNA, 1575 nt, Artificial Sequence
  derived and/or modified CDS sequence (wt) from glycoprotein__RABV__JQ685911.1
augaucccucaggcucuucuguaugugccucuccugauccccucguuguguuucgggggauuccccaucuacacgauaccagacaagcucggccccuggagucccauugauauacaucaucucagcugucccaacaauuugguuguggaggacgaggggugcaccagucugucaggguuuucuuacauggaacugaaggugggguacaucucugccauaaaggugaacggguucacuuguacuggugucgugacagaggccgagaccuacaccaacuuuguugguuaugucaccaccacauucaagagaaaacacuuucgcccuaugccagaugcaugcagagcugcauacaauuggaagguggccggugauccuagauaugaagaaucucuucaaaauccuuauccugacuacaguuggcuacggaccguaaagaccaccaaagagucucuuauuauuauaucuccaaguguagcggauuuggacccauacgacaaaucccuucauucaagaguuuucccuggugggaaguguuugggaauaacaaucucuucuaccuacugcucaacuaaccaugauuacaccaucuggaugccugaagaagcaagacucgggacaucuugugacauuuuuaccaacagcagagggaagagagcauccaaggggggcaagaccugcggauucguggacgaaaggggcuuguacaagucucuaaaaggagcauguaaacuuaagcugugcggaguucccggacucagacuuauggauggaaccugggucacaauucagacaucagaugaaaccaaauggugcccuucugaucaauugguaaaucuacaugacuuucacucagaugagauagaacaucuugucguggaggaguuggucaagaagagggaagaaugucuggaugcacuggaguccaucaugaccaccaaauccguaagcuucagacgucuuagccacuugagaaaacuuguuccuggguuuggaaaggcauauacuauauucaacaagaccuuaauggaagcugaugcucauuacaagucaauucggaccuggaacgagaucauccccucaaaagggugccuaaaagucggagggaggugucauccgcauguggacggaguguucuucaaugguauaauucuggguccggacgggaauguccuaaucccugagaugcaaucgucccuacuucaacaacauguggagcuguuggaguccucuguaaucccucuaaugcaucccuuggcagacccaucaacagucuuuaaggacggugaugaagcggaggacuuuguugagguucaccuuccggauauucacaaacaggucucaggggucgaccuuggucucccaaacugggggaaguaucugcuaaugagugcaggugcucuggcaacacuaaugcugacaaucuuuuuaaugacauguugcagaagaucuaaucgaacagaaucaauacaacgagaucccggggagucaggaaagaaaguaucgauaacuucccaagacgggaaagucauaucuucaugggaguuguacaagaguggaggcgagaccaggcuguga

SEQ ID NO: 63297 - RNA, 1575 nt, Artificial Sequence
  derived and/or modified CDS sequence (wt) from glycoprotein__RABV__JQ685912.1
augaucccucaggcucuucuguaugugccucuccugaucuccucguuguguuucgggggauuccccaucuacacgauaccagacaagcucggccccuggagucccauugacauacaucaucucagcugucccaacaauuugguuguggaggacgaggggugcaccagucugucaggguuuucuuacauggaacugaaggugggguacaucucugccauaaaggugaauggguucacuuguacuggugucgugacagaagccgagaccuacaccaacuuuguugguuaugucaccacuacauucaagagaaaacacuuucgcccuaugccagacgcaugcagagcugcauacaauuggaagauggccggugauccuagauaugaagaaucucuucaaaauccuuauccugacuacaguuggcuacggaccguaaagaccaccaaagagucucuuauuaucauaucuccaaguguagcggauuuggacccauacgacaaaucccuucauucaagaguuuucccuggugggaaguguuugggaauaacaaucucuucuaccuacugcucaacuaaccaugauuacaccaucuggaugccugaagaagcaagacucgggacuucuugugacauuuuuaccaacagcagagggaagagagcauccaaggggggcaagaccugcggauucguggacgaaaggggcuuguacaagucucuaaaaggagcauguaaacuuaagcugugcggaguucccggacucagacuuauggauggaaccugggucacaauucagacaucagaugaaaccaaauggugcccuucugaucaauugguaaaucuacaugacuuucacucagaugagauagaacaucuugucguggaggaguuggucaagaagagggaagaaugucuggaugcacuggaguccaucaugaccaccaaauccguaagcuucagacgucuuagccacuugagaaaacuuguuccuggguuuggaaaggcauauacuauauucaacaagaccuuaauggaagcugaugcucauuacaagucaauucggaccuggaacgaaaucauccccucaaaagggugccuaaaagucggagggaggugucauccucauguggacggaguguucuucaaugguauaauucuggguccggacgggaauguccugaucccugagaugcaaucgucccuacuucaacaacauguggagcuguuggaguccucuguaaucccucuaaugcaucccuuggcagacccaucaacagucuuuaaggacggugaugaagcggaggacuuuguugagguucaccuuccggauauucacaaacaggucucaggggucgaccuuggucucccaaacugggggaaguaucugcuaaugagugcaggugcucuggcaacacuaaugcugauaaucuucuuaauggcauguugcagaagagcuaaucgaacagaaucaauacaacgagaucccggggagucaggaaggaaaguaucgauaccuucccaagacgggaaagucauaucuucaugggaguuguacaagaguggaggcgagaccaggcuguga

SEQ ID NO: 63298 - RNA, 1575 nt, Artificial Sequence
  derived and/or modified CDS sequence (wt) from glycoprotein__RABV__JQ685913.1
augaucccucaggcucuucuguaugugccucuccugaucuccucguuguguuucgggggauuccccaucuacacgauaccagacaagcucggccccuggagucccauugacauacaucaucucagcugucccaacaauuugguuguggaggacgaggggugcaccagucugucaggguuuucuuacauggaacugaaggugggguacaucucugccauaaaggugaacggguucacuuguacuggugucgugacagaagccgagaccuacaccaacuuuguugguuaugucaccacuacauucaagagaaaacacuuucgcccuaugccagaugcaugcagagcugcauacaauuggaagauggccggugauccuagauaugaagaaucucuucaaaauccuuauccugacuacaguuggcuacggaccguaaagaccaccaaagagucucuuauuaucauaucuccaaguguagcggauuuggacccauacgacaaaucccuucauucaagaguuuucccuggugggaaguguuugggaauaacaaucucuucuaccuacugcucaacuaaccaugauuacaccaucuggaugccugaagaagcaagacucgggacuucuugugacauuuuuaccaacagcagagggaagagagcauccaaggggggcaagaccugcggauucguggacgaaaggggcuuguacaagucucuaaaaggagcauguaaacuuaagcugugcggaguucccggacucagacuuauggauggaaccugggucacaauucagacaucagaugaaaccaaauggugcccuucugaucaauugguaaaucuacaugacuuucacucagaugaaauagaacaucuugucguggaggaguuggucaagaagagggaagaaugucuggaugcacuggaguccaucaugaccaccaaauccguaagcuucagacgucuuagccacuugagaaaacuuguuccuggguuuggaaaggcauauacuauauucaacaagaccuuaauggaagcugaugcucauuacaagucgauucggaccuggaacgagaucauccccucaaaagggugccuaaaagucggagggaggugucauccucauguggacggaguguucuucaaugguauaauucuggguccggacgggaauguccugaucccugagaugcaaucgucccuacuucaacaacauguggagcuguuggaguccucuguaaucccucugaugcaucccuuggcagacccaucaacagucuuuaaggacggugaugaagcggaggacuuuguugagguucaccuuccggauauucacaaacaggucucaggggucgaccuuggucucccaaacugggggaaguaucugcuaaugagugcaggugcucuggcaacacuaaugcugauaaucuucuuaauggcauguugcagaagagcuaaucgaacagaaucaauacaacgagaucccggggagucaggaaggaaaguaucgauaccuucccaagacgggaaagucauaucuucaugggaguuguacaagaguggaggcgagaccaggcuguga

SEQ ID NO: 63299 - RNA, 1575 nt, Artificial Sequence
  derived and/or modified CDS sequence (wt) from glycoprotein__RABV__JQ685914.1
augaucccucaggcucuucucuuugugccucuccugauuuccucguuguguuucgggggauuccccaucuacacgauaccugacaagcuuggaccuuggagucccaucgacauacaucaucucagcuguccuaacaauuuggucguggaagacgaggggugcaccagucugucgggguuuucuuacauggaacugaaggugggauacaucuccgccauaaaagugaacggguucacuuguaccggugucgugacagaagccgaaaccuacaccaacuuuguugguuaugucaccaccacauucaagagaaaacacuuucgcccgaugccggauucaugcagagcugcauacaacuggaagacggccggugauccucgauaugaagagucucuucaaaauccuuauccagauuaccauuggcuacggaccguaaagaccaccaaagagucucucauuaucauaucucccaguguagcggauuuggacccauacgacaaaucccuucauucaagaguuuucccuggugggaaguguuugggaauaacagucucuucuaccuacuguucaacuaaccaugauuacacuaucuggaugccugaagaagcaagacucgggacaucuugugauauuuuugccaacagcagagggaagagagcauccaaggggggcaggacuugcggauucguggacgaaagggguuuguauaagucucuaaaaggggcauguaaacuuaagcugugcggaguucucggacuuagacuuauggauggaaccugggccacaauucauacuucaaaugaaaccaaauggugcccuucugaucaauugguaaaucuacaugacuuucacucagaugagauagaacaucucgucguggaggaguuggucaagaagagggaagaaugucuggaugcacuagaguccaucaugaccacuaaauccguaagcuucagacgucucagccacuugagaaaacuuguuccuggguuuggaaaggcauauacuauauucaacaagaccuuaauggaagcugaugcucacuacaagucaauucggacuuggaacgagaucauccccucaaaagggugccuaaaagucggagggaggugucauccucauguggacggaguguuuuucaaugguauaauucuagguccggacgggaauguuuugaucccugagaugcaaucaucccuacuucaacaacauguggagcuguuggaguccucuguaaucccucugaugcaucccuuggcagacccaucaacagucuucaaggacggugaugaagcggaggacuuuguugagguucaccuuccagauguucacaaacaagucucagggguugaccuuggucucccaaacugggggaaguaucugcugaugagugcaggugcucuggcuacacuaaugcugacaaucuucuuaauaacauguugcagaagagucgauaaaacagaaucaauacaacgaggucccggggaguuaggaagggaaguaucgguaacuucccaaaacgggaaagucauaucuucaugggaguuguacaagaguggaggcgagaccaggcuguga

SEQ ID NO: 63300 - RNA, 1575 nt, Artificial Sequence
  derived and/or modified CDS sequence (wt) from glycoprotein__RABV__JQ685915.1
augauccuucaggcucuucugcuuuugccucuccugauaucaucguggugucucgggaaguuccccauuuacacuauaccagacaagcuaggcccuuggaguccuaucgacauacaucaucucagcuguccuaauaacuuggugguagaggacgaggggugcaccagucugucaggguuuucuuacauggaacuaaagguaggauacaucucugcuauuaaagugaacggcuucaccuguaccgguguagugacagaggccgagaccuacaccaacuucguugguuauguuaccacaacauucaagagaaaacacuuucgcccgaugcccgaugcaugcagagcugcgcaugaauggaaaauggcuggugaucccagauaugaagauucucuucaaaaucccuauccugauuaccauuggcuacggaccguaaagaccaccaaagagucucuuauuaucauaucuccaaguguggcugauuuggacccauaugacaagucucuucacucaagggucuuuccaggugggaauuguuugggaguaacaauuucuuccaccuacugcucaacuaaccacgauuacaccauauggaugccagaggaagcgagacuugggacaucuugugacauuuuuacaaacagcaaagggaagaaagcuucuaaggggggcaagguuugcggauucguggaugaaaggggcuuauacaagucucugaaaggagcauguaaacuuaagcuaugcggaguccccggacuuagacugauggacggaaccuggguaucaauucaaacaucggaugagacuaaaugguguccuccugaucaauuggugaauauacaugacuuucacucagacgagauagaacaucucauuguggaggagcuagucaagaaaagggaagaaugucuggaugcacuggagucuaucaugaccacuaaauccguaagcuuccgacgccucagccacuuaaggaaacuuguuccgggauuuggaaaggcauauacuauauucaacaagacauuaauggaagccgaugcucacuacaagucaguucggacuuggaaugaggucaucccuuccaaggggugcuuaaaagucggggggaggugucauccucaugugggcgggguguuuuucaaugguauaauucuagguccagacgguacugucuugaucccugaaaugcagucguccuugcuccaacaacauauggagcuguuggaguccucugugaucccccuaaugcaucccuuggcggacccaucaaaggucuucaaggaaggugaugaggcagaagacuuuguugagguccaccuuccagauguucacaagcaggucucugggguugaccuuggucucccuagcugggggaaguaucuguugaugagugugggugcucuggcaacacuaauccugauuaucuucuuaauaacauguugcagaaaggucaagagaacagaaucaauacagcgaggccauggagaaucaggaaggaaagugucugcaaguccccagaacgggaaagucauaucuuccugggagcuguacaaaagugaaggggaaaccaaucuguga

SEQ ID NO: 63301 - RNA, 1575 nt, Artificial Sequence
  derived and/or modified CDS sequence (wt) from glycoprotein__RABV__JQ685916.1
augaucccucaggcucuuuugucuuugcuucuccugauuuccucguugugucucgggaaauucccgaucuacacaauaccagacaagcucggcccuuggaguccuauugacauacaucaucucagcuguccuaauaacuugguuguagaggacgaggggugcacuagcuugucaggguuuucuuacauggaacugaaggugggauacauuucugcuauuaaagugaacgguuucacuuguaccgguguagugacagaggcugagaccuauaccaacuucguugguuauguuaccacaacauucaagagaaagcacuuucgcccaaugccagaugcaugcagagcugcacacgaauggaaaauggccggugauccuagauaugaagauucucuucaaaaucccuauccugauuaccauuggcuacggaccguaaagaccaccaaagagucucuuauuaucauaucuccaaguguggcugauuuggacccguaugacaagucucuucacucaaggguuuuuccuggugggaauuguuugggaauaacaaucucuucuaccuacugcucaacuaaucaugauuacaccaucuggaugcccgaggaagcgagacuugggacaucuugugacauuuuuaccaacagcaaagggaagagagcaucuaaggggggcaagauuugcggauucguggacgaaaggggcuuguacaagucucugaaaggagccuguaaacuuaagcuaugcggaguucccggacuuagacuuauggacggaaccuggguaucaauccaaacaucggaugagaccaaaugguguccuccugaucaauuggugaauguacaugacuuucacucagacgagauagaacaucucauuguggaggagcuagucaagaaaagggaagaaugucuagaugcacuggagucuaucaugaccacuaaauccgugaguuucagacgucucagccacuuaaggaaacuuguuccuggguuuggaaaggcauauacuauauucaacaaaaccuuaauggaagcugaugcccacuacaagucgguucggacuuggaaugagaucaucccuuccaaggggugccuaaaagucggagguaugugucauccucaugugggcgggguguuuuuuaaugguauaauucuagguccagacgggacugucuugaucccugaaaugcaaucguccuugcuccaacaacauauggagcuguuggaguccucugugaucccccugaugcaccccuuagcggacccgucaacgguuuucaaggaaggugaugaggcagaagacuuuguugagauucaccuuccagauguucacaagcaaaucucagggguugaccuuggucucccuagcugggggaaguaucuguugauaagugcaggugcucuggcaacacugauucugacaaucuucuuaauaacauguugcagaaaggucaauagaacagaaucaauacagcgaggucauggagaaucagaaaggaaagugucuguaaguccccaaaacgggagagucauauccuccugggagcuguacaaaaguggaggagaaaccaaucuguga

SEQ ID NO: 63302 - RNA, 1575 nt, Artificial Sequence
  derived and/or modified CDS sequence (wt) from glycoprotein__RABV__JQ685917.1
augaucccucaggcucuucuguaugugccucuccugaucuccucguuguguuucgggggauuccccaucuacacgauaccagacaagcucggccccuggagucccauugacauacaucaucucagcugucccaacaauuugguuguggaggacgaggggugcaccagucugucaggguuuucuuacauggaacugaaggugggguacauaucugccauaaaggugaacggguucacuuguacuggugucgugacagaagccgagaccuacaccaacuuuguugguuaugucaccaccacauucaagagaaaacacuuucgcccugugccagaugcaugcagagcugcauacaauuggaagguggccggugauccuagauaugaagaaucucuucaaaauccuuauccugacuacaguuggcuacggaccguaaagaccaccaaagagucucuuauuauuauaucuccaaguguagcggauuuggacccauacgacaaaucccuucauucaagaguuuucccuggugggaaguguuugggaauaacaaucucuucuaccuacugcucaacuaaccaugauuacaccaucuggaugccugaagaagcaagacucgggacaucuugugacauuuuuaccaacagcagagggaagagagcauccaaggggggcaagaccugcggauucguggacgaaaggggcuuguacaagucucuaaaaggagcauguaaacuuaagcugugcggaguucccggacucagacuuauggauggaaccugggucacaauucagacaucagaugaaaccaaaugguguccuucugaucaauugguaaaucuacaugacuuucacucagaugagauagaacaucuugucguggaggaguuggucaagaagagggaagaaugucuggaugcacuggaguccaucaugaccaccaaauccguaagcuucagacgucuuagccacuugagaaaacuuguuccuggguuuggaaaggcauauacuauauucaacaagaccuuaauggaggcugaugcucauuacaagucaauucggaccuggaacgagaucauccccucaaaagggugccuaaaagucggagggaggugucauccucauguggacggaguguucuucaaugguauaauucuggguccggacgggaauguccuaaucccugagaugcaaucgucccuacuucaacaacauguggagcuguuggaguccuccguaaucccucuaaugcaucccuuggcagacccaucaacagucuuuaaggacggugaugaagcggaggacuuuguugagguucaccuuccggauauucacaaacaggucucaggggucgaccuuggucucccagacugggggaaguaucugcuaaugagugcaggugcucuagcaacacuaaugcugacaaucuuuuuaaugauauguugcagaagagcuaaucgaacagaaucaauacaacgagaucccggggagucaggaaagaaaguaucgauaacuucccaagacgggaaagucauaucuucaugggaguuguacaagaguggaggcgagaccaggcuguga

SEQ ID NO: 63303 - RNA, 1575 nt, Artificial Sequence
  derived and/or modified CDS sequence (wt) from glycoprotein__RABV__JQ685918.1
augaucccucaaucucuucuguuuuugccucuccugauuuccucuuuguguuucggggaauuccccaucuacacgauaccagaaaaacuaggcccuuggagucccaucgacauacaucaccucaguugcccuaacaauuugguuguggaggacgagggaugcaacagucugucaggguuuucuuacauggaacugaaggugggauacaucucuuccauaaaagugaauggguucacuuguaccggagucgugacagaagcugagaccuacaccaacuucguugguuaugucaccaccacauucaagagaaaacacuuccguccgaugccagaugcaugcagagcugcauacaguuggaagauggccggagauccuagauacgaagagucucuucacaauccuuacccugauuaccauuggcuacgaacaguaaaaaccaccaaagagucucuuguuauuauaucgccaaguguggcugaucuggauccauacgacaaaucccuucacucaagggucuucucuggugggaagugucugggaauaacaaucucuuccaccuacugcuccacuaaccaugauuacacuaucuggaugccugaagaggcaagacuuggaaccucuugugacauuuuuacuaacagcaaagggaagagagcauccaagggagguaggacuugcggauucguggaugaaaggggauuauauaagucucuaaaaggggcaugcaaacuuaaacugugcggaguuccuggacuuagacuuauggauggaacuugggucucaauucagacaucaaaugagaccaaauggugcccuccugaucaacugguaaauauacaugauuuccgcucagaugagauagaacaucucgucguggaggaguuggucaagaagagggaagaaugccuggaugcacuggaguccauuaugaccaccaaaucaguaagcuucagacgucuuagccacuugagaaaacuugucccuggguucggaaaggcauauacuauauucaacaaaaccuuaauggaggcugacgcucacuacaagucaguucggacuuggaaugaggucauccccucaaaagggugccuaagcgucggagggaggugcuacccucaugugagcggaguguuuuucaaugguauaauucuggguccggacgggaguguccugauccccgaaaugcaaucaucccugcuucaacagcauauggagcuguuggagucuucuguaaucccccuaaugcaucccuuggcaaacccaucaacagucuucaaggacggugaugaggcggaggacuuuguugagguucaccuuccggacguuaaagaacaggucucagggguugaccucggucucccaaacugggggaaguaugugcugaugagugcaggugcucuggcuauccuaaugcuggcaauauucuuaaugacauguugcagaagggccaauagaacaaaaucaauacaacaagguccuagggagucaggaaggaaaguaucaguuccuccccaaaacgggaaagucauaucuucaugggagucguuuaagaguggaggcgaaaccaggcuguga

SEQ ID NO: 63304 - RNA, 1575 nt, Artificial Sequence
  derived and/or modified CDS sequence (wt) from glycoprotein__RABV__JQ685920.1
augaucccucaggcucuucuguuugugccuuuucuauuucccucguugugucucgggaaauuccccaucuacaccauaccggaaaagcucggcccuuggagucccaucgacauacaucaucucagcuguccuaacaauuugguuguggaggacgaggguugcgacagucugucaggguuuucuuacauggaacugaagguggguuacaucucugccauaaaggugaauggguucacuuguaccggugucgugacagaagcugagaccuacaccaacuuuguugguuaugucaccaccacguucaagagaaaacacuuccgcccuaugccagaugcaugcagagcugcguacaacuggaagacagccggugacccuagauaugaggagucucuucacaauccuuauccugauuaccauuggcuacggaccgugaaaaccaccaaagaaucucuuguuaucauaucgccgaguguggcugauuuggacccauaugacaaaucccuucauucaagaguuuucccuggugggaaauguuuggggauaacaaucucuuccaccuacugcucaacuaaccaugacuauacuaucuggaugcccgaagaagcaagacucgggacaucuugugacauuuuuaccaacagcaaagggaagagggcaucuaagggggguaggacuugcggauucguggaugaaaggggcuuauauaagucucuaaaaggggcauguaaacuuaagcugugcggaguuccuggacuuagacuuauggauggaacgugggucgcuauucagacaccaggugagaccaaauggugcucuccugaucagcugguaaaucuacaugacuuucguucagaugagauagaacaucucgucguggaggaguugaucaagaagagagaagaaugucuagaugcacuagaguccaucaugaccaccaaaucaguaagcuucagacgucucagcaacuugagaaaacuugucccuggguuuggaaaggcauacacuauauucaacaaaaccuugauggaggcugaugcucacuacaagucaguucggacuugggaugaaaucauucccucaaaggggugccuaagagucggagggaggugucauccucauguaaacggaguguuuuucaaugguauaauucuggguccggauggacauguccugauuccagagaugcaaucgucccuccuccaacagcauauggagcuguuggaauccucuguaaucccccuaauacaucccuuggccgacccaucaacagucuucaaagacggugaugaagcggaggacuuuguugagguucaccuuccggacguucacaagcaggucucaggggucgaucuuggucucccaaacugggggaaauaugugcugaugagugcagguguucuagcgaccgugauacugacaaucuucuuguuaacauguugcagaaggguuaacagaacaaaaccaaaacaacaaagucuuggggagucaggaaggaaaguaucgguuacuccucaaaaugggaaggucaugucuucaugggaguauuacaagagugagggcaggaccagucuguga

SEQ ID NO: 63305 - RNA, 1575 nt, Artificial Sequence
  derived and/or modified CDS sequence (wt) from glycoprotein__RABV__JQ685921.1
augauccuucaggcucuucuauuugugccuauccuuauuuccucguuuuguuucggggacuuccccaucuacacgauaccagagaaacuuggcccuuggagucccaucgacauacaucaucucagcugccccaacaaccuagucguggaagaugagggaugcagcagucugucaggguuuucuuacauggagcugaaggugggauacaucucugccauaaaggugaauggguucaccuguaccggugucgugacagaggcugagaccuacaccaauuuuguagguuaugucaccaccacguuuaagaggaagcacuuccguccgaugccagaugcaugcagagccgcauacaacuggaagacagccggugauccuagauaugaagagucccuucaaaaucccuauccugauuaccauuggcuacggacaguaaaaaccaccaaagagucucucguuaucauaucaccaaguguggcugauuuggaucccuacgauaaaucccuucauucaagagucuucucagaugggaaguguuugggaauaacaaucucuucuaccuacugcuccacuaaucaugauuacacuaucuggaugcccgaggaagcaagacuuggaacgucuugugacaucuucacaaccagcagagggaagagagccucuaaagggggcaagacuugcggauucguugaugaaagggguuuauauaagucucucaaaggggcauguaagcucaaacugugcggaguuucugggcuuagacuuauggauggaaccuggguaucaauucaggcaccagacgaggccaaauggugcucuacugaucaacuggugaauauacaugauauucgcucggaugagauagaacaucuuguuguagaggaguuggucaagaagagggaagagugucuggaugcauuggagucuauuaugaccaccaaaucgguaagcuucaggcgucucagccacuugagaaaacuuguuccuggguucggaaaggcauauacuauauucaacaagacauugauggaggcugaugcucacuacaagucaguucggacuuggagugaggucaucccaucgaaagggugccuaagugucggaggaaggugucauccccaugagaacggaguguuuuucaaugguauaauucuggguccugaugggagugucuugaucccggagaugcaaucuucccuacuucaacagcauauggagcuguuagaaucaucuguaaucccccuaaugcaucccuuggcaaacccaucaacggucuucaaggauggugacgaggcggaggacuuuguugaaguucaccuuccagacguucaagaacagaucucagggguugaccuuggucucccaaacugggggaaguaugugaugaugagugcaggugcucuggcgauccuaaugcugacaaucuucuugaugacauguugcagaagagcuaauagaacaagaucaacacaacgagaucuugggggguuagaaaggaaaguaucgguuccucccaaagaugggagagucaugucuucaugggagucauacaaaaguggaggugagacuagucuguaa

SEQ ID NO: 63306 - RNA, 1575 nt, Artificial Sequence
  derived and/or modified CDS sequence (wt) from glycoprotein__RABV__JQ685922.1
augaucccccaggcucuucuguuugugccucuccugauucccucgcugugucucgggaaguuccccaucuacacgauaccagauaagcuuggccccuggagcccgaucgacauacaucaucucagcugucccaacaauuugguuguggaagacgaagggugcaccagucugucaggguucuccuauauggaacugaaggugggauacaucucagccauaaaggugaacggguucacuuguaccgguguugugacagaagccgagaccuacaccaacuuugucgguuaugucaccaccacauuuaagagaaaacacuuccgcccgaugccagaugccugcagagcugcacacgacuggaagauagccggcgauccuagauaugaagauucucuucaaaacccuuauccugauuaccauuggcuacggaccguaaagaccaccaaggagucucucguuauuauaucuccgaguguggcugaguuggaccccuacgacaaaucccuucauucaagaguuuuccccagugggaaguguuuggggauaacagucucuucuaccuauugcucaacuaaccacgauuacaccaucuggaugcccguagaagcaagacuugggacaucuugugauauuuucaccaauagcagagggaagaaagcaucuaaggggggcaggacuugcggauuuguagaugaaaggggcuuguacaagucucugaaaggagcaugcaaacucaagcuaugcggaguccccgggcuccggcugauggauggaaccugggucucaauccagacaucagaugauauuaaauggugcccuccugaucaauuggugaaucuacaugacuuucacucagaugaaauagaacaucucgucguagaggaauugaucaagaaaagggaaggauguuuagaugcacuggaguccauaaugaccacuaaaucagugagcuucagacgucucagccacuugagaaagcuuguuccuggguuugggaaggcauacaccauauucaauaauaccuuaauggaagcugaugcucauuacaagucaguucggacuuggaacgaagucauccccucaaaagguugccuaaaagucggagggaggugucaucccccugugaacggaguauucuucaaugguauaauuuuggguccagaugggaauguucugaucccugagaugcaaucgucccugcuucaacaacauauggaacuguuggaguccucuguuauuccucugaugcaccccuuggcagacccaucaacagucuucaaagacggugaugaggcggaagacuuuguugagguucaucuuccggauguucacaaacaggucucggauguugaccuuggucuuccgaguugggggaaguaucuguugaugagcgcaggugcucuggcaacacugauucuggcgaucuucuuaauaacauguuguaggagggccaauaggacagaaucaacacagagaggucauagggagucaggagggaaagugucaguagccccucaaaacgggaaaaucauauccucaugggaguuguacaaaagugaaagugagaccgggauguga

SEQ ID NO: 63307 - RNA, 1575 nt, Artificial Sequence
  derived and/or modified CDS sequence (wt) from glycoprotein__RABV__JQ685923.1
augaucccucaggcucuucuguaugugccucuccugauccccucguuguguuucgggggauuccccaucuacacgauaccagacaagcucggccccuggagucccauugauauacaucaucucagcugucccaacaauuugguuguggaggacgaggggugcaccagucugucaggguuuucuuacauggaacugaaggugggguacaucucugccauaaaggugaacggguucacuuguacuggugucgugacagaggccgagaccuacaccaacuuuguugguuaugucaccaccacauucaagagaaaacacuuucgcccuaugccagaugcaugcagagcugcauacaauuggaagguggccggugauccuagauaugaagaaucucuucaaaauccuuauccugacuacaguuggcuacggaccguaaagaccaccaaagagucucuuauuauuauaucuccaaguguagcggauuuggacccauacgacaaaucccuucauucaagaguuuucccuggugggaaguguuugggaauaacaaucucuucuaccuacugcucaacuaaccaugauuacaccaucuggaugccugaagaagcaagacucgggacaucuugugacauuuuuaccaacagcagagggaagagagcauccaaggggggcaagaccugcggauucguggacgaaaggggcuuguacaagucucuaaaaggagcauguaaacuuaagcugugcggaguucccggacucagacuuauggauggaaccugggucacaauucagacaucagaugaaaccaaauggugcccuucugaucaauugguaaaucuacaugacuuucacucagaugagauagaacaucuugucguggaggaguuggucaagaagagggaagaaugucuggaugcacuggaguccaucaugaccaccaaauccguaagcuucagacgucuuagccacuugagaaaacuuguuccuggguuuggaaaggcauauacuauauucaacaagaccuuaauggaagcugaugcucauuacaagucaauucggaccuggaacgagaucauccccucaaaagggugccuaaaagucggagggaggugucauccgcauguggacggaguguucuucaaugguauaauucuggguccggacgggaauguccuaaucccugagaugcaaucgucccuacuucaacaacauguggagcuguuggaguccucuguaaucccucuaaugcaucccuuggcagacccaucaacagucuuuaaggacggugaugaagcggaggacuuuguugagguucaccuuccggauauucacaaacaggucucaggggucgaccuuggucucccaaacugggggaaguaucugcuaaugagugcaggugcucuggcaacacuaaugcugacaaucuuuuuaaugacauguugcagaagagcuaaucgaacagaaucaauacaacgagaucccggggagucaggaaagaaaguaucgauaacuucccaagacgggaaagucauaucuucuugggaguuguacaagaguggaggcgagaccaggcuguga

SEQ ID NO: 63308 - RNA, 1575 nt, Artificial Sequence
  derived and/or modified CDS sequence (wt) from glycoprotein__RABV__JQ685925.1
augaucccucaggcucuuuugucugugccucuucuaauuuccucguuguguuucgggaaauuccccaucuacacgauaccagagaagcucggcccuuggagucccaucgacauacaucaccucagcuguccuaacaauuugguuguggaggaugagggaugcaacagucugucaggguuuucuuacauggaacugaaggugggauacaucucugccauaaaaguuaauggguucacuuguacugguguugugacagaagcugagaccuacaccaacuuuguugguuacgucaccaccacauucaagagaaaacacuuccgcccuaugccggaugcaugcagagccgcauauaacuggaagacggccggcgauccuagauaugaagagucccuucacaauccuuauccugauuaccauuggcuaaggacuguaaaaaccaccaaagaaucccuuauuaucauaucgccaaguguggcugauuuggaccccuacgacaaaucucuucauucaagaaucuucccuggugggaaaugcuugggaauaacaaucucuuccaccuacuguucaacuaaucaugauuauacuaucuggaugcccgaagaagcaagacucgggacaucuugugacauuuuuaccaacagcaaagggaagagagcuuccaagggggguaggacuuguggauucguggaugaacggggcuuguauaagucucuaaaaggggcauguaaacuuaagcugugcggaguuccuggacucagacuuauggauggaacgugggucgcuauucagacaccaaaugagaccaaauggugcucuccugaucagcuggugaauguacaugacuuucgcucagaugagauagaacaucucgucguggaggaguugaucaggaaaagggaagaaugucuagaugcacuggaguccaucaugacuacaaaaucaguaagcuucaggcgucucagcaacuugagaaaacuuguuccuggguuuggaaaggcauauacuauauucaacaaaaccuugauggaggcugaugcucacuacaagucaguucggacuuggaaugaaaucauccccucaagagggugccugaaagucggagggaggugucauccucaugugaauggaguguuuuucaaugguauaauuuuggguccggaugggcauauccugauuccggagaugcaaucaucccuccuccaacagcauauggagcuguuagaauccucuguaauccccuuaauacauccucuggcagacccaucaacagucuucaaggacggugaugaggcggaggacuuuguugagguucaccuuccggacguucaccaacaggucucagggguugaccucggucucccagacugggggaaguaugugcugaugagugcaggugcucuagcgaccgugaugcugacaauauucuugauaaccuguugcagaagggucaagagaacagaaucaguacaacaaggucuuggugagucaggaaggaaagugucgguagcuccccaaaacggaaaagucauguccucaugggaauauuacaagaguggaggcgggaccaggcuguga

SEQ ID NO: 63309 - RNA, 1575 nt, Artificial Sequence
  derived and/or modified CDS sequence (wt) from glycoprotein__RABV__JQ685926.1
augaucccucaggcucuucuguaugugccucuccugauccccucguuguguuuagggggauuccccaucuacacgauaccagacaagcucggccccuggagucccauugauauacaucaucucagcugucccaacaauuugguuguggaggacgaggggugcaccagucugucaggguuuucuuacauggaacugaaggugggguacaucucugccauaaaggugaacggguucacuuguacuggugucgugacagaggccgagaccuacaccaacuuuguugguuaugucaccaccacauucaagagaaaacacuuucgcccuaugccagaugcaugcagagcugcauacaauuggaagguggccggugauccuagauaugaagaaucucuucaaaauccuuauccugacuacaguuggcuacggaccguaaugaccaccaaagagucucuuauuauuauaucuccaaguguagcggauuuggacccauacgacaaaucccuucauucaagaguuuucccuggugggaaguguuugggaauaacaaucuuuucuaccuacugcucaacuaaccaugauuacaccaucuggaugccugaagaagcaagacucgggacaucuugugacauuuuuaccaacagcagagggaagagagcauccaaggggggcaagaccugcggauucguggacgaaaggggcuuguacaagucucuaaaaggagcauguaaacuuaagcugugcggaguucccggacucagacuuauggauggaaccugggucacaauucagacaucagaugaaaccaaauggugcccuucugaucaauugguaaaucuacaugacuuucacucagaugagauagaacaucuugucguggaggaguuggucaagaagagggaagaaugucuggaugcacuggaguccaucaugaccaccaaauccguaagcuucagacgucuuagccacuugagaaaacuuguuccuggguuuggaaaggcauauacuauauucaacaagaccuuaauggaagcugaugcucauuacaagucaauucggaccuggaacgagaucauccccucaaaagggugccuaaaagucggagggaggugucauccgcauguggacggaguguucuucaaugguauaauucuggguccggacgggaauguccuaaucccugagaugcaaucgucccuacuucaacaacauguggagcuguuggaguccucuguaaucccucuaaugcaucccuuggcagacccaucaacagucuuuaaggacggugaugaagcggaggacuuuguugagguucaccuuccggauauucacaaacaggucucaggggucgaccuuggucucccaaacugggggaaguaucugcuaaugagugcaggugcucuggcaacacuaaugcugacaaucuuuuuaaugacauguugcagaagagcuaaucgaacagaaucaauacaacgagaucccggggagucaggaaagaaaguaucgguaacuucccaagacgggaaagucauaucuucaugggaguuguacaagaguggaggcgagaccaggcuguga

SEQ ID NO: 63310 - RNA, 1575 nt, Artificial Sequence
  derived and/or modified CDS sequence (wt) from glycoprotein__RABV__JQ685928.1
augaucccucaggcucuucuguaugugccucuccugaucuccucguuguguuucgggggauuccccaucuacacgauaccagacaagcucggccccuggagucccauugacauacaucaucucagcugucccaacaauuugguuguggaggacgaggggugcaccagucugucaggguuuucuuacauggaacugaaggugggguacaucucugccauaaaggugaauggguucacuuguacuggugucgugacagaagccgagaccuacaccaacuuuguugguuaugucaccacuacauucaagagaaaacacuuucgcccuaugccagacgcaugcagagcugcauacaauuggaagauggccggugauccuagauaugaagaaucucuucaaaauccuuauccugacuacaguuggcuacggaccguaaagaccaccaaagagucucuuauuaucauaucuccaaguguagcggauuuggacccauacgacaaaucccuucauucaagaguuuucccuggugggaaguguuugggaauaacaaucucuucuaccuacugcucaacuaaccaugauuacaccaucuggaugccugaagaagcaagacucgggacuucuugugacauuuuuaccaacagcagagggaagagagcauccaaggggggcaagaccugcggauucguggacgaaaggggcuuguacaagucucuaaaaggagcauguaaacuuaagcugugcggaguucccggacucagacuuauggauggaaccugggucacaauucagacaucagaugaaaccaaauggugcccuucugaucaauugguaaaucuacaugacuuucacucagaugagauagaacaucuugucguggaggaguuggucaagaagagggaagaaugucuggaugcacuggaguccaucaugaccaccaaauccguaagcuucagacgucuuagccacuugagaaaacuuguuccuggguuuggaaaggcauauacuauauucaacaagaccuuaauggaagcugacgcucauuacaagucaauucggaccuggaacgaaaucauccccucaaaagggugccuaaaagucggagggaggugucauccucauguggacggaguguucuucaaugguauaauucuggguccggacgggaauguccugaucccugagaugcaaucgucccuacuucaacaacauguggagcuguuggaguccucuguaaucccucuaaugcaucccuuggcagacccaucaacagucuuuaaggauggugaugaagcggaggacuuuguugagguucaccuuccggauauucacaaacaggucucaggggucgaccuuggucucccaaacugggggaaguaucugcuaaugagugcaggugcucuggcaacacuaaugcugauaaucuucuuaauggcauguugcagaagagcuaaucgaacagaaucaauacaacgagaucccggggagucaggaaggaaaguaucgauaccuucccaagacgggaaagucauaucuucaugggaguuguacaagaguggaggcgagaccaggcuguga

SEQ ID NO: 63311 - RNA, 1575 nt, Artificial Sequence
  derived and/or modified CDS sequence (wt) from glycoprotein__RABV__JQ685929.1
augguuccucaagcucuccuauuugugccucuucugaucccaccagugugccuggggaaguucccgaucuacacaaucccagacaagcuagguccuuggaguccuauugauauacaucaucucaguuguccuaacaaucugguuguugaagaugagggaugcaguaaucuaucaggguuuucuuacauggaauugaagguaggauauauuucugccauaaaaguggacggauucacuugcacuggcgugguuacagaagcugagaccuacacuaauuuuauugguuaugucacuacaacauucaagagaaaacacuuccgcccgaugccugaugccugcagaucugcauauaacuggaaaauagcaggugaucccagguaugaagagucccuucauacuccuuauccugauuaucauuggcugagaacugugaaaaccaccaaagagucccuugucaucauaucaccaaguguggcugaccuggacccauaugacaagucccuucauucaaugguuuucccuaaugggaaauguucgggaauaacggucuacucuacuuacugcucaacuaaccacgauuauaccaucuggaugcccgagaaagcaggacucgggacauccugugacaucuuuaccaacagcagggggaagagggcauccaaaggaggcaggacuugcggauuuguggaugaaagaggcuuguauaagucucugagaggagcauguaagcucaaauuaugcggagugccuggacucagacucauggaugggacuugggccacaauccagacaccggaagagaccaaaugguguucucccgaccagcuggugaaucugcaugauuuucauucagaugagauagagcaucuuguuguggaggaccuggucaagaaaagagaggaaugucuggauacacuagagucuauuaugaccacuaaaucagucaguuucagacgucucagccacuugaggaaacuuguuccuggguucgggaaagcauauacuauauucaacaagaccuugauggaggcugaugcccacuacaagucggugcggacuuggaacgagauuauccccucaaaagggugucugagagugggagggagaugucauccucaugugaauggaguguucuucaauggugugauuauggguccugacggucauguccugaucccagagaugcaaucaucccuucuccaacaacauauggagcugcuggagucgucuguaaucccccuaauacauccucuggcagacccauccacagucuucaaagacaaugaugaggcugaggacuuuguugaaguucaccuuccugauguucacaaacaagucucuggaauagaccucggccuccccagcuggggaagguauuuggugaugauugccggugcucugaugacucuaacucugguaaucuucuugaugauauguugcaggagagucaacaaagcaggaucaauacaacaggauccugagaagucagaaaagagaagaucaguuacuccccagaacgggaaggucauaucuucaugggaguccuauaagaguggaagcgaaacucggcuguga

SEQ ID NO: 63312 - RNA, 1575 nt, Artificial Sequence
  derived and/or modified CDS sequence (wt) from glycoprotein__RABV__JQ685931.1
augaucccucaggcucuucucuuugugccucuccugauuuccucguugugcuucgggggauuccccaucuacacgauaccugacaagcucggacccuggagucccaucgacauacaucaucucagcuguccuaacaauuuggucguggaagacgaggggugcaccagucugucgggguuuucuuacauggaacugaaggugggauacaucuccgccauaaaagugaacggguucacuuguaccggugucgugacagaagccgaaaccuacacaaacuuuguugguuaugucaccaccacauucaagagaaaacacuuucgcccgaugccggaugcaugcagagcugcauacaacuggaagacggccggugauccucgauaugaagagucucuucaaaauccuuauccagauuaccauuggcuacggaccguaaagaccaccaaagagucucucauuaucauaucucccaguguagcggauuuggacccauacgacaaaucccuucauucaagaguuuucccuggugggaaguguuugggaauaacagucucuucuaccuacuguucaacuaaccaugauuacacuaucuggaugccugaagaagcaagacucgggacaucuugugauauuuuuaccaacagcagagggaagagagcauccaaggggggcaggacuugcggauucguggacgaaagggguuuguauaagucucuaaaaggggcauguaaacuuaagcugugcggaguucucggacuuagacuuauggauggaaccugggucacaauucagacuucaaacgaaaccaaauggugcccuucugaucaauugguaaaucuacaugacuuucacucagaugagauagaacaucucgucguggaggaguuggucaagaagagggaagaaugucuggaugcacuagaguccaucaugaccacuaaauccgugagcuucagacgucucagccacuugagaaaacuuguuccuggguuuggaaaggcauauacuauauucaacaagaccuuaauggaagcugaugcucacuacaagucaauucggacuuggaacgagaucauccccucaaaagggugccuaaaagucggagggaggugucauccucauguggacggaguguuuuucaaugguauaauucuagguccggacgggaauguuuugaucccugagaugcaaucgucccuacuucaacaacauguggagcuguuggaguccucuguaaucccucuaaugcaucccuuggcagacccaucaacagucuucaaggacggugaugaagcggaggacuuuguugagguucaccuuccagauguucacaaacaagucucagggguugaccuuggucucccaaacugggggaaguaucugcugaugagugcaggugcucuggcuacacuaaugcugacgaucuucuuaauaacauguugcagaagagucgauagaacagaaucaauacaacgagguccaggggaguuaggaagggaagugucggugacuucccaaaacgggaaagucauaucuucaugggaguuguacaagaguggaggcgagaccaggcuguga

SEQ ID NO: 63313 - RNA, 1575 nt, Artificial Sequence
  derived and/or modified CDS sequence (wt) from glycoprotein__RABV__JQ685932.1
augaucccucaggcucuucuguaugugccucuccugauccccucguuguguuucgggggauuccccaucuacacgauaccagacaagcucggccccuggagucccauugauauacaucaucucagcugucccaacaauuugguuguggaggacgaggggugcaccagucugucaggguuuucuuacauggaacugaaggugggguacaucucugccauaaaggugaacggguucacuuguacuggugucgugacagaggccgagaccuacaccaacuuuguugguuaugucaccacuacauucaagagaaaacacuuucgcccuaugccagaugcaugcagagcugcauacaauuggaagguggccggugauccuagauaugaagaaucucuucaaaauccuuauccugacuacaguuggcuacggaccguaaagaccaccaaagagucucuuauuauuauaucuccaaguguagcggauuuggacccauacgauaaaucccuucauucaagaguuuucccuggugggaaguguuugggaauaacaaucucuucuaccuacugcucaacuaaccaugauuacaccaucuggaugccugaagaagcaagacucgggacaucuugugacauuuuuaccaacagcagagggaagagagcauccaaggggggcaagaccugcggauucguggacgagaggggcuuguacaagucucuaaaaggagcauguaaacuuaagcugugcggaguucccggacucagacuuauggauggaaccugggucacaauucagacaucagaugaaaccaaauggugcccuucugaucaauugguaaaucuacaugacuuucacucagaugagauagaacaucuugucguggaggaguuggucaagaagagggaagaaugucuggaugcacuggaguccaucaugaccaccaaauccguaagcuucagacgucuuagccacuugagaaaacuuguuccuggguuuggaaaggcauauacuauauucaacaagaccuuaauggaagcugaugcucauuacaagucaauucggaccuggaacgagaucauccccucaaaagggugccuaaaagucggagggaggugucauccgcauguggacggaguguucuucaaugguauaauucuggguccggacgggaauguccuaaucccugagaugcaaucgucccuacuucaacaacauguggagcuguuggaguccucuguaaucccucuaaugcaucccuuggcagacccaucaacagucuuuaaggacggugaugaagcggaggacuuuguugagguucaccuuccggauauucacaaacaggucucaggggucgaccuuggucucccaaacugggggaaguaucugcuaaugagugcaggugcucuggcaacacuaaugcugacaaucuuuuuaaugacauguugcagaagagcuaaucgaacagaaucaauacaacgagaucccggggagucaggaaagaaaguaucgauaacuucccaagacgggaaagucauaucuucuugggaguuguacaagaguggaggcgagaccaggcuguga

SEQ ID NO: 63314 - RNA, 1575 nt, Artificial Sequence
  derived and/or modified CDS sequence (wt) from glycoprotein__RABV__JQ685933.1
augaucccucaggcucuucuuuaugugccucuccuaauccccucguuguguuucgggggauuccccaucuacacgauaccagacaagcuuggccccuggagucccauugacauacaucaucucagcugucccaacaauuugguuguggaggacgaggggugcaccagucugucaggguuuucuuacauggaacugaaggugggguacaucucugccauaaaggugaacggguucacuuguacuggugucgugacagaagccgagacuuacaccaacuuuguugguuaugucaccaccacauucaagagaaaacacuuucgcccuaugccagaugcaugcagagcugcauacaauuggaagauggccggugauccuagauaugaagaaucucuucaaaauccuuauccugacuacagcuggcuacggaccguaaagaccaccaaagagucucuuauuaucauaucuccaaguguagcggauuuggacccauacgacaaaucccuucauucaagaguuuucccuggugggaaguguuugggaauaacaaucucuucuaccuacugcucaacuaaccaugauuacaccaucuggaugccugaagaagcaagacucgggacaucuugugacauuuuuaccaacagcagagggaagagagcauccaaggggggcaagaccugcggauucguggacgaaaggggcuuguacaagucucuaaaaggagcauguaaacuuaagcugugcggaguucccggacucagacuuauggauggaacuugggucacaauucagacaucagaugaaaccaaauggugcccuucugaucaauugguaaaucuacaugacuuucacucagaugagauagaacaucuugucguggaggaguuggucaagaagagggaagaaugucuggaugcacuggaguccaucaugaccaccaaauccguaagcuucagacgucuuagccacuugagaaaacuuguuccuggguuuggaaaggcauauacuauauucaacaagaccuuaauggaagcugaugcucauuacaagucaauucggaccuggaacgagaucauccccucaaaagggugccuaaaagucggagggaggugucauccucauguggacggaguguucuucaaugguauaauucuggguccggacggaaauguccugaucccugagaugcaaucgucccuacuccaacaacauguggagcugcuggaguccucuguaaucccucuaaugcaucccuuggcagacccaucaacagucuuuaaggacggugaugaagcggaggacuuuguugagguucaccuuccggauauucacaaacaggucucaggggucgaccuuggucucccaaacugggggaaguaucugcuaaugagugcaggugcucuggcaacacuaaugcugauaauccucuuaaugacauguugcagaagagcuaaucgaacagaaucaauacaacgagaucccggggagucagggaggaaaguaucgauaacuuccccagaugggaaagucauaucuucaugggaguuguacaagaguggaggcgagaccaggcuguga

SEQ ID NO: 63315 - RNA, 1575 nt, Artificial Sequence
  derived and/or modified CDS sequence (wt) from glycoprotein__RABV__JQ685934.1
augaucccucaggcucuucuguaugugccucuccugaucuccucguuguguuucgggggauuccccaucuacacgauaccagacaagcucggccccuggagucccauugacauacaucaucucagcugucccaacaauuugguuguggaggacgaggggugcaccagucugucaggguuuucuuacauggaacugaaggugggguacaucucugccauaaaggugaauggguucacuuguacuggugucgugacagaagccgagaccuacaccaacuuuguugguuaugucaccacuacauucaagagaaaacacuuucgcccuaugccagacgcaugcagagcugcauacaauuggaagauggccggugauccuagauaugaagaaucucuucaaaauccuuauccugacuacaguuggcuacggaccguaaagaccaccaaagagucucuuauuaucauaucuccaaguguagcggauuuggacccauacgacaaaucccuucauucaagaguuuucccuggugggaaguguuugggaauaacaaucucuucuaccuacugcucaacuaaccaugauuacaccaucuggaugccugaagaagcaagacucgggacuucuugugacauuuuuaccaacagcagagggaagagagcauccaaggggggcaagaccugcggauucguggacgaaaggggcuuguacaagucucuaaaaggagcauguaaacuuaagcugugcggaguucccggacucagacuuauggauggaaccugggucacaauucagacaucagaugaaaccaaauggugcccuucugaucaauugguaaaucuacaugacuuucacucagaugagauagaacaucuugucguggaggaguuggucaagaagagggaagaaugucuggaugcacuggaguccaucaugaccaccaaauccguaagcuucaaacgucuuagccacuugagaaaacuuguuccuggguuuggaaaggcauauacuauauucaacaagaccuuaauggaagcugaugcucauuacaagucaauucggaccuggaacgaaaucauccccucaaaagggugccuaaaagucggagggaggugucauccucauguggacggaguguucuucaaugguauaauucuggguccggacgggaauguccugaucccugagaugcaaucgucccuacuucaacaacauguggagcuguuggaguccucuguaaucccucuaaugcaucccuuggcagacccaucaacagucuuuaaggacggugaugaagcggaggacuuuguugagguucaccuuccggauauucacaaacaggucucaggggucgaccuuggucucccaaacugggggaaguaucugcuaaugagugcaggugcucuggcaacacuaaugcugauaaucuucuuaauggcauguugcagaagagcuaaucgaacagaaucaauacaacgagaucccggggagucaggaaggaaaguaucgauaccuucccaagacgggaaagucauaucuucaugggaguuguacaagaguggaggcgagaccaggcuguga

SEQ ID NO: 63316 - RNA, 1575 nt, Artificial Sequence
  derived and/or modified CDS sequence (wt) from glycoprotein__RABV__JQ685936.1
augauccuucaggcccuucuuuuugugccucuccugaucucuccguugugucucgggaaauuccccaucuacacaauaccagacaagcuugguccuuggagucccaucgauauacaucaccucagcuguccaaauaauuuaguuguggaggacgagggaugcaccaaucuaucaggguucucuuacauggagcuaaaggugggauacaucucugccauaaaggugaacggguucacuuguaccgguguugugacagaggcugagaccuauaccaacuuuguugguuaugucaccacaacauucaagaggaaacauuuucgcccuauaccggaugcaugcagggcagcauacaacuggaagauggcuggugauccuagauaugaggagucucuucaaaauccuuauccugaguaccauugguugcggaccguaaagaccacuaaggagucucuuauuaucauaucuccgaguguggcugauuuagacccauacgacaaaucccuucauucuaggguguucccuggugggaaguguuugggaauaacgguuucuuccaccuacugcucaaccaaccacgauuacaccaucuggaugccugaggaaccaagacucgggacaucuugcgacauuuuuacuagcagcaaggggaaaaaggcaucuaaaggagguaagacuugcggauuuguggaugaaaggggcuuguacaagucucuaaaaggagccuguaaacucaagcugugcggaguucucggacuuagacuuauggacggaaccuggguuucaauucaaacaucagacgacaccaaauggugcccuccggaucaacuggugaaucuacaugacuuucacucagacgaaauagagcaucuugucguagaggaguuggucaagaagagggaagagugucuggacgcauuggaguccaucaugaccaccaaaucuguaaguuuuagacgucucaguuacuugagaaaacuuguccccggguuuggaaaggcauacacuauauucaacaagacccugauggaggccgacgcccacuacaagucaguucggacuuggaacgagaucauccccucaaaaggguguuugaaagucagagagaggugucauccuccuguggauggaguguucuucaauggcauaauuuuggguccggacgggaacguccugauaccugagaugcaaucgucucuacuucaacaacauauggagcuauuggagucuucuguaauccccuuaaugcaucccuuggcggacccaucaacagucuucaaggaaggggaugaagcggaggacuucguugaaguucaccucccagauguucacaaacagaucucagggguugaccuuggucucccgaguugggggaaauaucuccugaugauugcagguggucuggugacgcuaguccugauaaucugcucgauugcaugcuguagaagagccaagcgaacagagucaagaagacgaggcucuggagagucaggaaagaagguaaaugcaaccccccagacuaggaaaguuguaucuucaugggaguuguacaagagggaaggcgaugccaggcuguga

SEQ ID NO: 63317 - RNA, 1575 nt, Artificial Sequence
  derived and/or modified CDS sequence (wt) from glycoprotein__RABV__JQ685938.1
augguucuucaggcccuucuguucgcaccuuuucugauuucaucguugugccuuggaaaguucccuaucuauacgauaccagacaagcucggcccuuggagcccuaucgauauacaucaucucagcugucccaacaaucuaguuguagaagacgaggggugcaacagucuaucaggaauuucuuacauggaacugaaagugggauauaucuccgccauaaaggugaacggguucaccuguacuggugucgugacugaagcugagacuuacaccaacuucguugguuaugucaccaccacauucaagagaaaacacuuucauccgaugccggaugcguguagaucugcauacaacuggaaacuggcaggcgauccucguuaugaagagucccuucaaaacccauaucccgauuaccacuggcugcggaccguaaaaaccaccaaggagucucuuaucaucauaucgcccaguguggcugaccuggauccauaugacaaaucucuccacucaaggauuuuuccuagugggaaaugcucagggaugacuauuucuucuaccuacugcucaacuaaccacgaauacacuauauggaugcccgaaaaggcaggucucgggacgucuugugacauauuuaccaccagcaagggaaagagagcguccaaaggaggaaagaccuguggguuuguggaugaaagaggcuuauacaaguccuugaagggggcauguaagcucaagcuauguggggucuccgggcucagacuaauggaugggacuuggguugcaauccagacaucagaagagaccaagugguguccuccugaucaguuggugaaucugcaugaccuucacucagaugagauagagcaucuuguugucgaggaguuggucaagaaaagggaggagugcuuagaugcauuagaaucuaucaugaccacuaaaucaguaaguuucagacgucucagccacuugagaaaacuuguuccaggcuuugggaaagcauauacgauauucaacaaaaccuuaauggaagcggacgcccacuacaagucaaucagaacuuggaaugagauaauccccucaaaaggguguuugagagucggggggaagugucauccucaugugaaugggguguucuucaacggcauaauacuggguccggacgggcauguccugaucccagagaugcagucgucucuucuccaacagcauauggaacuguuggagucuucugugaucccccugaugcauccccuggcagaccucucaacagucuuuaaggauggugaugaagcagaagacuucguugaaguucaucuuccggauguucacaaacagaucucagggguggaucuuggccucccgagcuggggaaaguaugugcuaaugagugcaggugccuuggcaauccuaauguuggugaucucuuuaaugaaauguuucuggggggucaacagaacaaaaccaauacaacaggguccuagagaaucagaacgaaagguaucaauugcuccccagagcaggaaaguuauaucuucuugggagucuuauaagaguggaggggagacugaacuguaa

SEQ ID NO: 63318 - RNA, 1575 nt, Artificial Sequence
  derived and/or modified CDS sequence (wt) from glycoprotein__RABV__JQ685940.1
augaucccucaggcucuucuguaugugccucuccugauccccucguuguguuucgggggauuccccaucuacacgauaccagacaagcucggccccuggagucccauugauauacaucaucucagcugucccaacaauuugguuguggaggacgaggggugcaccagucugucaggguuuucuuacauggaacugaaggugggguacaucucugccauaaaggugaacggguucacuuguacuggugucgugacagaggccgagaccuacaccaacuuuguugguuaugucaccaccacauucaagagaaaacacuuucgcccuaugccagaugcaugcagagcugcauacaauuggaagguggccggugauccuagauaugaagaaucucuucaaaauccuuauccugacuacaguuggcuacggaccguaaagaccaccaaagagucucuuauuauuauaucuccaaguguagcggauuuggacccauacgacaaaucccuucauucaagaguuuucccuggugggaaguguuugggaauaacaaucucuucuaccuacugcucaacuaaccaugauuacaccaucuggaugccugaagaagcgagacucgggacaucuugugacauuuuuaccaacagcagagggaagagagcauccaaggggggcaagaccugcggauucguggacgaaaggggcuuguacaagucucuaaaaggagcauguaaacuuaagcugugcggaguucccggacucagacuuauggauggaaccugggucacaauucagacaucagaugaaaccaaauggugcccuucugaucaauugguaaaucuacaugacuuucacucagaugagauagaacaucuugucguggaggaguuggucaagaagagggaagaaugucuggaugcacuggaguccaucaugaccaccaaauccguaagcuucagacgucuuagccacuugagaaaacuuguuccuggguuuggaaaggcauauacuauauucaacaagaccuuaauggaagcugaugcucauuacaagucaauucggaccuggaacgagaucauccccucaaaagggugccuaaaagucggagggaggugucauccgcauguggacggaguguucuucaaugguauaauucuggguccggacgggaauguccuaaucccugagaugcaaucgucccuacuucaacaacauguggagcuguuggaguccucuguaaucccucuaaugcaucccuuggcagacccaucaacagucuuuaaggacggugaugaagcggaggacuuuguugagguucaccuuccggauauucacaaacaggucucaggggucgaccuuggucucccaaacugggggaaguaucugcuaaugagugcaggugcucuggcaacacuaaugcugacaaucuuuuuaauaacauguugcagaagaucuaaucgaacagaaucaauacaacgagaucccggggagucaggaaagaaaguaucgauaacuucccaagacgggaaagucauaucuucaugggaguuguacaagaguggaggcgagaccaggcuguga

SEQ ID NO: 63319 - RNA, 1575 nt, Artificial Sequence
  derived and/or modified CDS sequence (wt) from glycoprotein__RABV__JQ685941.1
augaucccucaggcucuucuguaugugccucuccugaucuccucguuguguuucgggggauuccccaucuacacgauaccagacaagcucggccccuggagucccauugacauacaucaucucagcugucccaacaauuugguuguggaggacgaggggugcaccagucugucaggguuuucuuacauggaacugaaggugggguacaucucugccauaaaggugaacggguucacuuguacuggugucgugacagaagccgagaccuacaccaacuuuguugguuaugucaccacuacauucaagagaaaacacuuucgcccuaugccagaugcaugcagagcugcauacaauuggaagauggccggugauccuagauaugaagaaucucuucaaaauccuuauccugacuacaguuggcuacggaccguaaagaccaccaaagagucucuuauuaucauaucuccaaguguagcggauuuggacccauacgacaaaucccuucauucaagaguuuucccuggugggaaguguuugggaauaacaaucucuucuaccuacugcucaacuaaccaugauuacaccaucuggaugccugaagaagcaagacucgggacuucuugugacauuuuuaccaacagcagagggaagagagcauccaaggggggcaagaccugcggauucguggacgaaaggggcuuguacaagucucuaaaaggagcauguaaacuuaagcugugcggaguucccggacucagacuuauggauggaaccugggucacaauucagacaucagaugaaaccaaauggugcccuucugaucaauugguaaaucuacaugacuuucacucagaugagauagaacaucuugucguggaggaguuggucaagaagagggaagaaugucuggaugcacuggaguccaucaugaccaccaaauccguaagcuucagacgucuuagccacuugagaaaacuuguuccuggguuuggaaaggcauauacuauauucaacaagaccuuaauggaagcugaugcucauuacaagucaauucggaccuggaacgaaaucauccccucaaaagggugccuaaaagucggagggaggugucauccucauguggacggaguguucuucaaugguauaauucuggguccggacgggaauguccugaucccugagaugcaaucgucccuacuucaacaacauguggagcuguuggaguccucuguaaucccucuaaugcaucccuuggcagacccaucaacagucuuuaaggacggugaugaagcggaggacuuuguugagguucaccuuccagauauucacaaacaggucucaggggucgaccuuggucucccaaacugggggaaguaucugcuaaugagugcaggugcucuggcaacacuaaugcugauaaucuucuuaauggcauguugcagaagagcuaaucgaacagaaucaauacaacgagaucccggggagucaggaaggaaaguaucgauaccuucccaagacgggaaagucauaucuucaugggaguuguacaagaguggaggcgagaccaggcuguga

SEQ ID NO: 63320 - RNA, 1575 nt, Artificial Sequence
  derived and/or modified CDS sequence (wt) from glycoprotein__RABV__JQ685942.1
augaucccucaggcucuucuccuugugccucuccuaauuuccucguuguguuucgggggauuccccaucuacacgauaccagacaagcucggaccuuggagucccaucgauauccaucaucucagcuguccgaacaauuugguuguagaggacgaggggugcaccagucugucaggguucucuuacauggaacugaaggugggauacaucucugccauaaaagugaacggguucacuuguaccgguguugugacagaagccgagaccuacaccaacuuuguugguuaugucaccaccacauucaagagaaaacacuuucgcccgacgccagaugcaugcagagcugcauacaacuggaagauggccggugauccuagauaugaagagucucuucaaaauccuuauccugauuaucauuggcuacggaccguaaagaccaccaaagagucucuuauuaucauaucuccaaguguagcggauuuggacccauacgacaaaucccuucauucaagaguuuucccuggugggaaguguuugggaauaacagucucuucaaccuacugcucaacuaaccaugauuacacuaucuggaugccugaagaagcaagacucgggacaucuugugauauuuuuaccaacagcagagggaaaagagcaucuaaggggggcaagacuugcggauucguggacgaaaggggcuuguauaagucucuaaaaggggcauguaaacucaagcuaugcggaguucccggacuuagacuuauggauggaaccugggucacaauucagacaucagaugaaaccaaauggugcccuucugaucaauugguaaaucuacaugacuuucacucagaugagauagaacaucucgucguggaggaguuggucaaaaagagggaagaaugucuggaugcacuggaguccaucaugaccaccaaauccguaagcuucagacgucucagccacuugagaaaacuuguuccuggguuuggaaaggcauauacuauauucaacaagaccuugauggaagcugaugcucacuacaagucaauucggacuuggaacgagaucauccccucaaaagggugccuaaaagucggagggaggugucauccccauguagacggaguguuuuucaauggcauaauucuggguccggacgggaauguuuugaucccugagaugcaauccucccuacuucaacaacauguggagcuguuggaguccucuguaaucccucuaaugcaucccuuggcagacccaucaacagucuucaaggacggugaugaagcggaggacuuuguugagguccaccuuccagauauucacaaacaagucucagggguugaccuuggucucccaaacugggggaaguaucugcugaugagugcaggugcucuagcaacacuaauacugacuaucuuccuagugacauguugcagaagaguugauagaacaagaucaauacaacgagguuccggggagucaggaaggaaagugucggugacuucccaaaacgggaaagucaucucuucaugggaguuguacaagaguggaggcgagaccaggcuguga

SEQ ID NO: 63321 - RNA, 1575 nt, Artificial Sequence
  derived and/or modified CDS sequence (wt) from glycoprotein__RABV__JQ685943.1
augguucuucaggcucuuuuguuuguaccccuucugguuuuuccaucuuguuucgggaaauucccaauuuacacgauaccagacaaacuuggucccuggagcccgaucgacauacaccaucucagcuguccaaauaacuugguuguggaggacgaaggauguaacaaccugucaggguucuccuacauggaacuuaaaguaggauacaucucagccauaaaagugaacggguucaccuguacagguguugugacagaggcagaaaccuacaccaacuuuguugguuaugucacaaccacauucaagagaaagcauuuccgcccuacaccagaugcauguagagcagcauauaacuggaaaauggccggugacccccgauaugaagagucucuacacaauccguacccugacuaccauuggcuucgaacuguuaaaaccaccaaagagucucucgucaucauauccccaaguguggcagauuuagauccauaugacaaaucccuucacucgagggucuucccuagcggaaaaugcucaggaaugacagugucuuccaccuguugcucaaccaaccaugauuacaccauuuggaugcccgagaauccgagacuagggacaucuugugacauuuucaccaauagcagagggaagagagcauccaaagggagcaagacuugcggcuuuguagaugaaagaggccuguauaagucucuaaaaggagccuguaaacucaaguuauguggaguucuuggacuuagacuuauggauggaacaugggucgccaugcaaacgucagaugagaucaaauggugcccuccagaucaguuagugaaucugcacgacuuucgcucggacgagauugaacaucuuguuguggaggaguuggucaagaaaagagaggagugucuggaugcacuagagucaaucaugaccaccaagucagugaguuucagacgucuaagucacuuaagaaaacuugucccgggguucggaaaggcauacaccauauucaacagaaccuugauggaggcugaugcucacuacaagucaguccggaccuggaaugagguuaucccuucaaaaggguguuugagaguuggggggaggugucauccucauguaaacgggguguuuuucaaugguauaauauuggggccugacggucauguucuaaucccagagaugcaaucaucccuccuccagcaacauauggaguuguuggaguccucaguuauccccuugaugcacccccuggcaaacccuucuacaguuuucaaagaaggugacgaggcugaggauuuuguugaaguucaccuccccgacguacacaaacaagucucagggguugaccugggucucccaaauugggguaaguauguauugaugagugcaggggcccugauugcccugauguugauaauuuuccuaaugacauguugcagaagagucaaucgaccagaaucuacgcaacgcauucuuggagggacagggaaaaaggugucggccgcuucccagagcgggaaggucauaucuucaugggagucauauaaaaguggaggugagacccaacuguga

SEQ ID NO: 63322 - RNA, 1575 nt, Artificial Sequence
  derived and/or modified CDS sequence (wt) from glycoprotein__RABV__JQ685944.1
augguuccucaggcucuuuugguuguaccccuucuggguuuuucauuguguuucgggaaauucccaauuuacacgauaccagacaaacuuggucccuggagcccgauugacauacaucaucucagcuguccaaacaaucugguuguggaggacgaaggaugcaccaaccugucaggguuuuccuacauggaacuuaaaguuggguacaucucagccauaaaagugaacggguucacuugcacaggaguugugacagaggcagagaccuacacuaacuuuguugguuaugucacaaccacguucaaaagaaagcacuuucacccaacaccagaugaguguagagccgcguacaacuggaagauggccggugaccccagauaugaggagucucuacacaauccauacccugacuaccauuggcuucgaacaguaaaaaccaccaaagagucucucguuaucauaucuccaaguguggcagauuuggacccauaugacaaaucccuucacucgagggucuucccuagcggaaaaugcucaggaauaacggugucuucuaccuacuguucaacuaaccaugauuacaccauuuggaugcccgagaauccgagauuagggacaucuugugacauuuuuaccaauagcagggggaagagagcauccaaagggaguaagacuugcggcuuuguagaugaaagaggccuguacaagucucuaaaaggggcaugcaaacucaaguuauguggaguuccaggacuuaaacuuauagaugggacauggaucgcgaugcaaacaucagaugagaccaaauggugcccccccgaucaguuggugaaucuacaugacuuucgcucggacgaaauugagcaccuuguuguagaagauuuggucaagaaaagagaggagugucuggaugcacuagaguccaucaugacaaccaagucagugaguuucagacgucucagccauuuaagaaaacuugucccuggguucggaaaggcauauaccauauucaacaagaccuugauggaggcagaugcucacuacaagucaguucggaccuggaaugagaucaucccuucaaaaggguguuuaaaaguaggggggaggugucauccucaugugaacgggguguuuuucaacgguguaauauuagggccugacggccauguucugauccccgagaugcaaucaucccuccuccagcaacauauggaguuguuggaauccucgguuaucccuuugaugcacccccuggcagacccgucuacaguuuucaaggacggugaugaggccgaggauuucguugaaauucaccuacccaaugugcauaaacaggucucggggguugaccugggucucccgaacugggggaaguauguaucacugagugcaggggcccugacugccuugauguugauaauuuuccuaauggcauguuguagaaaaguuaaucgaccagaaccuacgcaacgcagucucgaaggaaaagggaggaaaguaucgaucacuucccaaagugggaaggucauaucgucaugggagucauauaaaagcgggggugagaccagacuguga

SEQ ID NO: 63323 - RNA, 1575 nt, Artificial Sequence
  derived and/or modified CDS sequence (wt) from glycoprotein__RABV__JQ685945.1
augaucccucaggcucuucuguaugugccucuccugaucuccucguuguguuucgggggauuccccaucuacacgauaccagacaagcucggccccuggagucccauugacauacaucaucucagcugucccaacaauuugguuguggaggacgaggggugcaccagucugucaggguuuucuuacauggaacugaaggugggguacaucucugccauaaaggugaacggguucacuuguacuggugucgugacagaggccgagaccuacaccaacuuuguugguuaugucaccaccacauucaagagaaaacacuuucgcccuaugccagaugcaugcagagcugcauacaauuggaagguggccggugauccuagauaugaagaaucucuucaaaauccuuauccugacuacaguuggcuacggaccguaaagaccaccaaagagucucuuauuauuauaucuccaaguguagcggauuuggacccauacgacaaaucccuucauucaagaguuuucccuggugggaaguguuugggaauaacaaucucuucuaccuacugcucaacuaaccaugauuacaccaucuggaugccugaggaagcaagacucgggacaucuugugacauuuuuaccaacagcagagggaagagagcauccaaggggggcaagaccugcggauucguggacgaaaggggcuuguacaagucucuaaaaggagcauguaaacuuaagcugugcggaguucccggacucagacuuauggauggaaccugggucacaauucagacaucagaugaaaccaaauggugcccuucugaucaauugguaaaucuacaugacuuucacucagaugagauagaacaucuugucguggaggaguuggucaagaagagggaagaaugucuggaugcacuggaguccaucaugaccaccaaauccguaagcuucagacgucuuagccacuugagaaaacuuguuccuggguuuggaaaggcauauacuauauucaacaagaccuuaauggaagcugaugcucauuacaagucaauucggaccuggaacgagaucauccccucaaaagggugccuaaaagucggagggaggugucauccgcauguggacggaguguucuucaaugguauaauucuggguccggacgggaauguccuaaucccugagaugcaaucgucccuacuucaacaacauguggagcuguuggaguccucuguaaucccucuaaugcaucccuuggcagacccaucaacagucuuuaaggacggugaugaagcggaggacuuuguugagguucaccuuccggauauucacaaacaggucucaggggucgaccuuggucucccaaacugggggaaguaucugcuaauaagugcaggugcucuggcaacacuaaugcugacaaucuuuuuaaugacauguugcagaagagcuaaucgaacagaaucaauacaacgagaucccggggagccaggaaagaaaguaucgauaacuucccaagacgggaaagucauaucuucaugggaguuguacaagaguggaggcgagaccaggcuguga

SEQ ID NO: 63324 - RNA, 1575 nt, Artificial Sequence
  derived and/or modified CDS sequence (wt) from glycoprotein__RABV__JQ685946.1
augaucccucaggcucuucuguaugugccucuccugauccccucguuguguuucgggggauuccccaucuacacgauaccagacaagcucggccccuggagucccauugacauacaucaucucagcugccccaacaauuugguuguggaggacgaggggugcaccagucugucaggguuuucuuacauggaacugaaggugggauacaucucugccauaaaggugaacggguucacuuguacugguguugugacagaagccgagaccuacaccaacuuuguugguuaugucaccaccacauucaagagaaaacacuuucgcccuaugccagaugcaugcagagcugcauacaauuggaagauggccggugauccuagauaugaagaaucucuucaaaauccuuauccugacuauaguuggcuacgaaccguaaagaccaccaaagagucucuuauuaucauaucuccaaguguagcggauuuggacccauacgacaaaucccuucauucaagaguuuucccuggugggaaguguuugggaauaacaaucucuucuaccuacugcucaacuaaccaugauuacaccaucuggaugccugaagaggcaagacucgggacaucuugugacauuuuuaccaacagcagagggaagagagcauccaaggggggcaagaccugcggauucguggacgaaaggggcuuguacaagucucuaaaaggagcauguaaacuuaagcugugcggaguccccggacucagacuuauggauggaaccugggucacaauucagacaucagaugaaaccaaauggugcccuucugaucaauuggugaaucuacaugacuuucacucagacgagauagaacaucuugucguggaggaguuggucaagaagagggaagaaugucuagaugcacuggaguccaucaugaccaccaaauccguaagcuucagacgucuuagccacuugagaaaacuuguuccuggguuuggaaaggcauauacuauauucaacaagaccuuaauggaagcugaugcucauuacaagucaauuaggaccuggaacgagaucauccccucaaaagggugccuaaaagucggagggaggugucauccucauguggacggaguguucuucaaugguauaauucuggguccugacgggaauguccugaucccugagaugcaaucgucccuacuucaacaacauguggagcuguuggaguccucuguaaucccucuaaugcaucccuuggcagacccaucaacagucuuuaaggacggugaugaagcggaggacuuuguugagguucaccuuccggauguucacaaacaggucucaggggucgaccuuggucucccaaacugggggaaguaucugcuaaugagugcaggugcucuggcaacacuaaugcugacaaucuucuuaaugacauauugcagaagagcuaaucgagcagaaucaauacaacgagaucccggggagucaggaaggaaaguaucgauuacuucccaagacgggaaagucauaucuucaugggaguuguacaagaguggaggcgaggcuaggcuguga

SEQ ID NO: 63325 - RNA, 1575 nt, Artificial Sequence
  derived and/or modified CDS sequence (wt) from glycoprotein__RABV__JQ685947.1
augaucccucaggcucuucuguuugugucucuccugauucccucgcugugucucggggaauuccccaucuacacgauaccagacaaacucggcccuuggaccccuaucgacauacaucaucucagcugucccaacaaucugguugcagagaacgacgggugcaccagucugucaggguuuuccuauauggaacuaaaggugggauacaucucugccauaaaggugaacggguucacuuguaccgguguugugacagaagccgagaccuacacaaacuuuguagguuaugucacuaccacauucaagagaaagcacuuccgcccgaugccagaugccugcagagcugcacacgacuggaagauggccggugauccuagauaugaagauucccuucaaaauccuuauccugauuaccauugguuacggaccguaaagaccaccaaggagucgcucguuauuauauccccgaguguugcugauuuggaccccuacgacaagucccuucauucaagaguuuuccccagugggaaguguuuggggauaacagucucuuccaccuacugcucaaccaaccaugauuacaccaucuggaugcccguagaaccaagacuuggaacaucuugugauauuuuuaccaauagcagagggaagagagcaucuaagggaggcaggguuugcggauuuguggaugaaaggggcuuauacaaaucucucaaaggagcaugcaaacucaagcugugcggaguccccgggauuaggcugauggauggaaccugggucucaauccagacaucagaagauauuaaguggugcccuccugaucgauuagugaaucuacacgacuuucacucggaugaacuagaacaucuuguuguagaggaauugaucaagaggagggaaaauugucuagaugcacuggaguccaucaugaccaccaaaucagugagcuucagacgucucagccacuugaggaaacuuguuccgggguuugggaaggcauacaccauauucaacaagaccuuaauggaagcugaugcucauuacaagucagucaagacuuggaacgaggucauuccuucgaaagguugccuggaagucggagggaaaugucaccccccugugaacggaguauucuucaaugguauaauuuuggguccagauggaaauguucugaucccugagaugcaaucuucccugcuucaacaacauauggagcuguuagagucuucuguuaucccucugaugcaucccuuggcggacccaucaacagucuucaaggaaggugaugaggcggaagacuuuguugagguucaucuuccagauguccacaaacagguuucugauguugaccuuggucuuccgaguugggggaaguaucuguugaugagugcaggugcucuggcaauacugauucuggcgaucgucuuaauaauauguuguaggagggucaauaagacaagaucaacacagagaggucagagggaaucaagagggaaaaugucaguagcaccucaaaaugggaagaucauauccucaugggaguuguacaaaagagaaagugagacugggcuguga

SEQ ID NO: 63326 - RNA, 1575 nt, Artificial Sequence
  derived and/or modified CDS sequence (wt) from glycoprotein__RABV__JQ685951.1
augaucccucaggcucuucuguaugugccucuccugauccccucguuguguuucgggggauuccccaucuacacgauaccagacaagcucggccccuggagucccauugacauacaucaucucagcugccccaacaauuugguuguggaggacgaggggugcaccagucugucaggguuuucuuacauggaacugaaggugggguacaucucugccauaaaggugaacggguucacuuguacuggugucgugacagaagccgagaccuacaccaacuuuguugguuaugucaccaccacauucaagagaaaacacuuucgcccuaugccagaugcaugcagagcugcauacaauuggaagauggccggugauccuagauaugaagaaucucuucaaaauccuuauccugacuauaguuggcuacgaaccguaaagaccaccaaagagucucuuauuaucauaucuccaaguguagcggauuuggacccauacgacaaaucccuucauucaagaguuuucccuggugggaaguguuugggaauaacaaucucuucuaccuacugcucaacuaaccaugauuacaccaucuggaugccugaagaggcaagacucgggacaucuugugacauuuuuaccaacagcagagggaagagagcauccaaggggggcaagaccugcggauucguggacgaaaggggcuuguacaagucucuaaaaggagcauguaaacucaagcugugcggaguccccggacucagacuuauggauggaaccugggucacaauucagacaucagaugaaaccaaauggugcccuucugaucaauuggugaaucuacaugacuuucacucagacgagauagaacaucuugucguggaggaguuggucaagaagagggaagaaugucuagaugcacuggaguccaucaugaccaccaaauccguaagcuucagacgucucagccacuugagaaaacuuguuccuggguuuggaaaggcauauacuauauucaacaagaccuuaauggaagcugaugcucauuacaagucaauucggaccuggaacgagaucauccccucaaaagggugccuaaaagucggagggagaugucauccucauguggacggaguguucuucaaugguauaauucuggguccugacgggaauguccugaucccugagaugcaaucgucccuacuucaacaacauguggaguuguuggaguccucuguaaucccucuaaugcaucccuuggcagacccaucaacagucuuuaaggacggugaugaagcggaggacuuuguugagguucaccuuccggauguucacaaacaggucucaggggucgaccuuggucucccaaacugggggaaguaucugcuaaugagugcaggugcucuggcaacacuaaugcugacaaucuucuuaaugacauauugcagaagagcuaaucgagcagaaucgauacaacgagaucccggggagucaggaaggaaaguaucgauaacuucccaagacgggaaagucauaucuucaugggaguuguacaagaguggaggcgaggcuaggcuguga

SEQ ID NO: 63327 - RNA, 1575 nt, Artificial Sequence
  derived and/or modified CDS sequence (wt) from glycoprotein__RABV__JQ685952.1
augaucccucaggcuauucugucagugccucuucugauuuccucgcuguguuuugggaaauuccccaucuacacgauaccagaaaaacucggcccuuggagucccauugauauacaucaucucagcugcccuaacaaucuaguuguggaggacgagggaugcaccacuuugucaggguuuucuuacauagaacugaaggugggauauauuucugccauaaaagugaacggauucaccuguaccggugucgugacagaagcugagacuuacaccaacuuuguugguuaugucaccaccacauucaagagaaaacacuuccgcccgaugccagaugcaugcagagccgcuuacaacuggaagauggcaggcgauccuagauaugaagagucucuucacaacccuuauccugauuaccauuggcuacggaccguaaaaaccaccaaagagucucuugucaucauaucgccaaguguggcugauuuagauccauacgacaagucccuucauucgagaguuuuuccuggugggaaguguuugggaauaacaaucucuucuaccuacugcuccaccaaccaugauuacacuaucuggaugcccgaagaagcuagacucgggacaucuugugacauuuuuaucaacagcagagggaaaagagcaucuaaggggggcaggacuugcggauuuguggaugagaggggcuuauauaagucuuuaaagggggcauguaaacucaaacugugcggaguuccuggacuuagacuuauggauggaacuuggguuucaauuccggcaucagaugagaccaaguggugcuccccugaucaacuggugaauguacaugauuuucacucagaugagauagaacaucuagucguagaggaguuggucaaaaggagggaagaaugucuggaugcacuggaguccauugugaccaccaaaucaauaaguuucaggcgucuuagccacuugagaaaacuuguuccgggguucggaaaggcauauacuauauucaacaaaaccuugauggaggcugaugcccacuacaaaucaguucggacuuggaacgagaucauacccucaaaagggugcuugagcgucggagggaggugucauccucauguaaacggaguguuuuucaaugguauaauucuggguccggacgggaacguauugaucccggagaugcaaucgucccuacuucaacagcauauggagcuguuagagucuucuguaaucccccuaaugcaucccuuggcagacccaucaacagucuuuaaggacggugaugaggcagaggacuuuguugagguucaccuuccagacguucaagaacaggucucagggguugaccucggucucccaaacugggggaaauacgugcugaugagugcaggugcucuggcaauucuuauacugacaaucuucuuaauaacauguuguagaagggcugauaaaacaaaaucaauacaacaaggucuuggggggucaggaaggaaaguaucggucucuccccaaaacgggaaagucauaucuucaugggagucuuauaagaauggaggcgaaaccaggcuguga

SEQ ID NO: 63328 - RNA, 1575 nt, Artificial Sequence
  derived and/or modified CDS sequence (wt) from glycoprotein__RABV__JQ685953.1
augaucuuucaggcucuuccguuugugccucuccuaaucucuucguugugucucgggaaguuccccaucuacacgauaccagacaagcucggucccuggagcccuaucgacauacaucaccucagcuguccaaauaauuuaguuguggaggacgaggggugcaccagccuaucaggguucucuuacauggaacuuaaggugggauacaucucggccauaaaggugaauggguucacuuguacagguguuguaacagaagcugaaaccuauaccaauuuuguggguuaugucaccaccacauucaagaggaaacauuuucgcccuauaccagaugcaugcagggcugcauacaacuggaagauggcuggugauccuagauaugaggagucucuucagaauccuuaucccgaguaccacuggcuacggaccguaaagaccaccaaggagucucuuaucaucauauccccgaguguggcugauuuggacccauacaacaaaucucuucauucuaggguguuuccuggugggaagugucugggaauaacgaucucuuccaccuacugcucaaccaaccaugauuacaccaucuggaugcccgaggaaccgagacuugggacaucuugugacauuuuuaccagcagcaagggaaagaaggcaucuaaaggaggcaagacuuguggguuuguggaugaaaggggcuuguacaagucucuaaaaggagcauguaagcucaagcugugcggaguucucggacuuagacuuauggauggaaccuggguuucaauucaaacgucagacgauacuaaauggugcccuccggaucaauuggugaaucuacaugacuuucacucagacgaaauagagcaucucgucguggaggaguuggucaaaaagagagaagagugucuggacgcauuggaguccaucaugacuacuaaaucuguaaguuuuagacgucucagcuauuugagaaaacuugucccuggguucgggaaggcauacaccauauucaauaagacuuugauggaagcugacgcccacuacaagucuguucggacuuggaaugagaucaucccuucaaaaggguguuugaaagucagagagaggugucauccuccuguggacggaguguucuucaauggcauaauucuggguccggacgggaacgucuugauaccugagaugcaaucgucucuacuucagcaacauauggagcuguuggaguccucugugauccccuuaaugcaucccuuggcagacccaucaacagucuucaaggacggagaugaagcggaggacuuuguggaaguucaccucccagauguucacaaacaaaucucagggguugaccuuggucucccgaguugggggaaauaucuccugaugaucgcagguggccuagcgacacuagcucugauaaucuucucgauggcauguuguagaagggccaagcgaacagagccaggacgacgaggcucuggagagucaggaaagaggguaccggcaaccccccagacgagaaaagucguaucuucaugggaguuguacaagagugaaggcgaugccaggcuguga

SEQ ID NO: 63329 - RNA, 1575 nt, Artificial Sequence
  derived and/or modified CDS sequence (wt) from glycoprotein__RABV__JQ685954.1
auggucccucaagcucuccuauuugugccucuucugauuccaucagugugccuggggaaguucccgaucuacacaaucccagacaagcuagguccuuggaguccuaucgauauacaucaucucaguuguccuaacaaucugguuguugaagaugagggaugcaguaaucuaucaggauuuucuuacauggaauugaagguaggauauauuucugccauaaaaguggauggauucacuugcacuggcguaguuacggaagcugagaccuacaccaauuuuaucgguuaugucacuacaacauucaagagaaaacacuuccgcccgaugccugaugccugcagaucugcauauaacuggaaaauagcaggugaucccagguaugaagagucccuucacacuccuuauccugauuaucauuggcugcgaacugugaaaaccaccaaagagucccuugucaucauaucaccaaguguggcugaccuggacccauaugacaagucccuucauucaaugguuuucccuaauggaaaauguucgggaauaacggucuacucuacuuacugcucaacuaaccacgauuauaccaucuggaugcccgagaaggcaggacucgggacaucuugugacaucuuuaccaacagcaaggggaagagggcauccaaaggaggcaggacuugcggauuuguggaugaaagaggcuuguauaagucucugagaggagcauguaagcucaaguuaugcggagugccuggacucaggcucauggaugggacuugggccacaauccagacaccggaagagaccaaauggugcucuccugaucagcuggugaaucugcaugauuuucauucagaugagauagagcaucuuguuguggaggaccuggucaagaaaagagaggaaugucuggauacacuagagucuauuaugaccacuaaaucagucaguuucagacgucucagucacuugaggaaacuuguuccuggauucgggaaggcauauacuauauucaacaagacuuugauggaggcugaugcccacuacaaaucgguacggacuuggaacgagauuauccccucaaaagggugucugagagugggagggaggugucauccucaugugaauggaguguucuucaauggugugaucauggguccugacggucauguccugaucccagagaugcaaucaucccuucuccaacaacauauggagcugcuggagucgucugugaucccccuaauacauccucuggcagacccauccacagucuucaaagacaaugaugaggcugaggacuuuguugaaguucaccuuccggauguucacaaacaagucucuggaauagaccucggccuccccagcuggggaagguauuuguugaugauugccggugcucugaugacucuaacucugguaaucuucuugaugauauguugcaggagagucaacaaagcaggaucaauacaacaagauccugagaagucagaaaggaggagaucaguuaccccccagaacgggaaggucauaucuucaugggaauccuauaagaguggaagcgaaacucggcuguga

SEQ ID NO: 63330 - RNA, 1575 nt, Artificial Sequence
  derived and/or modified CDS sequence (wt) from glycoprotein__RABV__JQ685955.1
augaucucucaggcuuuccuguaugucccucucuuaauuuccucguuguguuucgggaaauucccaauuuacacgauaccagacaagaucggccccuggagucccaucgacauacaucaucucagcuguccuaauaacuugguuguggaggaugagggaugcaccagucugucaggauuuucuuacauggaauugaaggugggauacaucucugcuauaaaggugaacggauucacuuguaccggcguugugacagaagccgagaccuacacuaauuuuguggguuaugucaccacuacguucaagagaaaacacuuucgcccuaugccagaugcaugcagaucggcauacaacuggaagacggccggugauccuagauaugaagagucucuucaaaauccuuauccugauuacaguuggcuacggaccguaaagaccaccaaagagucucuuguuaucauaucuccaaguguggcugauuuggacccauacgacaaaucccuucacucaagaguuuucccuaaugggaaguguuugggaauaacgaucucuucuacauacugcucaacuaaccaugauuacacuaucuggaugcccgaagaagcaagacucgggacaucuugugacauuuuuaccaacagcaaggggaagagagcaucuaaggggggcaggacuuguggauucguggaugaaaggggccuguacaagucucuaagaggagcauguaaacuuaagcugugugggguuccgggacuuagacugauggauggaaccugggucucaauccagacaucagaugagaccaaauggugcccuccggaucagcuggugaauguacaugauuuucacucagaugagauagaacaucucgucguggaggaguuggucaagaagagggaagaaugucuggaugcacuggaguccaucaugaccaccaaauccguaaguuucagacgucucagucacuugagaaaacuuguuccuggguuuggaaaggcauauacuauauucaacaagacccugauggaagcugaugcucacuacaagucaguucagacuuggaacgagaucauccccucaaaagggugccucaaagucggagggaugugucauccccauguggacggaguguuuuucaaugguauaauuuuggguccagacggaaaugucuuaaucccugagaugcaaucaucccuacuucaacaacauauggagcuguuggagucuucuguaaucccccuaaugcaucccuuggcagacccaucaacagucuucaaggacggugaugaggcggaagacuuuguugaaguucaccuuccagauauucacaaacaggucucagggauagaccuuggucucccagacugggggaaauaucugcugaugagugcaggugcucuggcaauauuauuguuaacaaucuucuuaaugacauguugcagaagggucaauagaacagaaucagcacagcgagauccuggagaguuaggacggaaaguaucagcaacuccucagaacaggaaagucauaucuucuugggaguuguacaagaguggaggcgauacuaggcuguga

SEQ ID NO: 63331 - RNA, 1575 nt, Artificial Sequence
  derived and/or modified CDS sequence (wt) from glycoprotein__RABV__JQ685956.1
augaucccucaggcucuucuguaugugccucuccugaucuccucguuguguuucgggggauuccccaucuacacgauaccagacaagcucggccccuggagucccauugacauacaucaucucagcugucccaacaauuugguuguggaggacgaggggugcaccagucugucaggguuuucuuacauggaacugaaggugggguacaucucugccauaaaggugaacggguucacuuguacuggugucgugacagaggccgagaccuacaccaacuuuguugguuaugucaccaccacauucaagagaaaacacuuucgcccuaugccagaugcaugcagagcugcauacaauuggaagguggccggugauccuagauaugaagaaucucuucaaaauccuuauccugacuacaguuggcuacggaccguaaagaccaccaaagaaucucuuauuauuauaucuccaaguguagcggauuuggacccauacgacaaaucccuucauucaagaguuuucccuggugggaaguguuugggaauaacaaucucuucuaccuacugcucaacuaaccaugauuacaccaucuggaugccugaagaagcaagacucgggacaucuugugacauuuuuaccaacagcagagggaagagagcauccaaggggggcaagaccugcggauucguggacgaaaggggcuuguacaagucucuaaaaggagcauguaaacuuaagcugugcggaguucccggacucagacuuauggauggaaccugggucacaauucagacaucagaugaaaccaaauggugcccuucugaucaauugguaaaucuacaugacuuucacucagaugagauagaacaucuugucguggaggaguuggucaagaagagggaagaaugucuggaugcacuggaguccaucaugaccaccaaauccguaagcuucagacgucuuagccacuugagaaaacuuguuccuggguuuggaaaggcauauacuauauucaacaagaccuuaauggaagcugaugcucauuacaagucaauucggaccuggaacgagaucauccccucaaaagggugccuaaaagucggagggaggugucauccucauguggacggaguguucuucaauggaauaauucuugguccggacgggaauguccuaaucccugagaugcaaucgucccuacuucaacaacauguggagcuguuggaguccucuguaaucccucuaaugcauccccuggcagacccaucaacagucuuuaaggacggugaugaagcggaggacuuuguugagguucaccuuccggacauucacaaacaggucucaggggucgaccuuggucucccaaacugggggaaguaucugcuaaugagugcaggugcucuggcaacacuaaugcugacaaucuuuuuaaugacauguugcagaagagcuaaucgaacagaaucaauacaaagagaucccggggagucaggaaagaaaguaucgauaacuucccaagacgggaaagucauaucuucaugggaguuguacaagaguggaggcgagaccaggcuguga

SEQ ID NO: 63332 - RNA, 1575 nt, Artificial Sequence
  derived and/or modified CDS sequence (wt) from glycoprotein__RABV__JQ685957.1
augaucucucaagcucuucuguuugugccucuccugauuuccucgcugugucucggagaauuccccauuuacacgauaccagaaaaacucggcccuuggagucccaucgacauacaucaccucaguugcccuaacaaucugguuguggaggaugagggaugcaacagucugucgggguuuucuuacauggaacugaaagugggauacaucucuuccauaaaagugaauggguucacuuguacaggugucgugacggaagcugagaccuacaccaacuuuguugguuaugucaccaccacauucaagagaaaacacuuccgcccgaugccagaugcaugcagagcugcauacaacuggaagauguccggagauccuagauaugaagagucucuucacaauccuuacccugauuaccauuggcuacggacuguaaaaaccaccaaagagucucuuguuaucauaucgccaaguguggcugauuuggauccauacgacaaaucccuucauucaagggucuucucuggugggaaguguuugggaauaacaaucucuuccaccuacugcuccacuaaccaugauuacaccaucuggaugcccgaagaagcaagacuugggaccucuugugacauuuuuaccaacagcaaagggaagaaggcaucuaaggggggcaggacuugcggauucguggaugaaaggggauuguauaagucucuaaaaggggcaugcaaacucaaacugugcggaguuccuggacuuagacuuauggauggaacuugggucucaauucagacaucagaugagaccaaauggugcccuccugaucaacuggugaauauacaugauuuucgcucagaugagauagaacaucucguaguggaggaguuggucaagaagagggaagaaugccuggaugcacuggaguccauuaugaccacaaaaucaguaagcuucagacgucuuagccacuugagaaaacucguuccuggguucggaaaggcauauacuauauucaacaaaacauuaauggaggcugaugcucacuacaagucaguucggacuuggaaugaaaucauccccucaaaagggugccuaagcgucggagggaggugccauccucauguggacggaguguucuucaaugguauaauucuggguccggauggaaguguccugaucccugagaugcaaucaucccuacuucaacagcauauggagcuguuggaguccucuguaaucccccuaaugcaucccuuggcaaacccaucaacagucuucaaggacggugaugaggcggaggacuuuguugaaguucaccucccggacauucaagaacaggucucagggguugaccuuggucucccaaacugggggaaguaugugcuuaugagugcaggcgcucuggcuauccuacugcugacaaucuucuuaaugacauguugcauaaggaccaauagaacaaaaucaauacaacaagguccuggggagucaggaaggaaaguaucuguuccuccccaaaacgggagagucauaucuucaugggagucauucaagagcggaggcgaaaccggccuguga

SEQ ID NO: 63333 - RNA, 1575 nt, Artificial Sequence
  derived and/or modified CDS sequence (wt) from glycoprotein__RABV__JQ685959.1
augaucccucaggcucuucuguaugugccucuccugauccccucguuguguuucgggggauuccccaucuacacgauaccagacaagcucggccccuggagucccauugauauacaucaucucagcugucccaacaauuugguuguggaggacgaggggugcaccagucugucaggguuuucuuacauggaacugaaggugggguacaucucugccauaaaggugaacggguucacuuguacuggugucgugaccgaggccgagaccuacaccaacuuuguugguuaugucaccaccacauucaagagaaaacacuuucgcccuaugccagaugcaugcagagcugcauacaauuggaagguggccggugauccuagauaugaagaaucucuucaaaauccuuauccugacuacaguuggcuacggaccguaaagaccaccaaagagucucuuauuauuauaucuccaaguguagcggauuuggacccauacgacaaaucccuucauucaagaguuuucccuggugggaaguguuugggaauaacaaucucuucuaccuacugcucaacuaaccaugauuacaccaucuggaugccugaagaagcaagacucgggacaucuugugacauuuuuaccaacagcagagggaagagagcauccaaggggggcaagaccugcggauucguggacgaaaggggcuuguacaagucucuaaaaggagcauguaaacuuaagcugugcggaguucccggacucagacuuauggauggaaccugggucacaauucagacaucagaugaaaccaaauggugcccuucugaucaauugguaaaucuacaugacuuucacucagaugagauagaacaucuugucguggaggaguuggucaagaagagggaagaaugucuggaugcacuggaguccaucaugaccaccaaauccguaagcuucagacgucuuagccacuugagaaaacuuguuccuggguuuggaaaggcauauacuauauucaacaagaccuuaauggaagcugaugcucauuacaagucaauucggaccuggaacgagaucauccccucaaaagggugccuaaaagucggagggaggugucauccgcauguggacggaguguucuucaaugguauaauucuggguccggacgggaauguccuaaucccugagaugcaaucgucccuacuucaacaacauguggagcuguuggaguccucuguaaucccucuaaugcaucccuuggcagacccaucaacagucuuuaaggacggugaugaagcggaggacuuuguugagguucaccuuccggauauucacaaacaggucucaggggucgaccuuggucucccaaacugggggaaguaucugcuaaugagugcaggugcucuggcaacacuaaugcugacaaucuuuuuaaugacauguugcagaagaucuaaucgaacagaaucaauacaacgagaucccggggagucaggaaagaaaguaucgauaacuucccaagacgggaaagucauaucuucaugggaguuguacaagaguggaggcgagaccaggcuguga

SEQ ID NO: 63334 - RNA, 1575 nt, Artificial Sequence
  derived and/or modified CDS sequence (wt) from glycoprotein__RABV__JQ685960.1
augaucccucaggcucuucuguaugugccucuccugaucuccucguuguguuucgggggauuccccaucuacacgauaccagacaagcucggccccuggagucccauugacauacaucaucucagcugucccaacaauuugguuguggaggacgaggggugcaccagucugucaggguuuucuuacauggaacugaaggugggguacaucucugccauaaaggugaacggguucacuuguacuggugucgugacagaggccgagaccuacaccaacuuuguugguuaugucaccaccacauucaagagaaaacacuuucgcccuaugccagaugcaugcagagcugcauacaauuggaagguggccggugauccuagauaugaagaaucucuucaaaauccuuauccugacuacaguuggcuacggaccguaaagaccaccaaagagucucuuauuauuauaucuccaaguguagcggauuuggacccauacgacaaaucccuucauucaagaguuuucccuggugggaaguguuugggaauaacaaucucuucuaccuacugcucaaccaaccaugauuacaccaucuggaugccugaagaagcaagacucgggacaucuugugacauuuuuaccaacagcagagggaagagagcauccaaggggggcaagaccugcggauucguggacgaaaggggcuuguacaagucuuuaaaaggagcauguaaacuuaagcugugcggaguucccggacucagacuuauggauggaaccugggucacaauucagacaucagaugagaccaaauggugcccuucugaucaacugguaaaucuacaugacuuucacucagaugagauagaacaucuuguaguggaggaguuggucaagaagagggaagaaugucuggaugcacuggaguccaucaugaccaccaaauccguaagcuucagacgucuuagccacuugagaaaacuuguuccuggguuuggaaaggcauauacuauauucaacaagaccuuaauggaagcugaugcucauuacaagucaauucggaccuggaacgaaaucauccccucaaaagggugccuaaaagucggagggaggugucauccgcauguggacggaguguucuucaaugguauaauucuggguccggacgggaauguccuaaucccugagaugcaaucgucccuacuucaacaacauguggagcuguuggaguccucuguaaucccucuaaugcaucccuuggcagacccaucaacagucuuuaaggacggugaugaagcggaggacuuuguugagguucaccuuccggauauucacaaacaggucucaggggucgaccuuggucucccaaacugggggaaguaucugcuaaugagugcaggugcucuagcaacacuaaugcugacaaucuuuuuaaugacauguugcagaagagcuaaucgaacagaaucaauacaacgagaucccggggagucaggaaagaaaguaucgauaacuucccaagacgggaaagucauaucuucaugggaguuguacaagagaggaggcgagaccaggcuguga

SEQ ID NO: 63335 - RNA, 1575 nt, Artificial Sequence
  derived and/or modified CDS sequence (wt) from glycoprotein__RABV__JQ685961.1
augaucccucaggcucuucuguaugugccucuccugaucuccccguuguguuucgggggauuccccaucuacacgauaccagacaagcucggccccuggagucccauugacauacaucaucucagcugucccaacaauuugguuguggaggacgaggggugcaccagucugucaggguuuucuuacauggaacugaaggugggguacaucucugccauaaaggugaacggguucacuuguacuggugucgugacagaggccgagaccuacaccaacuuuguugguuaugucaccaccacauucaagagaaaacacuuucgcccuaugccagaugcaugcagagcugcauacaauuggaagguggccggugauccuagguaugaagaaucucuucaaaauccuuauccugacuacaguuggcuacggaccguaaagaccaccaaagagucucuuauuauuauaucuccaaguguagcggauuuggacccauacgacaaaucccuucauucaagaguuuucccuggugggaaguguuugggaauaacaaucucuucuaccuacugcucaacuaaccaugauuacaccaucuggaugccugaagaagcaagacucgggacaucuugugacauuuuuaccaacagcagagggaagagagcauccaaggggggcaagaccugcggauuuguggacgaaaggggcuuguacaagucucuaaaaggagcauguaaacuuaagcugugcggaguucccggacucagacuuauggauggaaccugggucacaauucagacaucagaugaaaccaaauggugcccuucugaucaauugguaaaucuacaugacuuucacucagaugagauagaacaucuugucguggaggaguuggucaagaagagggaagaaugucuggaugcacuggaguccaucaugaccaccaaauccguaagcuucagacgucuuagccacuugagaaaacuuguuccuggguuuggaaaggcauauacuauauucaacaagaccuuaauggaagcugaugcccauuacaagucaauucggaccuggaacgagaucauccccucaaaagggugccuaaaagucggagggagaugucauccgcauguggacggaguguucuucaaugguauaauucuggguccggacgggaauguccuaaucccugagaugcaaucgucccuacuucaacaacauguggagcuguuggaguccucuguaaucccucuaaugcaucccuuggcagacccaucaacagucuuuaaggacggugaugaagcggaggacuuuguugagguucaccuuccggauauucacaaacaggucucaggggucgaccuuggucucccaaacugggggaaguaucugcuaauaagugcaggugcucuggcaacacuaaugcugacaaucuuuuuaaugacauguugcagaagagcuaaucgaacagaaucaauacaacgagaucccggggagccaggaaagaaaguaucgauaacuucccaagacgggaaagucauaucuucaugggaguuguacaagaguggaggcgagaccaggcuguga

SEQ ID NO: 63336 - RNA, 1575 nt, Artificial Sequence
  derived and/or modified CDS sequence (wt) from glycoprotein__RABV__JQ685962.1
augaucccucaggcucuucuguaugugccucuccugauccccucguuguguuucgggggauuccccaucuacacgauaccagacaagcucggccccuggagucccauugauauacaucaucucagcugucccaacaauuugguuguggaggacgaggggugcaccagucugucaggguuuucuuacauggaacugaaggugggguacaucucugccauaaaggugaacggguucacuuguacuggugucgugaccgaggccgagaccuacaccaacuuuguugguuaugucaccaccacauucaagagaaaacacuuucgcccuaugccagaugcaugcagagcugcauacaauuggaagguggccggugauccuagauaugaagaaucucuucaaaauccuuauccugacuacaguuggcuacggaccguaaagaccaccaaagagucucuuauuauuauaucuccaaguguagcggauuuggacccauacgacaaaucccuucauucaagaguuuucccuggugggaaguguuugggaauaacaaucucuucuaccuacugcucaacuaaccaugauuacaccaucuggaugccugaagaagcaagacucgggacaucuugugacauuuuuaccaacagcagagggaagagagcauccaaggggggcaagaccugcggauucguggacgaaaggggcuuguacaagucucuaaaaggagcauguaaacuuaagcugugcggaguucccggacucagacuuauggauggaaccugggucacaauucagacaucagaugaaaccaaauggugcccuucugaucaauugguaaaucuacaugacuuucacucagaugagauagaacaucuugucguggaggaguuggucaagaagagggaagaaugucuggaugcacuggaguccaucaugaccaccaaauccguaagcuucagacgucuuagccacuugagaaaacuuguuccuggguuuggaaaggcauauacuauauucaacaagaccuuaauggaagcugaugcucauuacaagucaauucggaccuggaacgagaucauccccucaaaagggugccuaaaagucagagggaggugucauccgcauguggacggaguguucuucaaugguauaauucuggguccggacgggaauguccuaaucccugagaugcaaucgucccuacuucaacaacauguggagcuguuggaguccucuguaaucccucuaaugcaucccuuggcagacccaucaacagucuuuaaggacggugaugaagcggaggacuuuguugagguucaccuuccggauauucacaaacaggucucaggggucgaccuuggucucccaaacugggggaaguaucugcuaaugagugcaggugcucuggcaacacuaaugcugacaaucuuuuuaaugacauguugcagaagaucuaaucgaacagaaucaauacaacgagaucccggggagucaggaaagaaaguaucgauaacuucccaagacgggaaagucauaucuucaugggaguuguacaagaguggaggcgagaccaggcuguga

SEQ ID NO: 63337 - RNA, 1575 nt, Artificial Sequence
  derived and/or modified CDS sequence (wt) from glycoprotein__RABV__JQ685963.1
augauccuucaggcucuucuauuugugccucuccuaauuucuucgcugugucucgggaaauucccuaucuacacgauaccggacaagcuugguccuuggagcccuauugacauacaucaccuuagcuguccaaacaaucugguuguggaggacgaggggugcacuagucugucaggguuuucuuauauggaacuaaagguaggauacaucucuuccauaaaggugaacggguucacuuguacggguguugugacagaagcugagaccuauaccaacuuuguugguuaugucaccaccacauucaagaggaaacauuuucgcccuauaccagaugcauguagggcugcauacaacuggaagauggcuggugaucccagauaugaggaaucucuucaaaauccuuauccugauuaccauuggcuacggaccguaaagaccaccaaagagucucuuaucaucauaucuccaaguguggcugauuuggacccauaugacaaaucccuucauucuagaguguucccuggugggaaguguuugggaauaacgauuucuucuaccuacugcucaaccaaccaugauuacacugucuggaugcccgaggaaccaagacucgggacauuuugcgacauuuuuaccaauagcaaagggaaaaaggcaucuaaagggggcaagguuugcggauucguggaugaaaggggcuuguauaagucucuaaagggagcauguaaacucaagcugugcggaguucccggacuuagacuuauggauggaaccuggguuacaauucagacaucagaagaggucaaauggugcccugcagaucaauuggugaaucuacaugacuuucacucagacgaaauagagcaucucgucguggaggaauuggucaagaagagggaggaguguuuggaugcauuggaguccaucaugacaacuaaaucuguaaguuucagacgucucagcuauuugagaaaacuugucccuggguuuggaaaggcauauacuauauucaacaagacuuugauggaggcugacgcccacuacaagucaguucggaccuggaacgagaucauccccucaaaaggguguuugaaaguuaaagagaggugucacccucauguggacggaguguucuucaacggcauaauucuggguccagacgggaaugucuugauaccugaaaugcaaucguccuuacuucaacaacauauggagcuguuggaguccucuguaaucccuuugaugcaucccuuggcagacccaucaacaguauucaaggacggagaugaagcggaggacuuuguugaaguucaccucccagauguucacaaacagaucucagggguugaccuuggucucccgaguugggggaaguaucuccuuaugauugcagguggucuggcagcacugguucugauaaucuuuuugaugguauguuguagaaggaccaagagaacggagucaagacgacggggcucuggggaaucaggaaagaagguaucgguaacuccccagaccagaaagguuguaucuucaugggaguuguacaagagugaaggcgaugccaggcuguga

SEQ ID NO: 63338 - RNA, 1575 nt, Artificial Sequence
  derived and/or modified CDS sequence (wt) from glycoprotein__RABV__JQ685964.1
augaucccucaggcucuucuguaugugccucuccugaucuccucguuguguuucgggggauuccccaucuacacgauaccagacaagcucggccccuggagucccauugacauacaucaucucagcugucccaacaauuugguuguggaggacgaggggugcaccagucugucaggguuuucuuacauggaacugaaggugggguacaucucugccauaaaggugaacggguucacuuguacuggugucgugacagaagccgagaccuacaccaacuuuguugguuaugucaccacuacauucaagagaaaacacuuucgcccuaugccagaugcaugcagagcugcauacaauuggaagauggccggugauccuagauaugaagaaucucuucaaaauccuuauccugacuacaguuggcuacggaccguaaagaccaccaaagagucucuuauuaucauaucuccaaguguagcggauuuggacccauacgacaaaucccuucauucaagaguuuucccuggugggaaguguuugggaauaacaaucucuucuaccuacugcucaacuaaccaugauuacaccaucuggaugccugaagaagcaagacucgggacuucuugugacauuuuuaccaacagcagagggaagagagcauccaaggggggcaagaccugcggauucguggacgaaaggggcuuguacaagucucuaaaaggagcauguaaacuuaagcugugcggaguucccggacucagacuuauggauggaaccugggucacaauucagacaucagaugaaaccaaauggugcccuucugaucaauugguaaaucuacaugacuuucacucagaugagauagaacaucuugucguggaggaguuggucaagaagagggaagaaugucuggaugcacuggaguccaucaugaccaccaaauccguaagcuucagacgucuuagccacuugagaaaacuuguuccuggguuuggaaaggcauauacuauauucaacaagaccuuaauggaagcugaugcucauuacaagucaauucggaccuggaacgaaaucauccccucaaaagggugccuaaaagucggagggaggugucauccucauguggacggaguguucuucaaugguauaauucuggguccggacgggaauguccugaucccugagaugcaaucgucccuacuucaacaacauguggagcuguuggaguccucuguaaucccucuaaugcaucccuuggcagacccaucaacagucuuuaaggacggugaugaagcggaggacuuuguugagguucaccuuccagauauucacaaacaggucucaggggucgaccuuggucucccaaacugggggaaguaucugcuaaugagugcaggugcucuggcaacacuaaugcugauaaucuucuuaauggcauguugcagaagagcuaaucgaacagaaucaauacaacgagaucccggggagucaggaaagaaaguaucgauaccuucccaagacgggaaagucauaucuucaugggaguuguacaagaguggaggcgagaccaggcuguga

SEQ ID NO: 63339 - RNA, 1575 nt, Artificial Sequence
  derived and/or modified CDS sequence (wt) from glycoprotein__RABV__JQ685965.1
augaucccucaggcuauucugucagugccucuucugauuuccucgcuguguuuugggaaauuccccaucuacacgauaccagaaaaacucggcccuuggagucccauugauauacaucaucucagcugcccuaacaaucuggugguggaggacgagggauguaccacuuugucaggguuuucuuacauagaacugaaggugggauacaucucugccauaaaagugaacggauucaccuguaccggugucgugacagaggcugagacuuacaccaacuuuguugguuaugucaccaccacguucaagagaaagcacuuccgcccgaugccagaugcaugcagagccgcuuacaacuggaagauggcaggcgauccuagauaugaagagucucuucacaacccuuauccugauuaccauuggcuacggaccguaaaaaccaccaaagagucucuugucaucauaucgccaaguguggcugauuuagauccauacgacaagucccuucauucgagaguuuuuccuggugggaaguguuugggaauaacaaucucuucuaccuacugcuccaccaaccaugauuacacuaucuggaugcccgaagaagcuagacucgggacaucuugugacauuuuuaccaacagcagagggaaaagagcaucuaaggggggcaggacuugcggauuuguggaugaaaggggcuuauauaagucucuaaagggggcauguaaacugaaacugugcggaguuccuggacuuagacuuauggauggaacuuggguuucaauucaggcaucagaugagaccaaguggugcuccccugaucaacuggugaauguacaugauuuucacucagaugagauagaacaucuagucguagaggaguuggucaaaaggagggaagaaugucuggaugcacuggaguccauugugaccaccaaaucaauaaguuucagacgucuuagccacuugagaaaacuuguuccgggguucggaaaggcauauacuauauucaacaaaaccuugauggaggcugaugcccacuacaaaucaguucggacuuggaacgaaaucauacccucaaaagggugcuugagcgucggagggaggugucauccucaugugaacggaguguuuuucaaugguauaauucuggguccggacgggaacguauugaucccggagaugcaaucgucccuacuucaacagcauauggagcuguuagagucuucuguaaucccccuaaugcaucccuuggcagacccaucaacagucuuuaaggacggugaugaggcagaggacuuuguugagguucaccuuccagacguucaagaacaggucucagggguugaccucggucucccaaacugggggaaguacgugcugaugagugcaggugcucuggcaauucuuauacugacaaucuucuuaauaacauguuguagaagggcuaauaaaacaaaaucaauacaacaaggucuuggggggucaggaaggaaaguaucggucucuccccaaaacgggaaagucauaucuucaugggagucuuauaagaguggaggugaaaccaggcuguga

SEQ ID NO: 63340 - RNA, 1575 nt, Artificial Sequence
  derived and/or modified CDS sequence (wt) from glycoprotein__RABV__JQ685967.1
augguuccucaggcucuuuugguuguaccccuucuggguuuuucauuguguuucgggaaauucccuauuuacacgauaccagacaaacuuggucccuggagcccgauugacauacaucaucucagcuguccaaacaaucugguuguggaggacgaaggaugcaccaaccugucaggguuuuccuacauggaacuuaaaguuggauacaucucagccauaaaagugaacggguucacuugcacaggagucgugacagaggcagagaccuacaccaacuuuguugguuaugucacaaccacguucaaaagaaagcacuuccgcccaacaccagaugaauguagagccgcauacaacuggaagauggccggugaccccagauaugaggagucucuacacaauccauacccugacuaccauuggcuucgaacuguaaaaaccaccaaagagucucuuguuaucauaucuccaaguguggcagauuuggacccauaugauaaaucccuucacucgagggucuucccuagcggaaaaugcucaggaauaacagugucuucuaccuacuguucaacuaaccaugauuacaccauuuggaugcucgagaauccgagauuagggacgucuugugacauuuuuaccaauagcagagggaagagagcauccaaagggaguaagacuugcggcuuuguagacgaaaggggccuguacaagucucuaaaaggagcaugcaaacucaaguuauguggaguucuaggacuuaaacuuauggaugggacaugggucgcgaugcaaacaucagaugagaccaaauggugcccucccgaucaguuggugaaucugcaugaccuucgcucugaugaaauugagcaccucguuguagaagaguuggucaagaaaagagaggagugucuggaugcacuagaguccaucaugaccaccaagucagugaguuucagacgucuuagucauuuaagaaaacuugucccuggguucggaaaagcauauaccauauucaacaagaccuugauggaggcagaugcucacuacaagucaguucggaccuggaaugagaucaucccuucaaaaggguguuuaaaagugggggggaggugucauccucaugugaacggaguguuuuucaacggugucauauuagggccggacggccauguucugauccccgagaugcaaucaucccuccuccagcaacauauggaguuguuggaauccucaguuaucccuuugaugcacccccuggcagacccgucuacaguuuucaaggauggugaugaggccgaggauuucguugaaguucaccugcccgaugugcacaaacaggucucagggguugaccugggucucccgaacugggggaaguauguaucacugagugcaggggccuugauagccuugauguugauaauucuccuaauaacauguuguagaaagguuaaucgaccagaaccuacgcaacgcagucucgaagggaaagagaggaaaguaucggucacuucucaaagcgggaaggucauaucuucaugggagucauauaaaagugggggugagaccagacuguga

SEQ ID NO: 63341 - RNA, 1575 nt, Artificial Sequence
  derived and/or modified CDS sequence (wt) from glycoprotein__RABV__JQ685968.1
augguucuucaggcccuucuguucgcaccuuuucugauuucaucguugugccuuggaaaguucccuaucuauacgauaccagacaagcucggcccuuggagcccuaucgauauacaucaucucagcugucccaacaaucuaguuguagaagacgaggggugcaacagucuaucaggaauuucuuacauggaacugaaagugggauauaucuccgccauaaaggugaacggguucaccuguacuggugucgugacugaggcugagacuuacaccaacuuuguugguuaugucaccaccacauucaagagaaaacacuuucauccgaugccggaugcguguagaucugcauacaacuggaaacuggcaggcgauccucguuaugaagagucccuucacaacccauaucccgauuaccacuggcugcggaccguaaaaaccaccaaggagucucuuaucaucauaucacccaguguggcugaccuagauccauaugacaaaucucuccacucaaggauuuuuccucgugggaaaugcucagggaugaccauuucuucuaccuacugcucaacuaaccaugaauacacuauauggaugcccgaaaaggcaggucucgggacgucuugugacauauuuaccaccagcaagggaaagagagcguccaaaggaggaaagaccuguggguuuguggaugaaagaggcuuauacaaguccuugaagggggcauguaagcucaagcuauguggggucuccgggcucagacuaauggaugggacuuggguugcaauccagacaucagaagagaccaagugguguccuccugaucaguuggugaaucugcaugaccuucacucagaugagauagagcaucuuguugucgaggaguuggucaagaaaagggaggagugcuuaaaugcauuaaaaucuaucaugaccacuaaaucaguaaguuucagacgucucagccacuugagaaaacuuguuccaggcuuugggaaagcauauaccauauucaacaaaaccuuaauggaagcggacgcccacuacaagucaaucagaacuuggaaugagauaauccccucaaaaggguguuugagagucggggggaagugucauccucauguggaugggguguucuucaacggcauaauacuggguccggacgggcauguccugaucccagagaugcagucgucucuucuccaacagcauauggaacuguuggagucuucugugaucccccugaugcauccccuggcagaccucucaacagucuuuaaggauggugaugaagcggaagacuucguugaaguucaucuuccggauguucacaaacagaucucagggguggaucuuggccucccgagcuggggaaaguaugugcuaaugagugcaggugccuuggcaauccuaauguuggugaucucuuuaaugaaauguuucuggggggucaacagaacaaaaccaauacaacaggguccuagagaaucagaaagaaagguaucaauugcuccccagagcaggaaaguuauaucuucuugggagucuuauaagaauggaggggagacugaacuguaa

SEQ ID NO: 63342 - RNA, 1575 nt, Artificial Sequence
  derived and/or modified CDS sequence (wt) from glycoprotein__RABV__JQ685970.1
auggucucucaggcucuuuuguuuguaucuccuuugauuuuaucacuguguuccggggaauuccccauuuacacgauaccagacaaacuggguccuuggagcccuauugacauacaucaucucagcuguccgaacaacuugguuguggaggacgagggaugcaccaaccugucgggguuuuccuacauggaacucaaagugggauacaucucagccauaaaagugaacggguucacuugcacaggcguugugacagaggcagaaacuuacaccaacuuuguugguuaugucacaaccacauucaaaagaaagcauuuccgcccuacgccagacgccuguagagcugcguacaacuggaagauggccggugacccaagauaugaagagucccugcacaauccguaccccgacuaccauuggcuucgaacugugaagaccaccaaagagucucucguuaucauaucuccaaguguugcagaucuggacccauaugacaaaucccuucacucaagaguauuuccuaguggaaagugcucggggauaacugugucuucuaccuacugcuuaacuaaccaugauuacaccauuuggaugccagagaaucuaagacuagggacaucuugugacauuuuuacuaauagucgagggaagagagcauccagagguagcaagacuugcggcuuuguagaugagaggggccuauauaagucccugaaaggagcaugcaaacucaaguuaugugguguucuuggacuuagacucauggaugggacaugggucgcaaugcaaacaucagaugagaccaaauggugcccuucugaucaguuggugaauuugcacgacuuucgcucagacgagauugaacaucucguuguggaggaguuggucaagaaaagagaggaaugucuggaugcgauagagucaaucaugaccaccaaaucagugagcuuuagacgucucagccacuuaagaaagcuugucccuggguuuggaaaagcauauaccauauucaacaaaaccuugauggaggcugaugcucauuacaagucaguucggaccuggaaugagauuauucccucgaaaggguguuuaagagucggggggaggugucauccucaugugaacgguguguucuucaaugguauaauauugggaccugacggccauguucuaaucccagagaugcaaucaucccuccuccagcaacauguggaguuguuggaauccuccguuaucccccugaugcaccccuuggcagacccgucuacaguuuucaaggauggugaggaggcugaggauuuuguugaaguucaucuuccugaugugcacaaacaggucuccggggucgaccugggucucccgaacuggggcaaguaugcauuagugagugcgggagcccugacugccuugauguugauagcuuuccuaaugacauguugcagaggagucaaucuaccaaaaucuacgcaacgcaguccuggagggacaaggagaaaggugucugucgcuucucaaagcgggaaggucauagcuucuugggaggcauauaaaaguggaugugaaaccaaaauguga

SEQ ID NO: 63343 - RNA, 1575 nt, Artificial Sequence
  derived and/or modified CDS sequence (wt) from glycoprotein__RABV__JQ685971.1
augaucccucaggcucuucuguuugugccucuucugauuuccucauuguguuucggaaaauuuccaaucuauacgauacccgaaaaacucgggccuuggagucccauugacauacaucaucucagcuguccuaacaauuugguugcggaggacgaaggaugcaacagucugucaggguuuucuuauauggaacugaaggugggauacaucucugccauaaaagugaacggguucacuuguacaggugucgugacagaagcugagaccuauaccaacuuuguugguuaugucaccaccacauuuaagagaaaacacuuccgcccgacaccagaugcaugcagagcugcauacaacuggaagauggcaggugauccgagauaugaagagucucuucacaauccuuauccugauuaccauuggcuacggaccguaaaaaccaccaaagagucucuuguuaucauaucgccaaguguggcugauuuggacccauacgauaaaucccuucauucaagaguuuuuccugaugggaaguguuugggaauuacuaucucuucuacuuacugcucaacuaaccaugauuacacuaucuggaugccugaagaggcaagacucgggacaucuugugacauuuuuacaaccagcaaagggaagagagcaucuaagggagacaagauuugcggauucguggaugagaggggcuuauauaagucucuaaaaggagcaugcaaacuuaaguugugcggaguucuuggacuuagacuuauggauggaaccuggguuucaauucagacaccaggugaaaccaaauggugcucuccugaucagcuagugaaucuacaugauuuucacucagaugagauagagcaucucgucgcagaggaguuggucaaaaagagggaagaauguuuggaugcacuggaguccaucaugaccacaaaaucagucagcuuuagacgucucagccauuugagaaaacuugucccuggguuuggaaaggcauacaccauauucaacaaaaccuuaauggaggcugaugcucacuacaagucaguucggaccuggaacgaggucauccccucaaaagggugccuaagcgucggagggaggugucauccucaugugaauggaguguucuucaaugguauaauucuggguccagacggaagugucuugaucccggagaugcagucgucccuacuccaacagcauauggaacugcuggaguccucuguaaucccccugaugcaucccuuggcagacccaucaacagucuucaaagacggugacgaggcagagaacuuuguugagguucaccuuccggacguucacaaacaagucucaggaguugaucuuggucucccaaacugggggaaguauuugcugaugauugcaggugcucuggcaacccuaaugcugacaaucuuccuaaugacauguugcagaaggacuaagagagcggaaucaauacaauauggucucggagagucaggaaggaaagugucaguuacuccccaaagcgggaaaguuauaucuucaugggagucguauaagaguggaggcgagaccaggcuguga

SEQ ID NO: 63344 - RNA, 1575 nt, Artificial Sequence
  derived and/or modified CDS sequence (wt) from glycoprotein__RABV__JQ685974.1
augaucccucaggcucuucuguaugugccucuccugaucuccucguuguguuucgggggauuccccaucuacacgauaccagacaagcucggccccuggagucccauugacauacaucaucucagcugucccaacaauuugguuguggaggacgaggggugcaccagucugucaggguuuucuuacauggaacugaaggugggguacaucucugccauaaaggugaacggguucacuuguacuggugucgugacagaagccgagaccuacaccaacuuuguugguuaugucaccacuacauucaagagaaaacacuuucgcccuaugccagaugcaugcagagcugcauacaauuggaagauggccggugauccuagauaugaagaaucucuucaaaauccuuauccugacuacaguuggcuacggaccguaaagaccaccaaagagucucuuauuaucauaucuccaaguguagcggauuuggacccauacgacaaaucccuucauucaagaguuuucccuggugggaaguguuugggaauaacaaucucuucuaccuacugcucaacuaaccaugauuacaccaucuggaugccugaagaagcaagacucgggacuucuugugacauuuuuaccaacagcagagggaagagagcauccaaggggggcaagaccugcggauucguggacgaaaggggcuuguacaagucucuaaaaggagcauguaaacucaagcugugcggaguucccggacucagacuuauggauggaaccugggucacaauucagacaucagaugaaaccaaauggugcccuucugaucaauugguaaaucuacaugacuuucacucagaugagauagaacaucuugucguggaggaguuggucaagaagagggaagaaugucuggaugcacuggaguccaucaugaccaccaaauccguaagcuucagacgucuuagccacuugagaaaacuuguuccuggguuuggaaaggcauauacuauauucaacaagaccuuaauggaagcugaugcucauuacaagucaauucggaccuggaacgaaaucauccccucaaaagggugccuaaaagucggagggaggugucauccucauguggacggaguguucuucaaugguauaauucuggguccggacgggaauguccugaucccugagaugcaaucgucccuacuucaacaacauguggagcuguuggaguccucuguaaucccucuaaugcaucccuuggcagacccaucaacagucuuuaaggacggugaugaagcggaggacuuuguugagguucaccuuccggauauucacaagcaggucucaggggucgaccuuggucucccaaacugggggaaguaucugcuaaugagugcaggugcucuggcaacacuaaugcugauaaucuucuuaauggcauguugcagaagagcuaaucgaacagaaucaauacaacgagaucccggggagucaggaaggaaaguaucgauaccuucccaagacgggaaagucauaucuucaugggaguuguacaagaguggaggcgagaccaggcuguga

SEQ ID NO: 63345 - RNA, 1575 nt, Artificial Sequence
  derived and/or modified CDS sequence (wt) from glycoprotein__RABV__JQ685975.1
augguuccucaggcucucuuguuuguaccccuucuggucuuuucauuguguuucgggaaguuccccauuuacacgauaccagacaagcuuggccccuggagcccgauugauauacaccaucucagcuguccaaauaacuuggucguggaggacgaaggaugcaccaaccuguccggauucuccuacauggaacuuaaagugggauauaucucagccauaaaagugaacggguucacuuguacagguguugugacagaggcagaaacuuacaccaacuuugucgguuaugucacaaccacauucaagaggaagcauuuucgccccauaccagaugcauguagagccgcguacaacuggaagauggccggugacccuagauaugaagagucucuacacaauccguaucccgacuaccauuggcuucgaacugugaaaaccaccaaagagucucucgucaucauauccccuaguguggcagauuuggacccauacgacaaaucccuucacucaagggucuuuccuggcggaaagugcucaggaaugacgguguucucuaccuacugcucaacuaaccaugauuacaccauuuggaugcccgagaauccgagacuagggacaucuugugacauuuuugccaauagcagagguaagagagcauccagagggagcaagacuuguggcuuuguggacgaaagaggcuuguauaagucucuaaaaggagcaugcaaacucaaguuauguggaguucuuggacuuagacuuguagauggaacaugggucgcgaugcaaacaucagaugauaccaaauggugcccuccagaccaguuggugaauuugcacgacuuucgcucggacgagauugaguaucucguuguggaggaguuggucaagaaaagagaggagugucuagaugcacuagaguccaucaugaccaccaagucggugagcuucagacgucucagucacuuaagaaaacuugucccuggguuuggaaaagcauacaccauauucaauaaaaccuugauggaggcugaugcucacuacaagucaguccggaccuggaaugagaucaucccuucgaaaggguguuugagaguuggaggaaggugucauccucaugugaacggaguauuuuucaaugguauaauauuggggccugacggccauguucuaaucccagaaaugcaaucaucccuucuccagcagcauauggaguuguuggaguccucaguuauuccccugaugcaccccuuggcggacccuucuacaguuuucaaagaaggugaugaggcugaggauuuuguugaaguucaccuccccgauguacacaaacaggucucagaaguugaccugggucucccuaacuggggaaaguauauauugaugauugcaggggcccugauugcucugauguugauaauuuuccuaaugacauguugcggaagagucaaucgaucagaaucuaagcaacgcagucuuggugggacggggaggaaggugucugucacuucccaaagugggaaagucauaucuucaugggagucauauaaaagcggaggugaaaccagacuguga

SEQ ID NO: 63346 - RNA, 1575 nt, Artificial Sequence
  derived and/or modified CDS sequence (wt) from glycoprotein__RABV__JQ685978.1
augaucucucaagcucuucuguuugugccucuccugauuuccucguuguguuucggggaauuccccaucuacacgauaccagagaaacucggcccuuggagucccaucgacauacaucaccucaguugcccuaacaauuugguuguggaggaugagggaugcaacagucugucaggguuuucuuacauggaacugaaagugggauacaucucuuccauaaaaguaaauggguucacuuguacaggugucgugacugaagcugagaccuacaccaacuuuguugguuaugucaccaccacauucaagagaaaacacuuccgcccgaugccagaugcaugcagagcugcauacaacuggaaaauguccggagauccuagauaugaagagucucuucacaauccuuacccugauuaccauuggcuacggacuguaaaaaccaccaaagagucucuugucaucauaucgccaaguguggcugauuuggauccauacgacaaaucccuucauucaagggucuucucuggugggaaguguuugggaauaacaaucucuuccaccuacugcuccacuaaccaugauuacacuaucuggaugcccgaagaagcaagacuugggacuucuugugacauuuuuaccaacagcaaagggaagaaggcaucuaaggggggcaggacuugcggauucguggaugaaaggggauuauauaagucucuaaaaggggcaugcaaacucaaacugugcggaguuccuggacuuagacuuauggauggaacuugggucucaauucagacaucagaugagaccaaauggugcccuccugaucaacugguaaauauacaugauuuccgcucagaugagauagaacaucucguaguggaggaguuggucaagaagagggaagaaugccuggaugcacuggaguccauuaugaccaccaaaucaguaagcuucagacgucuuagccaccugaggaaacuuguuccuggguucggaaaggcauauacuauauucaacaaaacauuaauggaggcugaugcucacuacaagucaguucggaccuggaaugaaaucauccccucaaaagggugccuaagugucggagggaggugccauccucauguggacggaguguucuucaaugguauaauucuggguccggaugggaguguccugaucccugagaugcaaucaucccuacuucaacagcauauggagcuguuggaguccucuguaaucccccuaaugcauccauuggcaaacccaucaacagucuucaaggacggugaugaggcggaggacuuuguugaaguucaccuuccggacguucaagaacaggucucagggguugaccucggucucccaaacugggggaaguaugugcuuaugagugcaggugcuuuggcuauccuacugcugacaaucuuuuuaaugacauguugcagaagggccaauagaacaaaaucaauacgacaagguccuggggagucaggaaggaaaguaucuguuccuccccaaaacgggagagucauaucuucaugggagucauucaagagcggagaugagaccggccuguga

SEQ ID NO: 63347 - RNA, 1575 nt, Artificial Sequence
  derived and/or modified CDS sequence (wt) from glycoprotein__RABV__JQ685979.1
augaucucucaagcucuucuguuugugccucuccugauuuccucguuguguuucggggaauuccccaucuacacgauaccagagaaacucggcccuuggagucccaucgacauacaucaccucaguugcccuaacaauuugguuguggaggaugagggaugcaacagucugucaggguuuucuuacauggaacugaaagugggauacaucucuuccauaaaagugaauggguucacuuguacaggugucgugacugaagcugagaccuacaccaacuuuguugguuaugucaccaccacauucaagagaaaacacuuccgcccgaugccagaugcaugcagagcugcauacaacuggaaaauguccggagauccuagauaugaagagucucuucacaauccuuacccugauuaccauuggcuacggacuguaaaaaccaccaaagagucucuugucaucauaucgccaaguguggcugauuuggauccauacgacaaaucccuucauucaagggucuucucuggugggaaguguuugggaauaacaaucucuuccaccuacugcuccacuaaccaugauuacacuaucuggaugcccgaagaagcaagacuugggaccucuugugacauuuuuaccaacagcaaagggaagaaggcaucuaaggggggcaggacuugcggauucguggaugaaaggggauuauauaagucucuaaaaggggcaugcaaacucaaacugugcggaguuccuggacuuagacuuauggauggaacuugggucucaauucagacaucagaugagaccaaauggugcccuccugaucaacugguaaauauacaugauuuucgcucagaugagauagaacaucucguaguggaggaguuggucaagaagagggaagaaugccuggaugcacuggaguccauuaugaccaccaaaucaguaagcuucagacgucuuagccacuugaggaaacucguuccuggguucggaaaggcauauacuauauucaacaaaacauuaauggaggcugaugcucacuacaagucaguucggaccuggaaugaaaucauccccucaaaagggugccuaagcgucggagggaggugccauccucauguggacggaguguucuucaaugguauaauucuggguccggaugggaguguccugaucccugagaugcaaucaucccuacuucaacagcauauggagcuguuggaguccucuguaaucccccuaaugcauccauuggcaaacccaucaacagucuucaaggacggugacgaggcggaggacuuuguugaaguucaccuuccggacguucaagaacaggucucagggguugaccucggucucccaaacugggggaaguaugugcuuaugagugcaggugcucuggcuauccuacugcugacaaucuuuuuaaugacauguugcagaagggccaauagaacaaaaucaauacgacaagguccuggggagucaggaaggaaaguaucuguuccuccccaaaacgggagagucauaucuucaugggagucauucaagagcggagaugagaccggccuguga

SEQ ID NO: 63348 - RNA, 1575 nt, Artificial Sequence
  derived and/or modified CDS sequence (wt) from glycoprotein__RABV__JQ685980.1
auggucccucaagcucuuuuguuugugccccuucuggcuuuuccaauguguuucgggaaauuccccaucuacacgauaccagacaaacuuggucccuggaguccgauugacauacaucaucucagcuguccaaauaacuugguuguggaggacgaaggaugcacaaacuugucggguuucuccuacauggaacuuaaagugggauauauuucggccauaaaagugaacggguucacgugcacagguguggugacagaggcugagacuuacacuaacuuugucgguuauguuaccaccacguucaggagaaagcauuuccgcccaacaccagaugcgugucgagcugcuuacaacuggaaaauggccggugaccccagauaugaagaaucucuucauaauccguacccugacuaccauuggcuucgaaccgugaaaaccacgaaggagucucucaucaucauauccccaaguguagcagaccuagacccauaugacaaaucccuucacucgagggucuuuccuagcgggaagugcuugggaauaacaauaucaucuaccuacugcucgacuaaccaugauuacaccaucuggaugcccgagaaucugagauuagggacaucuugugacauauuuaccaauaguagagggaagagagcauccaaagggagcaggacuugcggauuuguugacgaaagaggcuuguauaagucuuuaaagggggcaugcaaacuuaaauuaugugggguucugggacuuagacuuauggacggaacaugggucgcgaugcaaacaucggaugagaccaaguggugucccccugaucaguugguaaaucugcacgacuuucgcucggacgagaucgaacaucuugucguggaggaguuggucaagaaaagagaggagugucuggaugcccuagaguccaucaugacuaccaagucggugaguuuuagacgucucagccacuugagaaaacuugucccuggguucggaaaagcauacaccauauucaacaaaacccugauggaagcugaugcucacuacaagucaguccggaccuggaaugagauuauccccuccaaggggugucugagaguuggagggaggugucauccccauguaaacggaguguuuuuuaacggcauaauauuaggcccugacggccauguucugaucccagagaugcaaucaucccuccuucagcaacauauggaguuguuggaaucgucaguuaucccucugaugcauccuuuggcagacccgucuacaguuuucaaggacggugaugaagcagaggauuuuguugagguucaccuucccgaugugcacaaacaaaucucagggguugaccugggucucccuaacuggggaaaguaugucuuaauaauugcagggguauugauugccaugauauugacaaucuucuuaaugacauguuguggaagagguaaucgacccaaguccacacaacacagucuuggagggauagggaggaaggugucagccacuucccaaagcgggaaggucauaucuucgugggagucauauaaaaacgggggugagacuagacuguga

SEQ ID NO: 63349 - RNA, 1575 nt, Artificial Sequence
  derived and/or modified CDS sequence (wt) from glycoprotein__RABV__JQ685981.1
augguuccucagguucuuuuguuuguaccccuucugguuuucucaauguguuucgggaaauuuccuaucuauacgauaccagacaaacuuggucccuggagcccgauugacauacaucaucucagcuguccaaacaaccugguuguggaagaugaaggaugcacuaacuugucggguuucuccuacauggaacuuaaggugggauacaucucggccauaaaaguaaacggguucacgugcacaggugugguaacagaggcagagacuuacacuaacuuugucgguuauguuaccaccacguucaaaagaaagcauuuccgcccaacaccagaugcaugucgagcugcuuacaacuggaagauggcaggugaccccagauaugaagaaucgcugcacaauccguacccugacuaccacuggcuucgaaccguuaaaaccacaaaggagucccucgucaucauauccccaaguguagcggaccuggacccauacgacaaaucccuucauucgagggucuuuccuagcgggaagugcucgggaauaacaauaucaucuacuuacugcucuacuaaccaugauuacacaaucuggaugccugagaauccgagacuggggacaucuugugacaucuuuaccaacaguagagggaagagagcauccaaagggggcaaaacuugcggauuuguugaugaaagaggcuuguauaagucuuugaaaggggcaugcaaacucaaguuguguggaguucucggccuuagacuuauggauggaacguggguugcgaugcaaacaucggacgaaaccaagugguguccuccugaucaguugguaaaucuacacgacuuucgcucggacgagaucgaacaucuuguuguagaggaguuggucaagaaaagagaggagugucuggaugcacuagaguccaucaugacuaccaagucggugaguuucagacgucucagccacuugaggaaacuugucccuggguucggaaaagcauacaccauauucaacaaaaccuugauggaagcagaugcccauuacaagucaguccgaaccuggaaugaaaucauccccuccaaaggguguuugagaguuggagggaggugucauccucacgugaaggggguguuuuuuaacgguauaauacuggguccugacggccauguucuaaucccagaaaugcaaucgucccuccuucagcagcauauggaguuguuggaauccucaguuauuccccugaugcacccuuuggcagacccgucuacaguuuucaaggacggugaugaagcagaggauuuuguugagguucaccuucccgacgugcacaaacaaauuucagguguugaccugggucuccccagcuggggaagguauguuuuggugagugcaggggucuugguuguccugauguugacaauuuucauaauaacauguugcggaagaguccaucgacccaaaucuacacaacacggucucggggggacagggaggaaggugucggucacuucccaaagcgggaaggucauaucuucaugggagucauauaagagugggggugagaccagacuguga

SEQ ID NO: 63350 - RNA, 1575 nt, Artificial Sequence
  derived and/or modified CDS sequence (wt) from glycoprotein__RABV__JQ685982.1
augguuccucaagcucuuuuguuugugccccuucuggcuuuuccaauguguuucgggaaauuccccaucuacacaauaccagacaaacuuggucccuggagcccgauugacauacaucaucucagcuguccaaauaacuugguuguggaagacgaaggaugcaccaacuugucggguuucuccuacauggaacuuaaagugggauacauuucggccauaaaagugaacggguucacgugcacaggugugguuacagaggcugagacuuacacuaacuuugucgguuauguuaccaccacguucaagagaaagcauuuccgcccaacaccagaugcaugucgagcugcuuacaacuggaaaauggccggugaccccagauaugaagaaucucuucauaauccguacccugacuaccauuggcuucgaaccgugaaaaccacgaaggagucucucaucaucauauccccaaguguagcagaccuagacccauaugacaaaucccuucacucgagggucuuuccuagcgggaagugcuugggaauaacaauaucaucuaccuacugcucgacuaaccaugauuacaccaucuggaugcccgagaaucugagauuagggacaucuugugacaucuuuaccaauaguagagggaagagagcauccaaagggagcaagacuugcggauuuguugacgaaagaggcuuguauaagucuuugaagggggcaugcaagcucaaauuaugugggguucugggacuuagacuuauggacggaacgugggucgcgaugcaaacaucggaugagaccaaguggugucccccugaucaguugguaaaucuacacgacuuucgcucggacgagaucgaacaucuugucguggaggaguuggucaagaaaagagaggagugucuggaugcccuagaguccaucaugacuaccaagucggugaguuuuagacgucucagccacuugagaaaacuugucccuggguuuggaaaagcauacaccauauucaacaaaacccugauggaagcugaugcucacuacaagucagucaggaccuggaacgagaucauccccuccaaggggugucugagaguuggagggaggugucauccccauguaaacggaguguuuuuuaacggcauaauacugggcccugacggccauguucugaucccagagaugcaaucaucccuccuucagcaacauauggaguuguuggaaucaucaguuaucccucugaugcauccuuuagcagacccgucuacaguuuucaaggacggugaugaagcagaggauuuuguugagguucaccuucccgaugugcacaaacagaucucagggguugaccugggucucccuaacuggggaaaguaugucuuaauaauugcagggguauugauugccaugauauugacaaucuucuuaaugacauguuguggaagagguaaucgacccaaguccacacaacacagucuuggaggaauagggaggaaggugucagccacuucccaaagcgggaaggucauauccucgugggagucauauaaaagcgggggugagaccagacuguga

SEQ ID NO: 63351 - RNA, 1575 nt, Artificial Sequence
  derived and/or modified CDS sequence (wt) from glycoprotein__RABV__JQ685983.1
augguuccucaagcucuucuguucguaccccuucugguuuuuccaauguguuucgggaaauuccccaucuacacgauaccagacaaacuuggucccuggagcccaauugacauacaucaucucaguuguccaaacaacuugguuguagaggacgagggaugcaccaauuugucggguuucuccuacauggagcuuaaagugggauacauuucagccauaaaaguaaacggguucacgugcacggguguggugacagaggcagaaacuuacacuaacuuuguugguuaugucaccaccacguucaaaagaaagcauuuccgcccaacaccggaugcaugucgagccgcuuacaacuggaaaauggccggugaccccagauaugaagaaucucugcacaauccguacccugacuaccauuggcuucgaaccgugaaaaccacaaaggaaucccuagucaucauaucuccaaguguagcggaccuggacccauacgauaaaucccuucacucgagggucuucccugacggaaagugcucgggaauaacaauauccucuaccuacugcccuaccaaccacgauuacaccaucuggcuucccgagaauccgagacuggggacaucuugugacaucuuuaccaauaguagagggaagagagcauccaaagggagcaagacuuguggauuuguugaugagagagguuuguauaagucauugaagggggcaugcaaacucaaguugugugggguucuuggacuuagacuuauggauggaacgugggucgcaaugcaaacgucugacgagaccaaguggugccccccagaucagcugguaaaucuacacgauuuucgcucggacgagaucgagcaucuuguuguggaggaguuggucaagaaaagagaggagugucuggaugcacuagaguccaucaugacuaccaagucagugaguuucagacgucucagccacuugagaaaacuugucccuggguucggaaaagcauacaccauauucaacaaaaccuugauggaggcugaugcucacuauaagucaguccgaaccuggaaugagaucauccccucgaaaggguguuuaagagucggggggaggugucauccucauguaaaugggguguucuucaacgguauaauauugggcccugauggccauguccuaaucccagagaugcaaucgucccuccuucagcaacauauggaguuguuggaauccucaguuaucccccugaugcacccguuagcggacccgucuacaguuuucaaagauggugaugaagcagaggauuuuguugaaguucaccuuccugauguacacaaacagaucucggggguugaccugggucucccuaauugggggaaguauguuuugguaagugcagggguccugaucgccuugauguugauaauuuuucuaaugacauguugcggaagaauccaucggcccaaguccacacaaugcgaucuaggagggacagggaggaaggugucaguaacuucccaaagcggaaagguuauaucuucaugggagucauauaaaagcgggggcgagaccagacuguga

SEQ ID NO: 63352 - RNA, 1575 nt, Artificial Sequence
  derived and/or modified CDS sequence (wt) from glycoprotein__RABV__JQ685984.1
augguuccucagguucuuuuguuuguaccccuucugguuuuuucauuguguuucgggaaguuccccauuuacacgauaccagacaaacuuggucccuggagcccuauugacauacaccaucucagcuguccaaauaaccugguuguggaggacgaaggauguaccaaccuguccggguuuuccuacauggaacuuaaagugggauacaucucagccauaaaagugaauggguucacuugcacagguguugugacagaggcagaaaccuacaccaacuuuguugguuaugucacaaccacauucaagagaaagcauuuccgccccaccccagacgcauguagagccgcguauaacuggaagauggccggugaccccagauaugaagagucucuacacaauccguaccccgacuaccauuggcuucgaacuguaaaaaccaccaaagagucccucguuaucauauccccaagugugacagauuuggacccauaugacaaaucccuucacucaagggucuucccuggcggaaagugcucaggaauaacgguguccucaaccuacugcucaacuaaucaugauuacaccauuuggaugcccgagaauccgagacuagggacaucuugugacauuuuuaccaauagcagagggaagagagcauccaaagggagcaagacuugcggcuuuguggaugaaagaggccuguauaagucucuaaagggagcaugcaaacucaaguuauguggaguucucggacuuagacuuauggauggaacaugggucgcgaugcaaacaucagaugagaccaaauggugcccuccagaucaguuagugaauuugcacgacuuucgcucagacgagauugagcaucucguuguggaagaguuagucaagaaaagagaggagugucuagaugcacuagaguccaucaugaccaccaagucagugaguuucagacgucucagucacuugagaaaacuugucccuggguuuggaaaagcauauaccauauucaacaaaaccuugauggaggcugaugcucacuacaagucaguccggacuuggaaugagaucauccccucaaaaggguguuugagaguugggggaaggugucauccucaugugaacgggguguuuuucaaugguauaauauuagggccugacggccauguucuaaucccagagaugcagucaucccuccuccagcaacacauggaguuguuggagucuucaguuaucccccugaugcaccccuuggcagacccuucuacaguuuucaaagacggugaugaggcugaggauuuuguugaaguucaccuccccgaugugcacaaacaggucucaggaguugaccugggucucccgaacugggggaaguauguauugaugauugcaggggccuugauugcccugauguugauaauuuuccugaugacauguugcaggagagucaaucgaccagaaucuacgcaacgcagucuuggagggacagggagaaaggugucaaucacuucccaaagcggaaaagucauaucuucaugggagucauauaagaguggaggcgagaccagacuguga

SEQ ID NO: 63353 - RNA, 1575 nt, Artificial Sequence
  derived and/or modified CDS sequence (wt) from glycoprotein__RABV__JQ685985.1
augguuccucaggcucuuuuguuuguacccauucugguuuucucauuguguuucgggaaauuccccauuuacacgauaccagacaaacucggucccuggagcccgauugacauacaccaccucagcuguccaaacaacuugguuguggaggaugaaggauguaccaaccugucaggguucuccuacauggaacuuaaagugggauacaucucagccauaaaagugaacggguucacuugcacagguguugugacagaggcagaaacauacaccaacuuugucggcuaugucacaaccacauucagaagaaagcauuuccgccccacaccagaugcauguagagccgcguacaacuggaagauggcaggugaccccagauaugaagagucucuacacaauccuuaccccgacuaccacuggcuucgaacugugagaaccaccaaggaaucucucgugaucauauccccaagcguggcagacuuggauccauaugacaaaucccuucacucgaggguuuucccuagcggaaaguguucaggaauaacggugucuuccaccuacuguucgacuaaccaugauuacaccauuuggaugcccgagaauccgagacuagggacaucuugugacauuuuuaucaauagcagagggaagagagcauccaaaggaagcaagacuugcggcuuuguagaugaaagaggccuguauaagucucuaaaaggagcauguaaacucaaguuauguggaguccuugggcucagacuuauggauggaacauggguugcgaugcagacaucagaggagaccaaauggugcccuccagaucaguuggugaaucugcacgacuuucgcucagacgagauugagcaucucgucguagaggaguuggucaagaaaagagaggagugucuggaugcacuggaguccaucaugaccaccaagucagugaguuucagacgucucagucauuuaagaaaacuugucccuggguuuggaaaggcauauaccauauucaacaaaaccuugauggaggcugaugcucacuacaagucaguccggaccuggaaugagaucauccccucaaaaggguguuuaagaguuggagggaggugucauccucaugugaacgggguguuuuucaaugguauaauauuagggccugauggccauguucuaaucccggagaugcaaucaucccuccuccaacaacauauggaguuguuggaguccucaguuaucccccugaugcacccccuggcagaccccucuacgguuuucaaagagggugaugaggcugaggauuuuguugaaguucaccuccccgaugugcacaagcaagucucaggaguugaucuaggucucccaaacugggggaaguauguguugaugagugcagggguccugauuucucggauguugcugauuuuccuaaugacuugcugcagaagagucaaucgaccagaaucuacgcaacgaagucccggaggggcagggaggaaggugucggucacuucccaaagcggaaaggucauaucuucaugggagucauauaaaagcggaggugagaccagacuguga

SEQ ID NO: 63354 - RNA, 1575 nt, Artificial Sequence
  derived and/or modified CDS sequence (wt) from glycoprotein__RABV__JQ685986.1
augguccuucaaguccuucuguucgcaccuuuuuugauuucaucguugugucuagggaaguucccuaucuauacaauaccagacaagcucggcccuuggagcccuaucgauauacaucaucucagcugucccaacaaucuagucguagaagacgaggggugcaacagucugucaggauuuuccuacauggaacuaaaagugggauauaucuccgccauaaaggugaacggguucaccuguacaggugucgugacugaagcugagacuuacaccaacuuuguugguuaugucaccaccacauucaagagaaaacacuuucgcccggugccugaugcguguagaucugcauacaacuggaaacuggcaggcgauccuagguaugaagagucucuucacaacccauaucccgaguaccacuggcugcgaaccguaaaaacaaccaaggagucucuuaucgucauaucgccuaguguggcugaccuggauccauaugauaaaucccuccacucaagaauuuuuccuagugggaaaugcuccgggaugacagucucuucuaccuacugcucaacuaaccaugaauacaccauauggaugcccgaaaaggcaagucucgggacgucuugugacauuuucaccaccagcaagggaaagagagcguccaaaggaggcaggacuuguggguuuguggaugagagaggcuuauacaagucuuugaagggagccuguaagcucaagcugugcgggguuuccgggcucagauuaauggaugggaccuggguugcaauucagacgucagaugaggccaagugguguucuccugaucaguuggugaaucugcaugaccuucacucggaugagauagagcaucuuguuguggaggaguuggucagaaaaagggaggagugcuuagaugcauuagaaucuaucaugaccaccaagucaguaagcuucagacgucucagccacuugagaaagcuuguuccaggcuuugggaaggcauauacgauauucaacaaaaccuuaauggaagcugacgcccauuacaagucgguccgaacuuggaaugagauaauccccucaaaaggguguuugagagucggggggaagugucauccucacgugaaugggguguucuucaacggcauaauacuggguccagacgggcauguccugaucccagagaugcagucgucucuucuccaacaacauauagaacuguuggagucuucugugauuccccugaugcaucccuuggcagaccucucaacagucuuuaaggauggugacgaggcggaagacuucguugaaguucaccuuccggauguucacaaacagaucucagggguggaccuuggccuuccaagcugggggaaauacguguugaugagugcaggugcuuuggcaacccuaguacuggugaucucuuuaaugaaauguugcaggugggucaacaaaacaaaaucaauacaacaggguccuagagaaucagaaagaaagguaucaguuacuccccaaaacggaaaagucauaucgucuugggagucuuacaagauuggaggagagacugggcuguaa

SEQ ID NO: 63355 - RNA, 1575 nt, Artificial Sequence
  derived and/or modified CDS sequence (wt) from glycoprotein__RABV__JQ685987.1
auggcuccucaggcucuuuggguuguaccccuccugggcuuuucguuguguuucgggaaauuccccauuuacacgauaccagacaaacuuggucccuggaguccgauugacauacaucaucucagcuguccaaacaaucugguuguggaggacgaaggauguaccaaccugucaggauuuuccuacauggaacuuaaaguuggauacaucucagccauaaaagugaacggauucacuuguacaggaguugugacagaggcagagaccuacacuaacuuuguugguuaugucacgaccacauucaagagaaagcacuuccgcccaacaccagaugcguguagaaccgcguacaacuggaagauggccggugaccccagauaugaggagucucuacacaacccauacccugacuaccauuggcuucgaacugugaagaccaccaaagagucucuuguuaucauaucuccaaguguggcagauuuggacccauaugacaaaucccuucacucgagggucuucccuagcggaaaaugcucaggaauaacagugucuucuaccuacuguuuaacuaaccaugauuacaccauuuggaugcccgagaauccgagauuagggacgucuugugacauuuuuaccaauagcagagggaagagagcauccaaagggaguaagacuugcggcuuuguagacgaaagaggcuuguacaagucucuaaaaggagcaugcaaacucaaguuauguggaguucugggacuuaaacuuauggaugggacaugggucgcgaugcaaacgucagaugagaccaaauggugcccuuccgaucaguuagugaaucugcaugacuuucgcucggacgaaauugagcaccuuguuguagaagaguuggucaagaagagagaggagugucuggaugcacuagaauccaucaugaccaccaagucagugaguuucagacgucucagucauuuaagaaaacuugucccuggguucggaaaagcauauaccauauucaacaaaaccuugauggaggcagaugcucacuacaagucaguucggacuuggaaugagaucaucccuucaaaaggguguuugagagugggggggaggugucauccucaugugaacgggguguuuuucaacggcauaauauuagggccugacggccauauucugauccccgagaugcaaucaucccuccuccagcaacauauggaguuguuggaauccucaguuaucccuuugaugcacccccuggcagacccgucuacaguuuucaaggacggugaugaggccgaggauuuuguugaaguucaccuacccgaugugcacaaacaggucucagggguugaccugggucucccaaacugggggagguauguaucacugggugcaggggccuugauugccuugauguugauaauuuuccuaaugacauguuguagaagaguuaaucgaccagaaccuacgcaacgcagucucgaagggaaagggaggaaaguaucggucacuucccaaagcgggaaggucauaucuucaugggagucauacaaaagcgggggugagaccagacuguga

SEQ ID NO: 63356 - RNA, 1575 nt, Artificial Sequence
  derived and/or modified CDS sequence (wt) from glycoprotein__RABV__JQ685988.1
augguuccucaggcucuuuugcuugugccccuucuggcuuuuccaauguguuucgggaaauuccccaucuacacaauaccagacaaacuuggccccuggagcccgauugacauacaucaucucagcuguccaaauaacuugguuguggaagacgaaggaugcaccaacuugucugguuucuccuacauggaacuuaaagugggguacauuucagccauaaaagugaacggguucacgugcacagguguggugacagaggcugagacuuacacuaacuuugucgguuauguuaccacuacguucaagagaaagcauuuccgcccaacaccagaugcaugucgagcugcuuacaacuggaaaauggccggugaucccagauaugaagaaucucuucauaauccguacccugacuaccauuggcuucgaacuguaaaaaccacgaaggagucccucaucaucauauccccaaguguagcggaccuagacccauaugacaaaucccuucacucgagggucuuuccuagugggaagugcuugggaauaacaauaucaucuaccuacugcucgacuaaccaugauuacacuaucuggaugcccgagaaucugagauuagggacaucuugugacaucuuuaccaauaguagagggaagagagcauccaaagggaguaagacuugcggauuuguugacgaaagaggcuuguauaagucuuugaagggggcaugcaagcucaaauuaugugggguucugggacuuagacuuauggacggaacaugggucgcgaugcaaacaucgaaugagaccaaguggugucccccugaucaguugguaaaucuacacgacuuucgcucggacgagaucgaacaucuugucguagaggaguuggucaagaaaagagaggagugucuggaugcccuggaguccaucaugacuaccaagucugugaguuuuagacgucucagccacuugagaaaacuugucccuggguucggaaaagcauacaccauauucaacaaaacccugauggaagcugaugcucacuacaagucaguccgaaccuggaaugagaucauccccucaaagggguguuugagaguuggagggaggugucauccucauguaaacggaguguuuuuuaacggcauaauacugggcccugacggccauguucugaucccagagaugcaaucaucccuccuucagcagcauauggaguuguuggaaucaucaguuaucccucugaugcaucccuuagcagauccgucuacagucuucaaggacggugaugaagcagaggacuuuguugagguucaccuucccgaugugcacaaacaaaucucagggguugaccugggucucccuaacugggggaaguaugucuuaauaauugcagggguccugauugccaugauauugacaaucuucuugaugacauguuguggaagagguaaucgacccaaguccacacaacacagucuuggggggauaggaaggaaggugucagccacuucccaaagcgggaaggucauaucuucgugggagucauauaaaagcggaagugagacuagacuguga

SEQ ID NO: 63357 - RNA, 1575 nt, Artificial Sequence
  derived and/or modified CDS sequence (wt) from glycoprotein__RABV__JQ685989.1
augguuccucaggcucuuuuguuuguacccauucugguuuucucauuguguuucgggaaauuccccauuuacacgauaccagacaaacucggucccuggagcccgauugacauacaccaccucagcuguccaaacaacuugguuguggaggaugaaggauguaccaaccugucaggguucuccuacauggaacuuaaagugggauacaucucagccauaaaagugaacggguucacuugcacagguguugugacagaggcagaaacauacaccaacuuugucggcuaugucacaaccacauucagaagaaagcauuuccgccccacaccagaugcauguagagccgcguacaacuggaagauggcaggugaccccagauaugaagagucucuacacaauccuuaccccgacuaccacuggcuucgaacugugagaaccaccaaggaaucucucgugaucauauccccaagcguggcagacuuggauccauaugacaaaucccuucacucgaggguuuucccuagcggaaaguguucaggaauaacggugucuuccaccuacuguucgacuaaccaugauuacaccauuuggaugcccgagaauccgagacuagggacaucuugugacauuuuuaucaauagcagagggaagagagcauccaaaggaagcaagacuugcggcuuuguagaugaaagaggccuguauaagucucuaaaaggagcauguaaacucaaguuauguggaguccuugggcucagacuuauggauggaacauggguugcgaugcagacaucagaggagaccaaauggugcccuccagaucaguuggugaaucugcacgacuuucgcucagacgagauugagcaucucgucguagaggaguuggucaagaaaagagaggagugucuggaugcacuggaguccaucaugaccaccaagucagugaguuucagacgucucagucauuuaagaaaacuugucccuggguuuggaaaggcauauaccauauucaacaaaaccuugauggaggcugaugcucacuacaagucaguccggaccuggaaugagaucauccccucaaaaggguguuuaagaguuggagggaggugucauccucaugugaacgggguguuuuucaaugguauaauauuagggccugauggccauguucuaaucccggagaugcaaucaucccuccuccaacaacauauggaguuguuggaguccucaguuaucccccugaugcacccccuggcagaccccucuacgguuuucaaagagggugaugaggcugaggauuuuguugaaguucaccuccccgaugugcacaagcaagucucaggaguugaucuaggucucccaaacugggggaaguauguguugaugagugcagggguccugauuucucugauguugcugauuuuccuaaugacuugcugcagaagagucaaucgaccagaaucuacgcaacgaagucccggaggggcagggaggaaggugucggucacuucccaaagcggaaaggucauaucuucaugggagucauauaaaagcggaggugagaccagacuguga

SEQ ID NO: 63358 - RNA, 1575 nt, Artificial Sequence
  derived and/or modified CDS sequence (wt) from glycoprotein__RABV__JQ685990.1
augguuccucaggcucuuuugcuugugccccuucuggcuuuuccaauguguuucgggaaauuccccaucuacacaauaccagacaaacuuggccccuggagcccgauugacauacaucaucucagcuguccaaauaacuugguuguggaagacgaaggaugcaccaacuugucugguuucuccuacauggaacuuaaagugggguacauuucagccauaaaagugaacggguucacgugcacagguguggugacagaggcugagacuuacacuaacuuugucgguuauguuaccacuacguucaagagaaagcauuuccgcccaacaccagaugcaugucgagcugcuuacaacuggaaaauggccggugaccccagauaugaagaaucucuucauaauccguacccugacuaccauuggcuucgaacuguaaaaaccacgaaggagucccucaucaucauauccccaaguguagcggaccuagacccauaugacaaaucccuucacucgagggucuuuccuagugggaagugcuugggaauaacaauaucaucuaccuacugcucgacuaaccaugauuacacuaucuggaugcccgagaaucugagauuagggacaucuugugacaucuuuaccaauaguagagggaagagagcauccaaagggagcaagacuugcggauuuguugacgaaagaggcuuguauaagucuuugaagggggcaugcaagcucaaauuaugugggguucugggacuuagacuuauggacggaacaugggucgcgaugcaaacaucgaaugagaccaaguggugucccccugaucaguugguaaaucuacacgacuuucgcucggacgagaucgaacaucuugucguagaggaguuggucaagaaaagagaggagugucuggaugcccuggaguccaucaugacuaccaagucugugaguuuuagacgucucagccacuugagaaaacuugucccuggguucggaaaagcauacaccauauucaacaaaacccugauggaagcugaugcucacuacaagucaguccgaaccuggaaugagaucauccccucaaagggguguuugagaguuggagggaggugucauccucauguaaacggaguguuuuuuaacggcauaauacugggcccugacggccauguucugaucccagagaugcaaucaucccuccuucagcagcauauggaguuguuggaaucaucaguuaucccucugaugcauccuuuagcagauccgucuacagucuucaaggacggugaugaagcagaggacuuuguugagguucaccuucccgaugugcacaaacaaaucucagggguugaccugggucucccuaacuggggaaaguaugucuuaauaauugcagggguccugauugccaugauauugacaaucuucuugaugacauguuguggaagagguaaucgacccaaguccacacaacacagucuuggggggauaggaaggaaggugucagccacuucccaaagcgggaaggucauaucuucgugggagucauauaaaagcggaagugagacuagacuguga

SEQ ID NO: 63359 - RNA, 1575 nt, Artificial Sequence
  derived and/or modified CDS sequence (wt) from glycoprotein__RABV__JQ685991.1
augguucuucaagcccuucuguucgcaccuuuucugauuucaucguuuugucucgggaaguucccuaucuauacgauaccagacaagcucggcccuuggagcccuaucgauauacaucaucucagcugucccaacaaucuagucauagaagacgaggggugcaacagucugucaggauuuuccuacauggaacugaaagugggauauaucuccgccauaaaggugaacggguucaccuguaccggugucgugacugaagcugagacuuacaccaacuuuguugguuaugucaccaccacauucaagagaaaacacuuucgcccgaugccagaugcguguagaucugcauacaacuggaaacuggcaggcgauccuagguaugaagagucccuucacaacccauaucccgaguaccacuggcugcggaccguaaaaacaaccaaggagucucuuaucgucauaucgccuaguguggcugaccuggauccauaugauaaaucccuccacucaagaaucuuuccuagugggaaaugcucagggaugacagucucuucuaccuacugcucaacuaaccaugaauacaccauauggaugcccgaaaaaguaggucucgggacgucuugugacauuuuuaucaccagcaagggaaagagagcguccaaaggaggcagaaccuguggguuuguggaugaaagaggcuuauacaaguccuugaagggagcauguaagcucaagcugugcgggguuucagggcucagauuaauggauggaaccuggguugcaauucagacgucagaugagaccaagugguguucuccugaucaguuggugaaucugcaugaccuucacucugacgagauagagcaccuuguuguggaggaguuggucagaaaaagggaggagugcuuagaugcauuagaaucuaucaugaccacuaagucaguaagcuucagacgucucagccacuugagaaagcucguuccaggcuuugggaaagcauauacgauauucaacaaaaccuuaauggaagcugacgcccauuacaagucgguccgaacuuggaaugagauaauccccucaaaaggguguuugagagucggggggaagugucauccucacgugaaugggguguucuucaauggcauaauacuggguccagacgggcauguccugaucccagagaugcagucgucucuucuccaacaacauauagaacuguuggagucuucugugauuccccugaugcaucccuuggcagaccucucaacagucuuuaaggauggugacgaagcggaagacuucguugaaguucaccuuccggauguucacaaacagaucucagggguggaccuuggccuuccaagcuggggaaaguacgugcugauaagugcaggugcguuggcaacccuaauacuggugauuucuuuaaugaaauguugcaggugggucaacagaacaaaaucaauacaacagggucccagagaaucagaacgaaagguaucaguugcuccccaaagcgggaaaguuauauccucuugggaguccuacaagauuggaggagagacuggacuguaa

SEQ ID NO: 63360 - RNA, 1575 nt, Artificial Sequence
  derived and/or modified CDS sequence (wt) from glycoprotein__RABV__JQ685992.1
auggucccgcaggcccuuuuguuugugccucuucugguguucucauuguguuucgggaaguuccccauuuacacgauaccagacaagcuugguccauggagucccauugauauacaucaucucagcuguccaaacaaucugguuguagaggaugaaggaugcaccaaccuaucaggauucuccuacauggaacucaaaguaggauacaucucagccauaaaggugaacggcuucacuuguacaggugugguuacagaggcagagacuuacacuaacuucguugguuaugucacuaccacguucagaagaaagcacuuccgcccaacacccgaugcguguagggccgcauacaacuggaaaauggcuggcgaccccagauaugaagagucccugcauaauccauaccccgacuaccauuggcuucggacuguuaaaaccaccaaggagucucuuguuauaauauccccgagcguggcagauuuggacccauaugacaaaucccuucacucgagaguuuuucccggcggaaagugcucaggaauaacaguaucuucuacuuacugcucaacuaaccaugauuacaccaucuggaugccugagaauccaagacucgggacaucuugugacaucuucgucaacagcagagggaagagggcguccaaggggggcaagacuuguggguuuguagaugagagagguuuguauaagucacuaaaaggggcuugcaaacucaaauuauguggggugccuggacucagacuuauggacggaacgugggucgcgauucagacgucagaugagaccaaauggugccccccugaucaguuaguaaaucuacaugacuuucgcucagaugaaaucgaacaucuugucguagaagagcuggucaagaaaagagaagaaugccuagacgcguuggaguccaucaugaccaccaagucuguaaguuucagacgucucagucaccugaggaaacucgucccuggguuugggaaagcauauacuauauucaacaaaaccuugauggaggcugaugcucacuauaagucgguccggacuuggaacgagaucaucccuucaaaaggguguuugagaguaggaggaagaugucauccucaugugaaugggguauuuuuuaaugguauaauauugggcccugauggccauguucugaucccagagaugcaaucgucccuccuccaacaacacauggaauuguuggaauccucagucauccccuuaaugcauccauuggcagacccgucaacaguuuucaaggauggugaugaggcggaagacuuuguugagguucaccuuccggaugugcauaaacugaucucaggggucgaccuuggucuucccagcugggggaaguauguguugaugagugcagguauucugacaacacugauguugaugaucuucuugaugacuuguugcaggaggguuaaucaaguaggaucaaaacaacaugggcucgaaggggcagggaggaaaguaucugucaccucccagaacgggagggucauauccuccugggagucauauaaaagcggaggugaaaccaggcuguga

SEQ ID NO: 63361 - RNA, 1575 nt, Artificial Sequence
  derived and/or modified CDS sequence (wt) from glycoprotein__RABV__JQ685993.1
augguucuucaagcccuuuuguucgcacccuuucugauuucaucguugugucuugggaaguucccuauuuauacgaucccagacaagcucggccccuggagcccuaucgauauacaucaucucagcugucccaacaaucuaguuguagaagaugaggggugcaacagucuaucgggauuuucuuacauggaacugaaagugggauauaucuccgccauaaaggugaauggguucaccuguacugguguugugacugaagcugagacuuacaccaacuuuguugguuaugucaccaccacauucaagagaaaacacuuucgcccgaugccggaugcguguagaucugcguacaacuggaaacuggcaggcgauccuagguaugaagagucucuucacaacccuuauccugauuaccacuggcugcggaccguaaaaaccaccaaggagucucuuauugucauaucgccuaguguggcugaccuggauccauaugacaaaucccuccacucaaggaucuuuccuggugggaaaugcucagggaugacaguuucuucuaccuacugcucaacuaaccaugaauacacuauauggaugccugaaaaggcaggucucgggacgucuugugacaucuuuaccaccagcaagggaaagagggcgaccaaagguggcaagaccuguggguuuguugaugagagagguuuauacaaguccuugaagggagcaugcaagcucaagcugugcggaguuucaggacuuagacuaauggauggaacuuggguugcaauucagacgucagaugagaccaagugguguucuccugaucaguuggugaauuugcaugaccuucacucagaugagauagagcaucuuguuguagaggaauuggucagaaaaagggaggagugcuuagaugcauuagaaucuaucaugaccacuaaaucaguaagcuucagacgccucagccacuugagaaagcucguuccaggcuuugggaaagcauauacgauauucaacaaaaccuuaauggaagcugacgcccacuacaagucgguccgaaccuggaaugagauaauccccucaaaagggugcuugagagucgggggaaagugucauccucaugugaaugggguguucuucaacggcauaauacuggguccagacgggcacguccugaucccagagaugcaaucgucucuucuccaacaacauauggaacuguuggagucuucugugaucccccugaugcaucccuuggcagacccuucaacagucuuuaaggacgaugacgaagcagaagacuuuguugaaguucaccuuccggauguucacaaacaggucucaggaguugaccucggccucccaagcuggggaagguaugugcugaugagugcaggugcucuggcaacccuuaugguggugaucuccuuaaugaaauguugcaagggggucaacagaacaaaaucaauaaaacaagguucuagagaaucagaacgaaagguaucaauuacuccccagagcgggaaaguuauaucuucuugggagucuuauaagaguggaggagagacuggacuguaa

SEQ ID NO: 63362 - RNA, 1575 nt, Artificial Sequence
  derived and/or modified CDS sequence (wt) from glycoprotein__RABV__JQ685994.1
auggucccuugggcccuucuguucgugccuuuucugaucucuucauuguguuuugggaaguucccuaucuacacaauaccagacaagcuagguccuuggaguccuaucgacauacaucaucucaguugucccaauaaucuuguuguggaagacgagggguguaauagucugucgggguuuucuuacauggaacuaaaagugggauacaucucugccauaaaagugaacggguucacuuguacuggugucgugacggaagccgagacauacacuaacuuuguugguuaugucaccaccacauucaagagaaaacacuuucgcccaaugcccgaugcauguagauccgcauacaauuggaaaauggcaggcgauccuagguaugaagagucccuucacaacccauacccugauuaucauuggcugcggaccguuaaaaccaccaaggagucucuuauuaucaucucgccaaguguggcugaccuagacccguaugacagaucccuucauucaaggauuuuuccuggggggaaaugcacgggucuaacagucucuuccaccuacugcucgaccaaccaugacuacaccaucuggaugccugaaaaagccgggcucgggacaucuugugacaucuucaccaacaguaaagggaagagagcguccaaaggaggcaagaccuguggauuuguggacgagagaggucuguauaaguccuugaaaggagcauguaagcucaagcugugcggaguuucugggcuuagacuuauggauggaacuuggguugcgauucagacauuggaugaaaccaaauggugcucuccugaucaacuggugaaucugcaugacuuccacucggaugagcuugagcaucuuguuguagaggagcugguuagaaagagggaggaaugucuggaugcauuagaauccaucaugaccacuaaaucgguaagcuucagacgucuaagccaccugagaaaacuaguuccuggguuugggaaggcauacaccauauucaauaaaacccuaauggaggccgaugcccacuacaagucuguucggacuuggagugagaucauccccucaaaaggguguuugagaguaggggggagaugucauccucauguaaauggaguguuuuucaauggcaucauucuagguccggacgggcauguguugaucccagaaaugcagucaucccuucuccaacaacauguggaacuguuggaguccucugugaucccccucaugcacccccuggcagauccuucagcggucuucaaagauggugacgaggcagaggauuuuguugagguucaucucccagauguccacaaacagaucucagggguggaccugggccucccaagcuggggaaaguauaugcugaugauugcaggugcucuaacgacucuaauguuguucaucuucuugaugacauguugcaaaagagucaacaaaaaggaaucaauacgacagagcccuagagaguuagaaagcaaaguaucaguuacuccccaaaacagaaaagucauaucuucaugggagucuuacaagagcggaggcgagaccaagcuguga

SEQ ID NO: 63363 - RNA, 1575 nt, Artificial Sequence
  derived and/or modified CDS sequence (wt) from glycoprotein__RABV__JQ685995.1
augguuccucagguucuuuuguuuguaccccuucugguuuuuucauuguguuucgggaaguucccccuuuacacgauacccgacaagcuuggucccuggagcccuauugauauacaccaucucagcuguccaaauaaccugguuguggaggacgaaggauguaccaaccuguccggguucuccuacauggaacuuaaagugggauacaucucagccauaaaagugagcggguucacuugcacagguguugugacagaggcagaaaccuacaccaacuuuguugguuaugucacaaccacauucaagagaaggcauuuccgccccaccccagaugcauguagagccgcguauaacuggaagauggccggugacccuagauaugaagagucucuacacaauccguaccccgacuaccauuggcuucgaacuguaaaaaccaccaaagagucucucguuaucauauccccaagugugacagauuuagacccauaugacaaaucccuucacucaagggucuucccuggcggaaagugcucagggauaacgguguccucuaccuacugcucaacuaaccaugauuauaccauuuggaugcccgagaguccgagacuaggaacaucuugugacauuuuuaccaacagcagagggaagagagcauccaaagggagcaagacuugcggcuuuguggaugagagaggccuguauaagucucuaaaaggagcaugcaaacucaaguuauguggaguucuuggacuuagacuuauggauggaacaugggucgcgaugcaaacaucagaugagacuaaauggugccuuccagaucaguuggugaaucuacacgacuuucgcucagacgagauugagcaucucgucguggaggaguuagucaggaaaagagaagaaugucuagaugcacuagaguccaucaugaccaccaagucagugagcuucagacgucucagucaccugagaaaacuugucccuggguuuggaaaagcauauaccauauucaacaaaaccuuaauggaggcugaugcucacuacaagucaauccggaccuggaaugagaucguccccucaaaaggguguuugagaguugggggaagaugucauccucauguaaacgggguguucuucaaugguauaauauuagggccugacggucagguucugaucccagagaugcaaucaucccuccuccagcaacacauggaguuguuggaauccucaguuaucccccugaugcaccccuuggcagaccccucuacaguuuucaaagagggugaugaggcugaggauuuuguugaaguucaucucccagaugugcacaaacaagucucaggaguugaccugggucucccgaacugggggaaguauguauugaugauugcaggggcuuugauugcccugauguugauaauuuuccuaaugacauguugcagaagagucaaucgaucagaaucuacgcaacaccgucuuagggggacagggaggaaggugucagucacuucccaaaccggaaaagucauaucuucaugggagucauauaagaguggaggugagaccagacuguga

SEQ ID NO: 63364 - RNA, 1575 nt, Artificial Sequence
  derived and/or modified CDS sequence (wt) from glycoprotein__RABV__JQ685996.1
augaucccucaggcucuucugucugugccucuucuaauuuccucguuguguuucgggaaauuccccaucuacacgauaccagagaagcucggcccuuggagucccaucgacauacaucaccucaguuguccuaacaauuugguuguggaggaugagggaugcaacagucugucaggguuuucuuacauggaacugaaggugggauacaucucugccauaaaaguuaauggguucacuuguacugguguugugacagaagcugagaccuacaccaacuuuguugguuacgucaccaccacauucaagagaaaacacuuccgcccuaugccggaugcaugcagagcugcauacaacuggaagacggccggcgauccuagauaugaagagucccuucacaauccuuauccugauuaccauuggcuaaggaccguaaaaaccaccaaagaaucccuuauuaucauaucgccaaguguggcugauuuggaccccuacgacaaaucucuucauucaagaaucuucccuggugggaaaugcuugggaauaacaaucucuuccaccuacuguucaacuaaccaugauuauacuaucuggaugcccgaagaagcaagacucgggacaucuugugacauuuuuaccaacagcaaagggaagagagcauccaagggggguaggacuuguggauucguggaugaacggggccuguauaagucucuaaaaggggcauguaaacuuaagcugugcggaguucuuggacuuagacuuauggauggaacgugggucgcuauucagacaccaaaugagaccaaauggugcucuccugaucagcuggugaauguacaugacuuucgcucagaugagauagaacaucucgucguggaggaguugaucaggaaaagggaagaaugucuagaugcacuggaguccaucaugacuacaaaaucaguaagcuucaggcgucucagcaacuugagaaaacuuguuccuggguuuggaaaggcauauacuauauucaacaaaaccuuaauggaggcugaugcucacuacaagucaguucggacuuggaaugaaaucauccccucaagagggugccugaaagucggagguaggugucauccucaugugaauggaguguuuuucaaugguauaauuuuggguccggaugggcauauccugauuccggagaugcaaucaucccuccuccaacagcauauggagcuguuagaauccucuguaauccccuuaauacacccucuggcagacccaucaacagucuuuaaggacggugaugaggcggaggacuuuguugagguucaccuuccggacguucaccaacaggucucagggguugaccucggucucccagacugggggaaguaugugcugaugagugcaggugcucuagcgaccgugaugcugacaauauucuugauaaccuguugcagaagggucaagagaacagaaucaauacaacaaggucuuggugagucaggaaggaaagugucgguaacuccccaaaacggaaaagucauguccucaugggaauauuacaagaguggaggcgggaccaggcuguga

SEQ ID NO: 63365 - RNA, 1575 nt, Artificial Sequence
  derived and/or modified CDS sequence (wt) from glycoprotein__RABV__JQ685997.1
augaucucucaaacucuucuauuugugccucuccugauuuccucgguguguuucggggaauuccccaucuacacgauacccgaaaaacucggcccuuggaguccuaucgacauacaucaucucaguuguccuaacaauuugguuguggaggacgagggaugcaacagucugucaggguuuucuuacauggaacugaaggugggauacaucucuucuauaaaagugaauggguucacuuguaccggugucgugacggaagcugagaccuacaccaacuuuguagguuaugucaccaccacauucaagagaaaacacuuccgcccgaugccagaugcaugcagagcugcauacaacuggaagauguccggagauccuagauaugaagagucucuucacaauccuuacccugauuaccauuggcuacggacaguaaaaaccaccaaagagucucuuguuaucauaucgccaagugugggugauuuggauccauacgacaaaucccuucauucaagggucuucucuggugggaaguguuugggaauaacuaucucuuccaccuacugcuccacuaaccaugauuacacucucuggaugcccgaagaagcaagacuugggaccucuugugacauuuuuaccaacagcaaagggaagagagcaucuaaggggggcaggaccugcggauucguggaugaaaggggauuauauaagucucuaaaaggggcaugcaaacuuaaacugugcggaguuccuggacuuagacuuauggauggaacuugggucucaauucagacaucagaugagaccaaauggugcccuccugaucaacugguaaauauacaugauuuucgcucagaugagauagaacaucucguaguggaggaguuggucaagaagagggaagaaugccuggaugcacuggaguccauuaugaccaccaaaucaguaagcuucagacguuugagccacuugagaaaacucguuccuggguucggaaaggcauauacuauauucaacaaaacauuaauggaggcugaugcucacuacaagucaguucggacuuggaaugaagucauccccucaaaagggugccuaagcgucggagggaggugccauccucauguggacggaguguucuucaauggcauaauucuggguccggacgggaguguccugauuccugagaugcaaucauccuuacuucaacagcauauggagcuguuggaguccucuguaaucccccugaugcaccccuuggcaaacccaucaacagucuucaaggacggugaugaggcagaggauuuuguugaaguucaccuuccggacguucaagaacaggucucagggguugaccucggucucccaaacugggggaaguaugugcuuaugagugcaggugcucuggcuauccuacugcuaacaaucuucuuaaugacauguugcagaagggccaauagaacaaaaucaauacgacaagguccugaggagucaggaaggaaaguaucgguuccuccccaaagcgggaaagucauaucuucaugggagucauuuaagagcgggggcgaaaccaggcuguaa

SEQ ID NO: 63366 - RNA, 1575 nt, Artificial Sequence
  derived and/or modified CDS sequence (wt) from glycoprotein__RABV__JQ685998.1
augaucccucaagcucuucuguuuuugccucuccugauuuccucguugugcucugggaaauuccccaucuacacgauacccgagaaacucggcccuuggaguccaauagacauacaucaucucagcugcccuaacaauuugguuguggaggaugagggauguaacagucugucaggguuuucuuacauggaacugaaggugggauacaucucugccauaaaagugaauggguucacuuguaccggugucgugacagaagcugagaccuacaccaacuuuguugguuaugucaccaccacauucaagagaaaacacuuccgcccgaugccagaugcaugcagagcugcauacaacuggaagauggccggcgauccuagauaugaagagucucuucacaauccuuauccugauuaccauuggcuacgaacagugaaaaccaccaaagaaucucuuguuaucauaucgccaaguguggcugauuuggauccauaugacaaaucucuucauucaagagucuucccuggugggaagugucugggaaucacaaucucuucuaccuauugcucuacuaaucaugauuacacuaucuggaugcccgaagaagcaaggcuugggaccucuugugacauuuuuaccaacagcaaagggaagagagcaucuaaggggggcaggacuugcggauucguggaugaaaggggccuauauaagucucuuaaaggggcauguaaacuuaaacugugcggaguuccgggacuuagacuuauggauggaacuugggucucaauccagacaucagaagagaccaaauggugcucuucugaucaacuggugaauauacaugauuuucgcucagaugagauagaacaucucgucguagaggaguuggucaagaaaagggaagaaugucuggaugcacuagaguccauuaugaccaccaaaucagugagcuuccgacgucucagccacuugaggaaacuuguuccuggguucggaaaggcauacacuauauucaacaacaccuuaauggaagcugaugcucacuacaagucaguuaagacuuggaacgagaucauccccucaaaagggugccuaagcgucggaggaaggugucauccuaaugugaacggaguguuuuucaaugguauaauuuuggguccggaugggaguguccugaucccggaaaugcaaucauccuugcuucaacagcauauggagcuguuggagucuucuguaaucccccuaaugcaucccuuggcaaacccaucuacagucuucaaggacggugaugaggcggaggaauuuguugagguucaccuuccggaugucaaagaacaggucucagggguugaccucggucucccaaacugggggagguaugugcugaugagugcaggugcucuggcgaucuuaguucugacaaucuucuuaaugaccuguuguagaagggcuaacagaacaaaaucuauacaacaaggucugggggagucaguaaggaaaguaucgguuccucuccaaaacgggaaggucauaucuucaugggagucguauaagaguggaggggaaaccaggcuguaa

SEQ ID NO: 63367 - RNA, 1575 nt, Artificial Sequence
  derived and/or modified CDS sequence (wt) from glycoprotein__RABV__JQ685999.1
augaucccucaggcucuucuguuugugccucuccugauucccucgcugugucucggggaauuccccaucuacacgauaccagacaaacucggcccuuggaccccuaucgacauacaucaucucagcugucccaacaaucugguugcagagaacgacgggugcaccagucugucaggguuuuccuauauggaacuaaaggugggauacaucucugccauaaaggugaacggguucacuuguaccgguguugugacagaagccgagaccuacacaaacuuuguagguuaugucacuaccacauucaagagaaagcacuuccgcccgaugccagaugccugcagagcugcacaugacuggaagauggccggugauccuagauaugaagauucccuucaaaauccuuauccugauuaccauugguuacggaccguaaagaccaccaaagagucgcucguuauuauauccccgaguguugcugauuuggaccccuacgacaagucccuucauucaagaguuuuccccagugggaaguguuuggggauaacagucucuuccaccuacugcucaaccaaccaugauuacaccaucuggaugcccguagaaccaagacuuggaacaucuugugauauuuuuaccaauagcagagggaagagagcaucuaagggaggcaggguuugcggauuuguggaugaaaggggcuuauacaaaucucucaaaggagcaugcaaacucaagcugugcggagucccugggauuaggcugauggauggaaccugggucucaauccagacaucagaagauauuaaguggugcccuccugaucgauuagugaaucuacacgacuuucauucggaugaacuagaacaucuuguuguagaggaauugaucaagaggagggaaaauugucuagaugcacuggaguccaucaugaccaccaaaucagugagcuucagacgucucagccacuugaggaagcuuguuccuggguuugggaaggcauacaccauauucaacaagaccuuaauggaagcugaugcucauuacaagucagucaagacuuggaacgaggucaucccuucgaaagguugccuggaagucggagggagaugucaccccccugugaacggaguauucuucaaugguauaauuuuggguccagauggaaauguucugaucccugagaugcaaucuucccugcuucaacaacauauggagcuguuagagucuucuguuaucccucugaugcaucccuuggcggacccaucaacagucuucaaggaaggugaugaggcggaagacuuugucgagguucaucuuccagauguccacaaacagguuucugauguugaccuuggucuuccgaguugggggaaguaucuguugaugagugcaggugcucuggcaauacugauucuggcgaucgucuuaauaauauguuguaggagggucaauaagacaggaucaacacagagaggucauagggaaucaagagggaaaaugucaguagcaccucaaaaugggaagaucauauccucaugggaguuguacaaaagagaaagugagacugggcuguga

SEQ ID NO: 63368 - RNA, 1575 nt, Artificial Sequence
  derived and/or modified CDS sequence (wt) from glycoprotein__RABV__JQ686000.1
augaucccccaggcucuucuguuugugccucuccugauucccucgcugugucucgggaaguuccccaucuacacgauaccagauaagcuuggccccuggagcccgauagacauacaucaucucagcugucccaacaauuugguuguggaagacgaagggugcaccagucugucaggguucuccuauauggaacugaaggugggauacaucucagccauaaaggugaacggguucacuuguaccgguguugugacagaagccgagaccuacaccaacuuugucgguuaugucaccaccacauuuaagagaaaacacuuccgcccgaugccagaugccugcagagcugcacacgacuggaagauagccggcgauccuagauaugaagauucucuucaaaauccuuauccugauuaccauuggcuacggaccguaaagaccaccaaggagucucucguuauuauaucuccgaguguggcugaguuggaccccuacgacaaaucccuucauucaagaguuuuccccagugggaaguguuuggggauaacagucuccucuaccuacugcucaacuaaccacgauuacaccaucuggaugcccguagaagcaagacuugggacaucuugugauauuuucaccaauagcagagggaagaaagcaucuaaggggggcaggacuugcggauuuguagaugaaaggggcuuguacaagucucugaaaggagcaugcaaacucaagcuaugcggaguccccgggcuccggcugauggauggaaccugggucucaauccagacaucagaugauauuaaauggugcccuccugaucaauuggugaaucuacaugacuuucacucagaugaaauagaacaucucgucguagaggaguugaucaagaaaagggaaggauguuuagacgcacuggaguccauaaugaccacuaaaucagugagcuucagacgucucagccacuugagaaagcuuguuccuggguuugggaaggcauacaccauauucaauaauaccuuaauggaagcugaugcucauuacaagucaguucggacuuggaacgaagucauccccucaaaagguugccuaaaagucggagggaggugucaucccccugugaacggaguauucuucaaugguauaauuuuggguccagaugggaauguucugaucccugagaugcaaucgucccugcuucaacaacauauggaacuguuggaguccucuguuaucccucugaugcaccccuuggcagacccaucaacagucuucaaagacggugaugaggcggaagacuuuguugagguucaucuuccggauguucacaaacaggucucggauguugaccuuggucuuccgaguugggggaaguaucuguugaugagcgcaggugcucuggcaacacugagucuggcgauauuuuuaauaacauguuguaggagggccaauaggacagaaucaacacagagaggucauagggagucaggagggaaagugucaguagccccucaaaacgggaaaaucauauccucaugggaguuguacaaaagugaaagugagaccgggauguga

SEQ ID NO: 63369 - RNA, 1575 nt, Artificial Sequence
  derived and/or modified CDS sequence (wt) from glycoprotein__RABV__JQ686001.1
augaucccucaggcucuucuguuugugccucucuugauucccucgcugugucucgggaaauuccccaucuacacaauaccagacaagcucggccccuggagcccgaucgacauacaucaucucagcugucccaacaaucugguugcagaagacgaagggugcaccagucugucaggguucuccuauauggaacugaaggugggauacaucucugcaauaaaggugaacggguucacuuguaccgguguugugacagaggcugagaccuacaccaacuuugucgguuaugucaccaccacauuuaagagaaaacacuuccgcccgaugccagacgccugcagagcugcacacgacuggaagauggccggugauccuagauaugaagauucucuucagaauccuuauccugauuaccauuggcuacggaccgugaagaccaccaaggagucgcucguuauuauauccccgaguguggcugauuuggaccccuacgacaagucccuucauucaagaguuuuccccagugggaaguguuuggggauaacagucuccucuaccuacugcucaacuaaccaugauuacaccaucuggaugcccguagaagcaagacuugggacaucuugugauauuuuuaccaauagcaaagggaagaaagcaucuaaggggggcaggacuugcggauuuguagaugaaaggggcuuguacaagucucugaaaggagcaugcaaacucaagcuaugcggaguccccgggcucaggcuaauggauggaaccugggucucaauccagacuucagaugauauuaaauggugcccuccugaucaauuggugaaucuacaugacuuucacucagaugaaauagaacaucuugucguagaggaauugaucaagaaaagagaaggaugucuagaugcacuggaguccaucaugaccaccaaaucagugagcuucagacgucucagccacuugagaaagcuuguuccuggguuugggaaggcauacaccauauucaacaauaccuuaauggaagcggaugcucauuacaagucaguucggacuuggaacgaagucauccccucaaaagguugccuaaaggucggagggaggugucaucccccugugaauggaguauucuucaaugguauaauuuuggguccagaugggaauguucugaucccugagaugcaaucgucccugcuucaacaacauauggaacuguuggagucuucuguuaucccucugaugcaucccuuggcagacccaucaacagucuucaaggacggugaugaggcggaagauuuuguugagguucaucuuccggauguucacaaacaggucucggagauugaccuuggucucccgaguugggggaaguaucuguugaugagugcagguguuuuggcaacacugauucuggcgaucuucuugauaacaugcuguagaagggccaauaggacagaaucaacacagagaggucguagggagucaggagggaaagugucaguagccccucaaaacgggaaaaucauauccucaugggaguuguacaaaagugaaagugagaccgggcuguga

SEQ ID NO: 63370 - RNA, 1575 nt, Artificial Sequence
  derived and/or modified CDS sequence (wt) from glycoprotein__RABV__JQ686002.1
augaucccucaggcucuucuguuuuugccuuuucuauuucccucguugugucucgggaaauuccccaucuauaccauaccggaaaagcucggcccuuggagucccaucgacauacaucaucucagcugcccuaacaauuugguuguggaggacgaggguugcgacagucugucaggguuuucuuacauggaacugaagguggguuacaucucugccauaaaggugaauggguucacuuguaccggugucgugacagaagcugagaccuacaccaacuuuguugguuaugucaccaccacauuuaagagaaaacacuuccgcccuaugccagaugcaugcagagcugcguacaacuggaagacagccggugacccuagauaugaggagucucuucacaauccuuauccugauuaccauuggcuacggaccguaaaaaccaccaaagaaucccuuauuaucauaucgccgaguguggcugauuuggacccauaugacaaaucccuucauucaaggguuuucccuggugggaaauguuuggggauaacaguuucuucuaccuacugcucaacuaaccaugacuauacuaucuggaugcccgaagaagcaagacucgggacaucuugugacauuuucaccaacagcaaagggaagagggcaucuaagggggguaggacuuguggauucguggaugaaaggggcuuauauaagucucuaaaaggggcauguaaacuuaagcugugcggaguuccuggacuuagacuuauggauggaacgugggucgcuauucagacaccaggugagaccaaauggugcucuccugaucagcugguaaaucuacaugacuuucguucagaugagauagaacaucucgucguggaggaguugaucaagaagagagaagaaugucuagaugcacuagaguccaucaugaccaccaaaucaguaagcuucagacgucucagcaacuugagaaaacuugucccuggguuuggaaaggcauacacuauauucaacaaaaccuuaauggaggcugaugcucacuacaagucaguucggacuugggaugaaaucauucccucaaaagggugccuaagagucggagggaggugucauccucauguaaacggaguguuuuucaaugguauaauucuggguccggauggacauguccugauuccagagaugcaaucgucccuccuccaacagcauauggagcuguuggaauccucuguaaucccccuaauacaucccuuggccgacccaucaacagucuucaaagacggugaugaagcggaggacuuuguugagguucaccuuccggacguucacaagcaggucucaggggucgaucuuggucucccaaacugggggaaguaugugcugaugggugcagguguucuagcgaccgugauacugacaauccucuuguuaacauguugcagaaggguuaacagaacaaaaccaaaacaacaaagucuugaggagucaggaaggaaaguaucgguuacuccucaaaaugggaaggucaugucuucaugggaguauuacaagagugagggcaggaccagucuguga

SEQ ID NO: 63371 - RNA, 1575 nt, Artificial Sequence
  derived and/or modified CDS sequence (wt) from glycoprotein__RABV__JQ686003.1
augaucccccaggcucuucuguuugugccucuccugauucccucgcugugucucgggaaguuccccaucuacacgauaccagauaagcuuggccccuggagcccgauagacauacaucaucucagcuguccuaacaauuugguuguggaagacgaagggugcaccagucugucaggguucuccuauauggagcugaaggugggauacaucucagccauaaaggugaacggguucacuuguaccgguguugugacagaagccgagaccuacaccaacuuugucgguuaugucaccaccacauuuaagagaaaacacuuccgcccgaugccagaugccugcagagcugcacacgacuggaagauagccggcgauccuagauaugaagauucucuucaaaauccuuauccugauuaccauuggcuacggaccguaaagaccaccaaggagucucucguuauuauaucuccgaguguggcugaguuggaccccuacgacaaaucccuucauucaagaguuuuccccagugggaaguguuuggggauaacagucuccucuaccuacugcucaacuaaccacgauuacaccaucuggaugcccguagaagcaagacuugggacaucuugugauauuuucaccaauagcagagggaagaaagcaucuaaggggggcaggacuugcggauuuguagaugaaaggggcuuguacaagucucugaaaggagcaugcaaacucaagcuaugcggaguccccgggcuccggcugauggauggaaccugggucucaauccagacaucagaugacauuaaauggugcccuccugaucaauuggugaaucuacaugacuuucacucagaugaaauagaacaucucgucguagaggaguugaucaagaaaagggaaggauguuuagacgcacuggaguccauaaugaccacuaaaucagugagcuucagacgucucagccacuugagaaagcuuguuccuggguuugggaaggcauacaccauauucaauaauaccuugauggaagcugaugcucauuacaagucaguucggacuuggaacgaagucauccccucaaaagguugccuaaaagucggagggaggugucaucccccugugaacggaguauucuucaaugguauaauuuuggguccagaugggaauguucugaucccugagaugcaaucgucccugcuucaacaacauauggaacuguuggaguccucuguuaucccucugaugcaccccuuggcagacccaucaacagucuucaaagacggugaugaggcggaagacuuuguugagguucaucuuccggauguucacaaacaggucucggauguugaccuuggucuuccgaguugggggaaguaucuguugaugagcgcaggugcucuggcaacacugauucuggcgaucuucuuaauaacauguuguaggagggccaauaggacagaaucaacacagagaggucauagggagucaggagggaaagugucaguagccccucaaaacgggaaaaucauauccucaugggaguuguacaaaagugaaagugagaccgggauguga

SEQ ID NO: 63372 - RNA, 1575 nt, Artificial Sequence
  derived and/or modified CDS sequence (wt) from glycoprotein__RABV__JQ686004.1
augaucccucaggcucuucuguuugugccucuccugauucccucgcugugucucgggaaauuccccaucuacacgauaccagacaagcucggccccuggagcccgaucgacauacaucaucucagcugucccaacaaucugguugcagaagacgaagggugcaccagucugucaggguucuccuauauggaacugaaggugggauacaucucugccauaaaggugaacggguucacuuguaccgguguugugacagaagcugagaccuacaccaacuuugucgguuaugucaccaccacauuuaagagaaaacacuuccgcccgaugccagacgccugcagagcugcacacgacuggaagauggccggugauccuagauaugaagauucucuucagaauccuuauccugauuaccauuggcuacggaccguaaagaccaccaaggagucgcucgucauuauauccccgaguguggcugauuuggaccccuacgacaagucccuucauucaagaguuuuccccagugggaaguguuuggggauaacagucuccucuaccuacugcucaacuaaccaugauuacaccaucuggaugcccguagaagcaagacuugggacaucuugugauauuuuuaccaauagcaaagggaagaaagcaucuaaggggggcaggacuugcggauuuguagaugaaaggggcuuguacaagucucugaaaggagcaugcaaacucaagcuaugcggaguccccgggcucaggcuaauggacggaaccugggccucaauccagacgucagaugauauuaaauggugcccuccugaucaauuggugaaucuacaugacuuucacucagaugaaauagaacaucuugucguagaggaauugaucaagaaaagagaaggaugucuagaugcacuggaguccaucaugaccaccaaaucagugagcuucagacgucucagccacuugagaaagcuuguuccuggguuugggaaggcauacaccauauucaacaauaccuuaauggaagcugaugcucauuacaagucaguucggacuuggaacgaagucauccccucaaaagguugccuaaaggucggagggaggugucaucccccugugaauggaguauucuucaaugguauaauuuuggguccagaugggaauguucugaucccugagaugcaaucaucccugcuucaacaacauauggaacuguuggagucuucuguuaucccucugaugcaucccuuggcagacccaucaacagucuucaaggacggugaugaggcggaagauuuuguugagguucaucuuccggauguucacaaacaggucucggagauugaccuuggucucccgaguugggggaaguaucuguugaugagugcagguguuuuggcaacacugauucuggcgaucuucuugauaacaugcuguagaagggccaauaggacagaaucaacacagagaggucguagggagucaggagggaaagugucaguagccccucaaaacgggaaaaucauauccucgugggaguuguacaaaagugaacgugagaccgggcuguga

SEQ ID NO: 63373 - RNA, 1575 nt, Artificial Sequence
  derived and/or modified CDS sequence (wt) from glycoprotein__RABV__JQ686005.1
augaucccucaggcucuuuugucuuugcuucucuugauuuccucuuugugucucgggaaauucccaaucuacacaauaccagacaagcucggcccuuggaguccuauugacauacaucaucucagcuguccuaauaacuugguuguagaggacgaggggugcaccaguuugucaggguuuucuuacauggaacugaaggugggauacauuucugcuauuaaagugaacgguuucacuuguaccgguguagugacagaggcugagaccuauaccaacuucguugguuauguuaccacaacauucaagagaaagcacuuucgcccaaugccagaugcaugcagagcugcacacgaauggaaaauggccggugauccuagauaugaagauucucuucaaaaucccuauccugauuaccauuggcuacggacuguaaagaccaccaaagagucucuuauuaucauaucuccaaguguggcugauuuggacccguaugacaagucucuucacucaaggguuuuuccuggugggaauuguuugggaauaacaaucucuucuaccuacugcucaacuaaucaugauuacaccaucuggaugcccgaggaagcgagacuugggacaucuugugacauuuuuaccaacagcagagggaagagagcaucuaaggggggcaagauuugcggauucguggacgaaaggggcuuguacaagucucugaaaggagcauguaaacuuaagcuaugcggaguucccggacuuagacuuauggacggaaccuggguaucaauucaaacaucggaugagaccaaaugguguccuccugaucaauuggugaauguacaugacuuucacucagacgagauagaacaucucauuguggaggagcuagucaagaaaagggaagaaugucuagaugcacuggagucuaucaugaccacuaaauccgugaguuucagacgccucagccacuuaaggaaacuuguuccuggguuuggaaaggcauauacuauauucaacaaaaccuuaauggaagcugaugcccacuacaagucgguucgaacuuggaaugagaucaucccuuccaaggggugccuaaaagucggagguaugugucauccucaugugggcgggguguuuuuuaaugguauaauucuagguccagacgggacugucuugaucccugaaaugcaaucguccuugcuccaacaacauauggagcuguuggaguccucugugaucccccugaugcaccccuuagcggacccgucaacgguuuucaaggaaggugaugaggcagaagacuuuguugagauucaccuuccagauguucacaagcaaaucucagggguugaccuuggucucccuagcugggggaaguauuuguugauaagugcaggugcucuggcaacacugauccugacaaucuucuuaauaacauguugcagaaaggucaauagaacagaaucaguacagcgaggucauagagaaucagaaaggaaagugccuguaaguccucaaaacgggagagucauauccuccugggagcuguacaaaaguggaggggaaaccaaucuguga

SEQ ID NO: 63374 - RNA, 1575 nt, Artificial Sequence
  derived and/or modified CDS sequence (wt) from glycoprotein__RABV__JQ686006.1
augaucccucaggcucuucuguuugugccucuucugauuuccucauuguguuucggaaaauuuccaaucuauacgauacccgaaaaacucggcccuuggagucccauugacauacaucaucucagcuguccuaacaauuugguugcggaggacgaaggaugcaacagucugucaggguuuucuuauauggaacugaaggugggauauaucucugccauaaaagugaacggguucacuuguacagguguugugacagaagcugagaccuauaccaacuuuguugguuaugucaccaccacauucaagagaaaacacuuccgcccgacaccagaugcaugcagagcugcauacaacuggaagauggccggugauccgagauaugaagagucucuucacaauccuuauccugauuaccauuggcuacggaccguaaaaaccaccaaagagucucuuguuaucauaucgccaaguguggcugauuuggacccauacgacaaaucccuucauucaagaguuuucccugaugggaaguguuugggaauuacuaucucuucuacuuacugcucaacuaaccaugauuacacuaucuggaugccugaagaggcaagacucgggacaucuugugacauuuuuacaaccagcaaggggaagagagcaucuaagggggacaagauuugcggauucguggaugagaggggcuuguauaagucucuaaaaggagcaugcaaacuuaaguugugcggaguucuuggacuuagacuuauggauggaaccuggguuucaauucagacaccaggugaaaccaaauggugcucuccugaucagcuagugaaucuacacgauuuucacucagaugagauagagcaucucgucgcagaggaguuggucaaaaagagggaagaaugucuggaugcacuggaguccaucaugaccaccaaaucaguuagcuuuagacgucucagccauuugagaaaacuuguuccuggguuuggaaaggcauacaccauauucaacaaaaccuuaauggaggcugaugcucacuacaagucaguucggaccuggaacgaggucauccccucaaaagggugccuaagcgucggagggaggugucauccucaugugaauggaguauucuucaaugguauaauucuggguccggacggaagcgucuugaucccggagaugcagucgucccuacuccaacagcauauggaacugcuggaguccucuguaaucccccugaugcaucccuuggcagacccaucaacagucuucaaagacggugacgaggcagagaacuuuguugagguucaccuuccggacguucacaaacaagucucagggguugaucuuggucucccaaacugggggaaguauuugcugaugauugcaggugcucuggcgacccuaaugcugacaauuuuccuaaugacauguugcagaaggacuaagagagcagaaucaauacaacauggucucggggagucaggaaggaaagugucaguuacuccccaaagcgggaaagucauaucuucaugggagucguauaagaguggaggugagaccaggcuguga

SEQ ID NO: 63375 - RNA, 1575 nt, Artificial Sequence
  derived and/or modified CDS sequence (wt) from glycoprotein__RABV__JQ686007.1
augauuccucgggcucuucuguuugugccucuccugauucccucucugugucuuggggaauuccccaucuacacgauaccagacaagcucggcccuuggagcccuaucgacauacaucaucucagcugucccaacaaucugguugcagaaaacgacgggugcaccagucugucaggguuuuccuauauggaacugaaggugggauacaucucugccauaaaggugaacggguucacuuguaccgguguugugacagaagcagagaccuacaccaacuuugucgguuaugucacuaccacauucaagaggaagcacuuccgcccgacgccagaugccugcagagcugcacacgacuggaagauggccggugaucccagauaugaagcuucccuucaaaauccuuauccugauuaccauuggcuacggaccguaaaaaccaccaaggagucacuuguuauuauauccccgaguguugcugauuuggacccuuacgacaagucccuucauucaagaguuuucccuagugggaaguguuuggggauaacagucucuuccaccuacugcucaaccaaccaugauuacaccaucuggaugcccguagaaccaagacuuggaacaucuugugauauuuuuaccaauagcagagggaagagagcaucuaaggggggcaggguuuguggauucguggaugaaaggggcuuauacaagucucucaaaggagcaugcagacucaagcugugcggaguccccgggauccggcuguuggacggaacaugggucucaauccagacuucagaagauaucaaguggugcccuccugaucgauuagugaaucuacacgacuuucacucggaugaaauagaacaucuuguuguagcggaauuaaucaagaggagggaaaauugucuagaugcacuggaguccaucaugaccaccaaaucagugagcuucagacgucucagucacuugaggaaacuuguuccuggguuugggaaggcauacaccauauucaacaagaccuuaauggaagcugaugcucauuacaagucaguuaagacuuggaacgaaguuaucccuucgaaagguugccuggaagucggagggagaugucauccccaugugaacggaguauucuucaaugguauaauuuuggguccggauggaaauguucugaucccugagaugcagucuucccugcuucaacaacauauggagcuguuagagucuucugucaucccucugaugcaucccuuggcagacccaucaacagucuucaaggagggugaugaggcagaagacuuuguugagguucaucuuccagauguccacaagcagguuucggauguugaccuuggccuuccgaguugggggaaguaucuguugauuagugcaggugcuuuggcaauacugauucuggcuaucgucuuaauaauauguuguaggagagucaauaagacaagauccacacagagaggucauagggaaucaggagggaaaaugucuguaguaccucaaaacgggaagaucauauccucaugggaguuauacaaaagugaaagugagacugggcuguga

SEQ ID NO: 63376 - RNA, 1575 nt, Artificial Sequence
  derived and/or modified CDS sequence (wt) from glycoprotein__RABV__JQ686008.1
augauuucucaggcuuuccuguuugugccuuuccuaauuucuucguuguguuucgggaaauucccaaucuacacgauaccagacaagaucggccccuggagucccaucgacauacaucaucucagcuguccuaauaacuugguuguggaggaugaggggugcaccagucugucaggauucucuuacauggaacugaagguuggauacaucucugcuauaaaggugaacggauucacuuguaccggcguugugacagaagcagagaccuacaccaacuuuguggguuaugucacaacuacguucaagagaaaacacuuucguccgaugccagaugcaugcagagcugcauacaacuggaagauggccggugauccuagauaugaagagucucuucaaaauccuuauccugauuacaauuggcuacggaccguaaagaccaccaaagagucucucauuauaauauccccaaguguggcugauuuggacccauacgacaaaucccuucauucaagagucuucccuaaugggaaguguuugggaauaacgguuucuucuaccuacugcucaacuaaccaugauuacacuaucuggaugcccgaagaagcaagacucgggacaucuugugacaucuuuaccaacagcaaggggaagagagcaucuaaggggggcaagacuugcggauucguggaugaaaggggccuguacaagucucuaagaggagcauguaaacuuaaacugugugggguuccuggacuuagacugauggauggaaccugggucuccauccagacaucagaugagacuaaauggugcccuccagaucagcuggugaauguacaugauuuucacucagaugagauagaacaucucgucguggaggaguuggucaggaagagggaagaaugucuggaugcacuggaguccaucaugaccaccaaaucuguaagcuucagacgucucagucacuugagaaaacucguuccuggguuuggaaaggcauauacuauauucaacaagacccugauggaagcugaugcucacuacaagucaauucagaccuggaaugagaucauccccucaaaagggugccucaaagucggagggaugugucauccccauuuggacggaguguuuuucaacgguauaaucuuggguccagacgggaaugucuuaaucccugaaaugcaaucgucccuacuucaacaacauauggagcuguuggagucuucuguaaucccccuaaugcaucccuuggcagacccaucaacagucuucaaggacggugaugaggcggaagacuuuguugaaguucaccuuccagauauucacaaacaggucucagggauugaucuuggucucccagacugggggaaauaucugcugaugagugcaggugcuuuagcaauauuacuguuaacaaucuucuuaaugacauguugcagaagggucaacagaacagaaucagcacagcgagauccuggagagucaggaaggaaaguaucaguaacuccucaaaacgggaaagucauauccucgugggaguuauauaagaguggaggcgauacuaggcuguaa

SEQ ID NO: 63377 - RNA, 1575 nt, Artificial Sequence
  derived and/or modified CDS sequence (wt) from glycoprotein__RABV__JQ686009.1
augaucccccaggcucuucuguuugugccucuccugauucccucgcugugucucgggaaguuccccaucuacacgauaccagauaagcuuggccccuggagcccgauagacauacaucaucucagcugucccaacaauuugguuguggaagacgaagggugcaccagucugucaggguucuccuauauggaacugaaggugggauacaucucagccauaaaggugaacggguucacuuguaccgguguugugacagaagccgagaccuacaccaacuuugucgguuaugucaccaccacauuuaagagaaaacacuuccgcccgaugccagaugccugcagagcugcacacgacuggaagauagccggcgauccuagauaugaagauucucuucaaaauccuuauccugauuaccauuggcuacggacuguaaagacuaccaaggagucucucguuauuauaucuccgaguguggcugauuuggaccccuacgacaaaucccuucauucaagaguuuuccccagugggaaguguuuggggauaacagucuccucuaccuacugcucaacuaaccacgauuacaccaucuggaugcccguagaagcaagacuugggacaucuugugauauuuucaccaauagcagagggaagaaagcaucuaaggggggcaggacuugcggauuuguagaugaaaggggcuuguacaagucucugaaaggagcaugcaaacucaagcuaugcggaguccccgggcuccggcugauggauggaaccugggucucaauccagacaucagaugauauuaaauggugcccuccugaucaauuggugaaucuacaugacuuucacucagaugaaauagaacaucucgucguagaggaauugaucaagaaaagggaaggauguuuagaugcacuggaguccauaaugaccacuaaaucagugagcuucagacgucucagccacuugagaaagcuuguuccuggguuugggaaggcauacaccauauucaauaauaccuuaauggaagcugaugcucauuacaagucaguucggacuuggaacgaagucauccccucaaaagguugccuaaaagucggagggaggugucaucccccugugaacggaguauucuucaaugguauaauuuuggguccagaugggaauguucugaucccugagaugcaaucgucccugcuucaacaacauauggaacuguuggagucuucuguuaucccucugaugcaccccuuggcagacccaucaacagucuucaaagacggugaugaggcggaagacuuuguugagguucaucuuccggauguucacaaacaggucucggauguugaccuuggucuuccgaguugggggaaguaucuguugaugagcgcaggugcucuggcaacacugauucuggcgaucuucuuaauaacauguuguaggagggccaauaggacagaaucaacacagagaggucauagggagucaggagggaaagugucaguagccccucaaaacgggaaaaucauauccucaugggaguuguacaaaagugaaagugagaccgggauguga

SEQ ID NO: 63378 - RNA, 1575 nt, Artificial Sequence
  derived and/or modified CDS sequence (wt) from glycoprotein__RABV__JQ686011.1
augaucucucaagcucuucuguuugugccucuccugauuuccucguuguguuucggggaauuccccaucuacacgauaccagagaaacucggcccuuggagucccaucgacauacaucaccucaguugcccuaacaauuugguuguggaggaugagggaugcaacagucugucaggguuuucuuacauggaacugaaagugggauacaucucuuccauaaaagugaauggguucacuuguacaggugucgugacugaagcugagaccuacaccaacuuuguugguuaugucaccaccacauucaagagaaaacacuuccgcccgaugccagaugcaugcagagcugcauacaacuggaaaauguccggagauccuagauaugaagagucucuucacaauccuuacccugauuaccauuggcuacggacuguaaaaaccaccaaagagucucuugucaucauaucgccaaguguggcugauuuggauccauacgacaaaucccuucauucaagggucuucucuggugggaaguguuugggaauaacaaucucuuccaccuacugcuccacuaaccaugauuacacuaucuggaugcccgaagaagcaagacuugggaccucuugugacauuuuuaccaacagcaaagggaagaaggcaucuaagggaggcaggacuugcggauucguggaugaaaggggauuauauaaaucucuaaaaggggcaugcaaacucaaacugugcggaguuccuggacuuagacuuauggauggaacuugggucucaauucagacaucagaugagaccaaauggugcccuccugaucaacugguaaauauacaugauuuucgcucagaugagauagaacaucucguaguggaggaguuggucaagaagagggaagaaugccuggaugcacuggaguccauuaugaccaccaaaucaguaagcuucagacgucuuagccacuugaggaaacucguuccuggguucggaaaggcauacacuauauucaacaaaacauuaauggaggcugaugcucacuacaagucaguucggaccuggaaugaaaucauccccucaaaagggugccuaagcgucggagggaggugccauccucauguggacggaguguucuucaaugguauaauucuggguccggaugggaguguccugaucccugagaugcaaucaucccuacuucaacagcauauggagcuguuggaguccucuguaaucccccuaaugcauccauuggcaaacccaucaacagucuucaaggacggugaugaggcggaggacuuuguugaaguucaccuuccggacguucaagaacaggucucagggguugaccucggucucccaaacugggggaaguaugugcuuaugagugcaggugcucuggcuauccuacugcugacaaucuuuuuaaugacauguugcagaagggccaauagaacaaaaucaauacgacaagguccuggggagucaggaaggaaaguaucuguuccuccccaaaacgggagagucauaucuucaugggagucauucaagagcggagaugagaccggccuguga

SEQ ID NO: 63379 - RNA, 1575 nt, Artificial Sequence
  derived and/or modified CDS sequence (wt) from glycoprotein__RABV__JQ699230.1
augguuccucaaguucuuuuguuuguuccccuucuaguuuucucgucauguuucgggaaauuccccauuuacacgauaccagacaaacuugguccauggagucccaucgauauacgucaucucagcuguccgaacaaucuuguuguggaagaugaagggugcaccaaucugucuggauuuuccuacauggaacucaaagugggauauauuucagccauaaaagugaacggauucaccuguacagguguggugacagaagcagaaaccuacacgaacuuuguugguuaugucaccaccacguuuaagagaaagcacuuucgcccuaugccggaugcgugcagagccgcauacaacuggaagauggcuggugaccccagguaugaagagucucugcacaauccguacccugacuaccacuggcuccgaacugucaagaccaccaaggagucccuugucaucauaucuccgagcguugcagauuuggacccguacgauaaaucccuucacucgagaguuuuuccuggcggaaaaugcucaggaauaaccguguccuccacuugcugcucuacuaaccacgacuacaccaucuggaugccugaaaauccuagacugggaacuucgugugacauuuucaccaauaguagagggaagagggcaucaaaagggggcaagacuuguggauuuguggaugaaagaggcuuguacaagucucuaaagggagcaugcaagcugaagcuaugugggguucuaggacuuagacuuauggacggaacauggguugcaauucagacaucagaugagaucaaauggugcucuccugaucagcuaguaaaucuacacgacuuucacucggaugagauugaacaucuuguuguggaggaguuggucaaaaagagggaagagugucuggacgcacuggagacuauuaugaccacaaaguccgugaguuucagacgucuuagucauuugaggaagcuagucccuggguuuggaaaggcguauaccauauucaacaaaaccuugauggaggcugaugcucacuauaaaucaauccggacuuggaaugaaaucauccccucuaaaggguguuuaagaguuggggggagaugucauccucaugugaacgggguguucuucaacggcauuauacuggguccugacggacauguucuaaucccagagaugcaaucgucccuccuccaccagcauauggaauuguuggaguccucagucaucccguugaugcaucccuuagcagacccgucaacagucuuuaaagacggcgacgaggcagaggacuuuguugagguucaccuuccggaugugcacaagcagaucucggggguugaucuuggucucccaaacugggggaaguaugugcugauaagugcaggugcucugacugcauuaauguugaugauuuucuuaaugacguguugcagaaaggcuaauagagcagagucaauacaacacaauccuggagagacagggaggaaagugucgguaacuucucacaacggaagggucauaucuucaugggaaucauauaaaagcggaggugagaccaaacuguga

SEQ ID NO: 63380 - RNA, 1575 nt, Artificial Sequence
  derived and/or modified CDS sequence (wt) from glycoprotein__RABV__JQ699231.1
augguuccucaaguucuuuuguuuguuccccuucuaguuuucucgucauguuucgggaaauuccccauuuacacgauaccagacaaacuugguccauggagucccaucgauauacaucaucucagcuguccgaacaaucuuguuguggaagaugaagggugcaccaaucuguccggauuuuccuacauggaacucaaagugggauauauuucagccauaaaagugaacggauucaccuguacagguguggugacagaagcagaaaccuacacgaacuuuguugguuaugucaccaccacguuuaagagaaagcacuuucgcccuaugccggaugcgugcagagccgcauacaacuggaagauggcuggugaccccagguaugaagagucucugcacaauccguacccugacuaccacuggcuccgaacugucaagaccaccaaggagucccuugucaucauaucuccgagcguugcagaucuggacccguacgauaaaucccuucacucgagaguuuuuccuggcggaaaaugcucaggaauaaccguguccuccacuugcugcucuacuaaccacgacuacaccaucuggaugccugaaaauccuagacugggaacuucgugugacauuuucaccaauaguagagggaagagggcaucaaaagggggcaagacuuguggauuuguggaugaaagaggauuguacaagucucuaaagggagcaugcaagcugaagcuaugugggguucuaggacuuagacuuauggacggaacauggguugcaauucagacaucagaugagaucaaauggugcucuccugaucagcuaguaaaucuacacgacuuucacucggaugagauugaacaucuuguuguggaggaguuggucaaaaagagggaagagugucuggacgcacuggagacuauuaugaccacaaaguccgugaguuucagacgucuuagucauuugaggaagcuagucccuggguuuggaaaggcguauaccauauucaacaaaaccuugauggaggcugaugcucacuauaaaucaauccggacuuggaaugaaaucauccccucuaaaggguguuuaagaguuggggggagaugucauccucaugugaacgggguguucuucaacggcauuauacuggguccugacggacauguucuaaucccagagaugcaaucgucccuccuccaccagcauauggaauuguuggaguccucagucaucccguugaugcaucccuuagcagacccgucaacagucuuuaaagacggcgacgaggcagaggacuuuguugagguucaccuuccggaugugcacaagcugaucucggggguugaucuuggucucccaaacugggggaaguaugugcugauaagugcgggugcucugacugcauuaauguugaugauuuucuuaaugacguguugcagaaaggcuaauagagcagagucaauacaacacaauccuggagagacagggaggaaagugucgguaacuucucacaacggaagggucauaucuucaugggaaucauauaaaagcggaggugagaccaaacuguga

SEQ ID NO: 63381 - RNA, 1575 nt, Artificial Sequence
  derived and/or modified CDS sequence (wt) from glycoprotein__RABV__JQ699255.1
augauuccucaaguucuuuuguuuguuccccuucuaguuuucucgucguguuuugggaaauuccccauuuacacgauaccagacaaacuugguccauggagucccaucgauauacaucaucucagcuguccgaacaaucugguuguggaagaugaaggaugcaccaauuugucuggauuuuccuacauggaacucaaagugggauauauuucagccauaaaagugaacggauucaccuguacagguguggugaccgaagcagaaaccuacacuaacuuuguugguuaugucaccaccacguuuaagagaaagcacuuucgcccuaugccggaugcgugcagagccgcauacaacuggaagauggcuggugaccccagguaugaagagucucugcacaauccguaccccgacuaccacuggcuccgaacugucaagaccaccaaggaaucccuugucaucauaucuccgagcguugcagauuuggacccguacgauaaaucccuucacucgagaguuuuuccuggcggaaaaugcucaggaauaaccguguccuccacuugcugcucuacuaaccacgacuacaccaucuggaugccugaaaauccuagacugggaacuucaugugacauuuucaccaauaguagagggaagagggcaucaaaagggggcaagacuuguggauuuguggaugaaagaggcuuguacaagucucuaaagggagcaugcaagcugaagcuaugugggguucuaggacuuagacuuauggacggaacaugggucgcgauucagacaucagaugagaucaaauggugcucuccugaucagcuaguaaaucuacacgacuuucacucggaugagauugaacaucuuguuguggaggaguuggucaaaaagagggaagagugucuggacgcacuggagacuauuaugaccacaaaguccgugaguuucagacgucuuagucauuugaggaagcuagucccuggguuuggaaaggcguauaccauauucaacaaaaccuugauggaggcugaugcucacuacaaaucaauccggacuuggaaugaaaucauccccuccaaaggguguuuaagaguuggggggagaugucauccucaugugaacgggguguucuucaacggcauuauacuggguccugacggacauguucuaaucccagagaugcagucgucccuccuccaccagcauauggaauuguuggaguccucagucaucccuuugaugcaucccuuagcagacccgucaacagucuuuaaagacggcgacgaggcagaggacuuuguugagguucaccuuccggaugugcacaagcagaucucggggguugaucuuggucucccaaacugggggaaguaugugcugauaagugcaggugcuuugacugcauuaauguugacgauuuucuuaaugacguguugcagaaagacuaauagagcagggucaauacaacacaguccuggagagacagggaggaaagugucggugacuucucacaacggaagggucauaucuucaugggaaucauauaaaagcggaagugagaccaagcuguga

SEQ ID NO: 63382 - RNA, 1575 nt, Artificial Sequence
  derived and/or modified CDS sequence (wt) from glycoprotein__RABV__JQ699257.1
augauuccucaaguucuuuuguuuguuccccuucuaguuuucucgucguguuuugggaaauuccccauuuacacgauaccagacaaacuugguccauggagucccaucgauauacaucaucucagcuguccgaacaaucugguuguggaagaugaaggaugcaccaauuugucuggauuuuccuacauggaacucaaagugggauauauuucagccauaaaagugaacggauucaccuguacagguguggugaccgaagcagaaaccuacacuaacuuuguugguuaugucaccaccacguuuaagagaaagcacuuucgcccuaugccggaugcgugcagagccgcauacaacuggaagauggcuggugaccccagguaugaagagucucugcacaauccguaccccgacuaccacuggcuccgaacugucaagaccaccaaagagucccuugucaucauaucuccgagcguugcagauuuggacccguacgauaaaucccuucacucgagaguuuuuccuggcggaaaaugcucaggaauaaccguguccuccacuugcugcucuacuaaccacgacuacaccaucuggaugccugaaaauccuagacugggaacuucaugugacauuuucaccaauaguagagggaagagggcaucaaaagggggcaagacuuguggauuuguggaugaaagaggcuuguacaagucucuaaagggagcaugcaagcugaagcuaugugggguucuaggacuuagacuuauggacggaacaugggucgcgauucagacaucagaugagaucaaauggugcucuccugaucagcuaguaaaucuacacgacuuucacucggaugagauugaacaucuuguuguggaggaguuggucaaaaagagggaagagugucuggacgcacuggagacuauuaugaccacaaaguccgugaguuucagacgucuuagucauuugaggaagcuagucccuggguuuggaaaggcguauaccauauucaacaaaaccuugauggaggcugaugcucacuacaaaucaauccggacuuggaaugaaaucauccccuccaaaggguguuuaagaguuggggggagaugucauccucaugugaacgggguguucuucaacggcauuauacuggguccugacggacauguucuaaucccagagaugcagucgucccuccuccaccagcauauggaauuguuggaguccucagucaucccuuugaugcaucccuuagcagacccgucaacagucuuuaaagacggcgacgaggcagaggacuuuguugagguucaccuuccggaugugcacaagcagaucucggggguugaucuuggucucccaaacugggggaaguaugugcugauaagugcaggugcuuugacugcauuaauguugacgauuuucuuaaugacguguugcagaaagacuaauagagcagggucaauacaacacaguccuggagagacagggaggaaagugucggugacuucucacaacgggagggucauaucuucaugggaaucauauaaaagcggaagugagaccaagcuguga

SEQ ID NO: 63383 - RNA, 1575 nt, Artificial Sequence
  derived and/or modified CDS sequence (wt) from glycoprotein__RABV__JQ699258.1
augauuccucaaguucuuuuguuuguuacccuucuaguuuucucgucguguuuugggaaauuccccauuuacacgauaccagacaaacuugguccauggagucccaucgauauacaucaucucagcuguccgaacaaucugguuguggaagaugaaggaugcaccaauuugucuggauuuuccuacauggaacucaaagugggauauauuucagccauaaaagugaacggauucaccuguacagguguggugaccgaagcagaaaccuacacuaacuuuguugguuaugucaccaccacguuuaagagaaagcacuuucgcccuaugccggaugcgugcagagccgcauacaacuggaagauggcuggugaccccagguaugaagagucucugcacaauccguaccccgacuaccacuggcuccgaacugucaagaccaccaaggagucccuugucaucauaucuccgagcguugcagauuuggacccguacgauaaaucccuucacucgagaguuuuuccuggcggaaaaugcucaggaauaaccguguccuccacuugcugcucuacuaaccacgacuacaccaucuggaugccugaaaguccuagacugggaacuucaugugacauuuucaccaauaguagagggaagagggcaucaaaagggggcaagacuuguggauuuguggaugaaagaggcuuguacaagucucuaaagggagcaugcaagcugaagcuaugugggguucuaggacuuagacuuauggacggaacaugggucgcgauucagacaucagaugagaucaaauggugcccuccugaucagcuaguaaaucuacacgacuuucacucggaugagauugaacaucuuguuguggaggaguuggucaaaaagagggaagagugucuggacgcacuggagacuauuaugaccacaaaguccgugaguuucagacgucuuagucauuugaggaagcuagucccuggguuuggaaaggcguauaccauauucaacaaaaccuugauggaggcugaugcccacuacaaaucaauccggacuuggaaugaaaucauccccuccaaaggguguuuaagaguuggggggagaugucauccucaugugaacgggguguucuucaacggcauuauacuggguccugacggacauguucuaaucccagagaugcagucgucccuccuccaccagcauauggaauuguuggaguccucagucaucccuuugaugcaucccuuagcagacccgucaacagucuuuaaagacggcgacgaggcagaggacuuuguugagguucaccuuccggaugugcacaagcagaucucggggguugaucuuggucucccaaacugggggaaguaugugcugauaagugcaggugcuuugacugcauuaauguugacgaucuucuuaaugacguguugcagaaagacuaauggagcagggucaauacaacacaguccuggagagacagggaggaaagugucggugacuucucacaacggaagggucauaucuucaugggaaucauauaaaagcggaagugagaccaagcuguga

SEQ ID NO: 63384 - RNA, 1575 nt, Artificial Sequence
  derived and/or modified CDS sequence (wt) from glycoprotein__RABV__JQ699259.1
augauuccucaagcucuguuguuuguuccucuucuaguuuucucgucguguuuugggaaauuccccauuuacacgauaccagacaaacucgguccauggagucccaucgauauacaucaucucagcuguccgaacaaucugguuguggaagaugaaggaugcaccaaucugucuggauucuccuacauggagcucaaagugggauauauuucagccauaaaagugaacggauucaccuguacagguguggugacggaagcagaaaccuacacuaacuuugucgguuaugucaccaccacauuuaagagaaagcacuuucgaccuaugccggaugcaugcagaucagcauacaacuggaagauggcaggugaccccagauaugaagagucucugcacaauccguauccugauuaucauuggcuccgaacugucaaaaccaccaaggagucccuugucaucauaucuccgagcguggcagauuuagacccguacgauaaaucccuucauucgagaguuuuuccuagaggaaaaugcucaggaauaaccguguccuccaccugcugcucuacuaaccaugacuacaccaucuggaugccugaaaauccuagacugggaacuucaugugacauuuucaccaacagcagagggaagagggcaucaaaagggagcaagacuuguggauuuguggaugaaagaggcuuguacaagucucuaaagggagcaugcaagcugaagcuguguggaguucuaggacuuagacuuauggacggaacaugggucgcgauucagacaucaaacgagaucaaauggugcccuccugaucagcuagugaaucuacaugacuuucacucggaugagauugaacaucuuguuguggaggaguuggucaaaaagagggaagagugucuggacgcacuggagacuauuaugaccacaaaguccgugaguuucagacgucuuagucauuugaggaagcuagucccuggguuuggaaaggcguauaccauauucaacaaaaccuugauggaggcugaugcccacuacaaaucaauccggacuuggaaugaaaucauccccuccaaaggguguuuaagaguuggggggagaugucauccucaugugaacgggguguucuucaacggcauuauacuggguccugacggacauguucuaaucccagagaugcagucgucccuccuccaccagcauauggaauuguuggaguccucagucaucccuuugaugcaucccuuagcagacccgucaacagucuuuaaagacggcgacgaggcagaggacuuuguugagguucaccuuccggaugugcacaagcagaucucggggguugaucuuggucucccaaacugggggaaguaugugcugauaagugcaggugcuuugacugcauuaauguugacgauuuucuuaauuacguguugcagaaagacuaauagagcagggucaauacaacacagucccggagagacagggaggaaagugucggugacuucucacaacggaagggucauaucuucaugggaaucauauaaaagcggaagugagaccaagcuguga

SEQ ID NO: 63385 - RNA, 1575 nt, Artificial Sequence
  derived and/or modified CDS sequence (wt) from glycoprotein__RABV__JQ699260.1
augguuccucaagccuuucuguuuguacccuuucuggccguuccauuguguuuugggaaauuccccauuuacacgauaccagacaaacucggucccuggagucccauugauauacaucaucucagcuguccgaauaauuugguuguggaggaugaaggauguaccaaucugucaggauuuucauacauggaacuuaaaguaggauacauuucagccauaaaggugaccggguucacuugcacggguguagugacggaagcagaaaccuacaccaacuuuguuggcuaugucaccaccacguuuaagagaaagcacuuucgaccaacaccggaugcgugcagauccgcauacaauuggaagauagcuggugaccccagauacgaagagucucugcacaaucccuauccugauuaucauuggcuccggacuguaaaaaccaccaaagaguccuuugucaucauaucuccaaguguggcagaucuagauccguacgauaaaucccuucauucgagaguuuuuccuagaggaaaaugcucaggaauaacggugucuucuaccuacugcucuacuaaccaugacuacaccaucuggaugccugagaaucccagacuggggaccucuugugauauuuucaccaacagcagagggaagagagcauccaaagggaguaagaccuguggauuuguggaugagagaggcuuguacaaaucucuaaaaggagcaugcaaacugaagcugugugggguucuuggacuuagacuuauggauggaacaugggucgcaauucagacaucagacgagaccaaguggugcccuccugaccagcuagugaaucuacaugacuuucauucggaugagauugaacaucuuguuguggaggaguuggucaagaaaagggaagagugucuagaugcacuggaguccaucaugaccaccaaguccgugaguuuccgacgucucagucacuugaggaaacuugugccuggauucggaaaagcauacaccauauucaauaagaccuugauggaggcugaugcucacuacaaaucgguccggacuuggaacgagaucauccccucuaaaggguguuugagaguuggaggcagaugucauccccaugugaacgggguguuuuuuaaugguauuauccuaggcccugacggccaugucuugaucccggaaaugcagucaucucuccuucagcagcauauggaguuguuggaauccucggucauccccuuaaugcauccuuuggcagauccaucaacgguuuuuaaagauggugacgaggcggaggauuuuguugagguucaccucccagaugugcauaagcaggucucaggggucgaucucggucucccaagcugggggaaguauguguugaugagcgcaggcauuuugacugcacugauguugaugauuuucuuaaugacguguugccgaaggaccaauagagcagaaucaauacaacacagucuuggagagacagggaggaaaguuucgguaaccucccaaaacgggagggucauauccucaugggagucauacaaaagcggaggugagaccaagcuguaa

SEQ ID NO: 63386 - RNA, 1575 nt, Artificial Sequence
  derived and/or modified CDS sequence (wt) from glycoprotein__RABV__JQ699262.1
augguuccucaagcccuucuguuuguaccccuucuggccguuccauuguguuuugggaaauuccccauuuacacgauaccagacaaacucggucccuggagucccauugauauacaucaucucagcuguccgaauaauuugguuguggaggaugaaggauguaccaaucugucaggauuuucauacauggaacuuaaaguaggauacauuucagccauaaaggugaccggguucacuugcacggguguagugacggaagcagaaaccuacaccaacuuuguuggcuaugucaccaccacguuuaagagaaagcacuuucgaccaacaccggaugcgugcagauccgcauacaauuggaagauagcuggugaccccagauacgaagagucucugcacaaucccuauccugauuaucauuggcuccggacuguaaaaaccaccaaagaguccuuugucaucauaucuccaaguguggcagaucuagauccguacgauaaaucccuucauucgagaguuuuuccuagaggaaaaugcucaggaauaacggugucuucuaccuacugcucuacuaaccaugacuacaccaucuggaugccugagaaucccagacuggggaccucuugugauauuuucaccaacagcagagggaagagagcauccaaagggaguaagaccuguggauuuguggaugagagaggcuuguacaaaucucuaaaaggagcaugcaaacugaagcugugugggguucuuggacuuagacuuauggauggaacaugggucgcaauucagacaucagacgagaccaaguggugcccuccugaccagcuagugaaucuacaugacuuucauucggaugagauugaacaucuuguuguggaggaguuggucaagaaaagggaagagugucuagaugcacuggaguccaucaugaccaccaaguccgugaguuuccgacgucucagucacuugaggaaacuugugccuggauucggaaaagcauacaccauauucaauaagaccuugauggaggcugaugcucacuacaaaucgguccggacuuggaacgagaucauccccucuaaaggguguuugagaguuggaggcagaugucauccccaugugaacgggguguuuuuuaaugguauuauccuaggcccugacggccaugucuugaucccggaaaugcagucaucucuccuucagcagcauauggaguuguuggaauccucggucauccccuuaaugcauccuuuggcagauccaucaacgguuuuuaaagauggugacgaggcggaggauuuuguugagguucaccucccagaugugcauaagcaggucucaggggucgaucucggucucccaagcugggggaaguauguguugaugagcgcaggcauuuugacugcacugauguugaugauuuucuuaaugacguguugccgaaggaccaauagagcagaaucaauacaacacagucuuggagagacagggaggaaaguuucgguaaccucccaaaacgggagggucauauccucaugggagucauacaaaagcggaggugagaccaagcuguaa

SEQ ID NO: 63387 - RNA, 1575 nt, Artificial Sequence
  derived and/or modified CDS sequence (wt) from glycoprotein__RABV__JQ699264.1
augguuccucaagcccuucuguuuguaccccuucuggccguuccauuguguuuugggaaauuccccauuuacacgauaccagacaaacucggucccuggagucccauugauauacaucaucucagcuguccgaauaauuugguuguggaggaugaaggauguaccaaucugucaggauuuucauacauggaacuuaaaguaggauacauuucagccauaaaggugaacggguucacuuguacggguguggugacggaagcagaaaccuacaccaacuuuguuggcuaugucaccaccacguuuaagagaaagcacuuucgaccaacaccggaugcgugcagauccgcauacaauuggaagauggcuggugaccccagauacgaagagucucugcacaaucccuauccugauuaucauuggcuccggacuguaaaaaccaccaaagaguccuuugucaucauaucuccaaguguggcagaucuagauccguacgauaaaucccuucauucgagaguuuuuccuagaggaaaaugcucaggaauaacggugucuucuaccuacugcucuacuaaccaugacuacaccaucuggaugccugagaaucccagacuggggaccucuugugauauuuucaccaacagcagagggaagagagcauccaaagggagcaagaccuguggauuuguagaugagagaggcuuguacaaaucucuaaaaggagcaugcaaacugaagcugugugggguucuuggacuuagacuuauggauggaacaugggucgcaauucagacaucagacgagaccaaguggugcccuccugaccagcuagugaaucuacaugacuuucauucggaugagauugaacaucuuguuguggaggaguuggucaagaaaagggaagaguguuuagaugcacuggaguccaucaugaccaccaaguccgugaguuuccgacgucucagucacuugaggaaacuugugccuggauucggaaaagcauacaccauauucaauaagaccuugauggaggcugaugcucacuacaaaucgauccggacuuggaacgagaucauccccucuaaaggguguuugagaguuggaggcagaugucauccccaugugaacgggguguuuuuuaaugguauuauccuaggcccugacggccaugucuugaucccggaaaugcagucaucucuccuucagcagcauauggaguuguuggaauccucggucauccccuuaaugcauccuuuggcagauccaucaacgguuuuuaaagauggugacgaggcggaggauuuuguugagguucaccuuccagaugugcauaagcaggucucaggggucgaucucggucucccaagcugggggaaguauguguugaugagcgcaggcauuuugacugcacugauguugaugauuuucuuaaugacguguugccgaaggaccaauagagcagaaucaauacaacacagucuuggagagacagggaggaaaguuucgguaaccucccaaaacgggagggucauaucuucaugggagucauacaaaagcggaggugagaccaagcuguaa

SEQ ID NO: 63388 - RNA, 1575 nt, Artificial Sequence
  derived and/or modified CDS sequence (wt) from glycoprotein__RABV__JQ699267.1
auggcuccucaagcccuucuguuuguaccccuucuggccguuccauuguguuuagggaaauuccccauuuacacgauaccagacaaacucggucccuggagucccauugacauacaucaucucagcuguccgaauaacuugguuguggaagaugaaggauguaccaaucugucaggauuuucauacauggaacuuaaaguaggauacauuucagccauaaaggugaacggguucacuuguacggguguggugacggaagcagaaaccuacaccaacuuuguuggcuaugucaccaccacguuuaagagaaagcacuuucgaccaacuccggaugcaugcagauccgcauacaauuggaagauggcuggugaccccagauacgaagagucucugcacaaucccuauccugauuaucauuggcuccggacuguaaaaaccaccaaagaguccuuuguuaucauaucuccaaguguggcagaucuagauccguacgauaaaucccuucauucgagaguuuuuccuagaggaaaaugcucaggaauaacggugucuucuaccuacugcucuacuaaccaugacuacaccaucuggaugccugaaaaucccagacuggggaccucuugugauauuuucaccaacagcagagggaagagagcauccaaagggagcaagaccuguggauuuguagaugagagaggcuuguacaaaucucuaaaaggagcaugcaaacugaagcugugugggguucuuggacuuagacuuauggauggaacaugggucgcgauucagacaucagacgagaccaaguggugcccuccugaccagcuagugaaucuacaugacuuucauucggaugagauugaacaucuuguuguggaggaguuggucaagaaaagggaagagugucuagaugcacuggaguccaucaugaccaccaaguccgugaguuuccgacgucucagucacuugaggaaacuugugccuggguucggaaaagcauacaccauauucaauaagaccuugauggaggcugaugcucacuacaaaucgguccggacuuggaacgagaucauccccucuaaaggguguuugagaguuggaggcagaugucauccccaugugaaugggguguuuuuuaaugguauuauccuaggcccugacggccaugucuugaucccagaaaugcagucaucucuccuucagcaacauauggaguuguuggaauccucggucauccccuuaaugcauccuuuggcagauccaucaacgguguuuaaagauggugacgaggcagaggauuuuguugagguucaccuuccagaugugcauaagcaggucucaggggucgaucucggucucccaagcugggggaaguauguguugaugagcgcaggcauuuugacugcacugauguugacgauuuucuuaaugacguguugccgaaggacuaauagagcagaaucaauacaacacagucuuggagagacagggaggaaagugucuguaaccucccaaagcgggagggucauaucuucaugggagucauacaaaagcggaggugagaccaagcuguaa

SEQ ID NO: 63389 - RNA, 1575 nt, Artificial Sequence
  derived and/or modified CDS sequence (wt) from glycoprotein__RABV__JQ699272.1
augguuccucaagcccuucuguuuguaccccuucuggccauuccauuguguuuugggaaauuccccauuuacacgauaccagacaaacucggucccuggagucccauugauauacaucaccucagcuguccgaauaauuugguuguggaggaugaaggauguaccaaucugucaggauucucauacauggaacuuaaaguaggauacauuucagccauaaaggugaacggguucacuuguacggguguggugacggaagcagaaaccuacacuaacuuuguuggcuaugucaccacuacguuuaagagaaagcacuuucgaccaacaccggaugcaugcagauccgcauacaauuggaagauggcuggugaccccagauacgaagagucucugcacaaucccuauccugauuaucauuggcuucggacuguaaaaaccaccaaagaguccuuuguuaucauaucuccaaguguggcagaucuagauccguacgauaaaucccuccauucgagaguuuuuccuagaggaaaaugcucaggaauaacggugucuucuaccuacugcucuaccaaccaugacuacaccaucuggaugccugaaaaucccagacuggggaccucuugugauauuuucaccaauaguagagggaagagagcauccaaagggagcaagaccuguggauuuguagaugagagaggcuuguacaaaucucuaaaaggagcaugcaaacugaagcugugugggguucuuggacuuagacuuauggauggaacaugggucgcgauucagacaucagacgagaccaaguggugcccuccugaccagcuagugaaucuacaugacuuucauucggaugagauugaacaucuuguuguggaggaguuggucaagaaaagggaagagugccuagaugcacuggaguccaucaugaccaccaaguccgugaguuuccgacgucucagucacuugaggaaacuugugccuggguucggaaaagcauacaccauauucaauaagaccuugauggaggcugaugcucacuacaagucgguccggacuuggaacgagaucauccccucuaaaggguguuugagaguuggaggcagaugucauccccaugugaacgggguguuuuuuaaugguauuauccuaggccccgacggccaugucuuaaucccggaaaugcagucaucucuccuucagcagcauauggaguuguuggaauccucggucaucccccuaaugcauccuuuggcagauccaucaacgguuuuuaaagauggugacgaggcggaggauuuuguugagguucaccuuccagaugugcauaagcaggucucaggggucgaucucggucucccaagcugggggaaguauguguugaugagcgcaggcauuuugacugcacugaugcugaugaucuucuuaaugacguguugccgaaggacuaauagagcagagucaauacaacacagucuuggagagacagggaggaaagugucgguaaccucccaaagcgggagggucauaucuucaugggagucauacaaaagcggaggugagaccaaguuguaa

SEQ ID NO: 63390 - RNA, 1575 nt, Artificial Sequence
  derived and/or modified CDS sequence (wt) from glycoprotein__RABV__JQ730682.1
augauuccucagacucuuuuguucguaccccuuuugguuuucucauuguguuucgggaaauuccccaucuacacgauaccagacaaacuuggccccuggaguccuauugauauacaucaucucaguugcccuaacaauuuaguuguggaggaugaggggugcaccaaccugucaggauucuccuacauggaacucaaaguaggguacauuucagccauaaaagugaacggguucacuugcacggguguugugacagaagcagagaccuacacaaacuuugucggcuacgucaccaccacguucaagagaaagcacuuccgcccgacaccagaugccugcagagcggcauacaacuggaagauggcaggugaccccagauaugaggagucucugcauaauccguauccggauuaucacuggcuucggacuguaaagaccaccaaggagucucucguuaucauaucuccgagugugucggacuuagacccguacgacaaaucucuucauuccagaguuuuucccagugguaaaugcucaggaauaacagugucuucuaccuauugucccacuaaccaugauuauaccaucuggaugccugaaaauccgagacuagggaccucuugugacauuuucaccaauagcagagggaagagggcauccaaaggaagcaaaaccuguggauuuguggacgaaagaggcuuguacaagucucuaaaaggagcaugcaaauugaagcuauguggaguucuuggacuuagacuuauggacggaacaugggcugcaauucaaacaucagaugaggccaaauggugccccccugaucaguuagugaauauacaugacuuucgcucggaugagaucgaacaucuuguuguggaggaguuagugaagaaaagggaagagugucuagaugcacuggaguccaucaugaccaccaaguccguaaguuuuagacgccucagucacuugaggaagcucguccccggguuuggaaaagcauauaccauauucaacaagaccuugauggaggcugaugcucacuacaaaucaguccguacauggaaugagaucaucccuuccaaagggugcuuaagaguuggggggagaugucacccccauguuaacgggguguuuuucaacgguaucauccuggguccugauggacauguucuaaucccagaaaugcagucgucucuccuucaacagcauauggaguuguuagaauccucgguaaucccgcuaaugcaccccuuggcagauccuucaacgguuuuuaaggauggugacgaggcggaagauuuuguugagguucaccuuccggaugugcacaagcaggucucgggaguugaucucggucucccaagcugggggaaguaugugcugaugaguguaggcacucugauugcacugauguugaugauucucuugacgacguguugcagaaaggcgaauggagcagaaucaauacaacaccgucuuggagagacgggaaggaaagugucagucaccucccagaacgggagggucauaucuuccugggagucguauaaaagcgggggugagaccaagcuguaa

SEQ ID NO: 63391 - RNA, 1575 nt, Artificial Sequence
  derived and/or modified CDS sequence (wt) from glycoprotein__RABV__JQ824889.1
augaucccucacgcucuucugucugugccucuucuaauuuccucguuguguuucgggaaauuccccaucuacacgauaccagagaagcucggcccuuggagucccaucgacauacaucaccucagcuguccuaacaauuugguuguggaggaugagggaugcaacagucugucaggguuuucuuacauggaacugaaggugggauacaucucugccauaaaaguuaauggguucacuuguacugguguugugacagaagcugagaccuacaccaacuuuguugguuacgucaccaccacauucaagagaaaacacuuccgcccuaugccggaugcaugcagagccgcauacaacuggaagacggccggcgauccuagauaugaagagucccuucacaauccuuauccugauuaccauuggcuaaggacuguaaaaaccaccaaagaaucccuuauuaucauaucgccaaguguggcugauuuggaccccuacgacaaaucucuucauucaagaaucuucccuggugggaaaugcuugggaauaacaaucucuuccaccuacuguucaacuaaccaugauuauacuaucuggaugcccgaagaagcaagacucgggacaucuugugacauuuuuaccaacagcaaagggaagagagcauccaagggggguaggacuuguggauucguggaugaacggggcuuguauaagucucuaaaaggggcauguaaacuuaagcugugcggaguuccuggacuuagacuuauggauggaacgugggucgcuauucagacaccaaaugagaccaaauggugcucuccugaucagcuggugaauguacaugacuuucgcucagaugagauagaacaucucgucguggaggaguugaucaggaaaagggaagaaugucuagaugcacuggaguccaucaugacuacaaaaucaguaagcuucaggcgucucagcaacuugagaaaacuuguuccuggguuuggaaaggcauauacuauauucaacaaaaccuuaauggaggcugaugcucacuacaagucaguucggacuuggaaugaaaucauccccucaagagggugccugaaagucggagggaggugucauccucaugugaauggaguguuuuucaaugguauaauuuuggguccggaugggcauauccugauuccggagaugcaaucaucccuccuccaacagcauauggagcuguuagaauccucuguaauccccuuaauacauccccuggcagacccaucaacagucuucaaggacggugaugaggcggaggacuuuguugagguucaccuuccggacguucaccaacaggucucagggguugaccucggucucccagacugggggaaguaugugcugaugagugcaggugcucuagcgaccgugaugcugacaauauucuugauaaccuguugcagaagggucaagagaacagaaucaguacaacaaggucuuggugagucaggaaggaaagugucgguagcuccccaaaacggaaaagucauguccucaugggaauauuacaagaguggaggcgggaccaggcuguga

SEQ ID NO: 63392 - RNA, 1575 nt, Artificial Sequence
  derived and/or modified CDS sequence (wt) from glycoprotein__RABV__JQ944704.1
auggauccucaggcgcuuuuguugguaccccuucuggguuuuucauuguguuucgggaaauucccuauuuacacgauaccagacaaacuugguccuuggaucccaauugauauacaucaucucagcugcccaaacaauuugguuguagaggacgaaggaugcaccaaccugucaggguucuccuacauggagcucaaaguuggauacaucucauccauaaaagugaacggguuuacuugcacgggcguugugacagaggcagaaaccuacacuaacuuuguugguuauguuaccaccacguucagaagaaagcauuuccguccaacaccagaugcauguagagccgcauacaacuggaaaauggcaggugacccucgauaugaggagucucuacacaacccguacccugacuaccauuggcuucgaacugugaaaaccacuaaggagucucucguuaucauauccccaaguguggcagauuuggacccauaugacaaaucccuucacucgagggucuucccuaguggaaagugcucaggaauaacggugucuucuaccuacugcucaacuaaccacgauuacaccauuuggaugcccgaaaaucugagacugggaacgucuugugacauuuuuaccaauaguagagggaagagggcaucuaaggggaguaagacuugcggcuuuguagaugagagaggccuguauaagucgcuaaaaggagcaugcaaacucaaguuauguggaguucuuggacuucgacuuauggauggaacauggguugcgaugcaaacaucagaugagaccaaauggugccccccugaucaguuggugaauuugcaugacuuucgcucggacgaaauugagcaucuuguuguagaggaguuagucaagaaaagagaggagugucuggaugcacuagaguccaucaugaccaccaagucagugaguuucagacgucucagucauuuaagaaagcuuguuccuggguuuggaaaagcauauaccauauucaacaagaccuugauggaggcugaugcucacuacaagucgguccggaccuggaaugaggucauccccucaagaggguguuuaagaguuggggggaggugucauccucaugugaacgggguguuuuucaaugguauaauauuagggccugacggccauguucuaaucccagagaugcaaucaucccuccuccagcaacauauagaguuguuggaauccucgguuauuccccugaugcacccccuggcagacccauccacaguuuucaaagacggugaugaagcugaggauuuuguugaaguucaucuucccgaugugcauaaacaggucucugggguugaccugggccucccaaacugggggaaguauguauuacugagugcaggggcccugauugccuugauguugauaauuuuccuaauaacauguugcagaagagucaaucgaccagaaucuacgcagcgcagucucagaggggcagggaggaaggugucgaucacuucccagagcgggaagguuauaucuucaugggagucauauaagagugggggugagacuagacuguga

SEQ ID NO: 63393 - RNA, 1575 nt, Artificial Sequence
  derived and/or modified CDS sequence (wt) from glycoprotein__RABV__JQ944705.1
augguuccucaaguuuuuuuguuuguaccucuucugguuuuuccguuguguuccgggaaauuccccauuuacacgauaccagacaaacuuggcccuuggagcccaauugacauacaucaucucagcugcccaaacaauuugguuguggaggacgaaggaugcaccaaccugucaggguucucauacauggagcuuaaaguuggauacaucucagccauaaaagugaacggauucacuugcacgggcguugugacagaggcagaaaccuacaccaacuuuguugguuaugucaccaccacguucagaagaaagcauuuccguccaacaccagaugcauguagagccgcguacaacuggaagauggccggugaccccagauaugaggagucccuacacaauccguauccugacuaucauuggcuucgaacuguaaaaaccaccaaggagucucucguuaucauauccccuaguguggcagauuuggacccauaugacaaaucccuucacucgagggucuucccuaguggaaagugcuuagggauaacaguguccucuacccacugcucaacuaaccacgauuacaccauuuggaugcccgagaauccgagaccagggacaucuugugacauuuuuaccaauaguagaggaaagagagcauccaaagggaguaagaccugcggcuuuguagaugagagaggccuguauaagucucuaaaaggagcaugcaaacucaaguuauguggaguucuuggacuuagacuuauggauggaacaugggucgcgaugcaaacaucagaugagaccaaauggugcccuccugaucaguuggugaaucugcacgacuuucgcucggaugaaauugagcaucuuguuguagaggaguuggucaagaaaagagaggagugucuggaugcacuggaauccaucaugaccacuaagucagugaguuucagacgucucagucauuuaagaaaacuuguucccggguuuggaaaagcauauaccauauucaacaagaccuugauggaggcugaugcucacuacaagucaguccggacuuggaaugagaucauccccucaaaaggguguuuaagagucggagggaggugucauccucaugugaacgggguguuuuucaauggcauaauauuagggccugauggccauguucuaaucccagagaugcaaucaucccuccuccagcaacauauggagcuguuggaauccucaguuauuccccugaugcacccccuggcagacccguccacaguuuuuaaggacggugaugaggcugaggauuuuguugagguucaccuuccugaugugcacaaacaggucucagggguugaccugggccucccaaacugggggaaguauguauuacugagugcaggggcccugauugccuuaauguugaugaucuuuuuaaugacaugcuguagaaaagucaaucgaccagaaucuacgcagcgcagucucggggggacagggaggaaggugucgaucacuucccaaagcgggaagguuauaucuucaugggagucauauaagagugggggugagacuagacuguga

SEQ ID NO: 63394 - RNA, 1575 nt, Artificial Sequence
  derived and/or modified CDS sequence (wt) from glycoprotein__RABV__JQ944706.1
auggcuccucaggcucuuuuguuugugccccuucugguuuuuccauuguguuucgggaaauucccuauuuacacgauaccagacaaacuuggucccuggagcccgauugacauacaucaucucagcuguccaaacaauuuaguuguggaggacgaaggaugcaccaaccugucaggguucuccuacauggaacuuaaaguuggguacaucucagccauaaaagugaacggguucacaugcacgggcguugugacagaggcagaaaccuacacuaacuuuguugguuaugucaccaccacauuuaaaagaaagcauuuccgcccaauaccagaugcauguagagccgcguauaauuggaagauggccggggaccccagauaugaggagucucuacacaauccguacccggacuaucauuggcuucgaacuguaaaaaccaccaaggagucucucguuaucauauccccaaguguggcagauuuggacccauaugacaagucccuucacucgagggucuucccuagcggaaagugcucaggaauaacggugucuucuaccuacuguucgacuaaccacgauuacacuauuuggaugcccgagaauccgagacuagggacaucuugugacaucuuugccaauaguagagggaagagagcauccaaagggaguaagaccugcggcuuuguagaugaaagaggcuuguauaagucucuaaaaggagcaugcaaacucaagcuauguggaguucuuggacuuagacuuauggauggaacgugggucgcgaugcagacaucggaugagaccaaauggugcccucccgaucagcuggugaaucugcacgacuuccgcucugaugaaauugagcaucucgucguagaggaguuggucaagaagagagaagagugucuggaugcacuagaguccaucaugaccaccaagucggugaguuucagacgucucagucauuuaagaaaacuugucccuggguucggaaaagcauacaccauauucaacaagaccuugauggaggcugaugcucauuacaaaucaguccggacuuggaaugagaucauccccucaaagggguguuugagaguaggagggaggugucauccgcaugugaacgggguguuuuucaaugguauaauauuggggccugacggccauguucuaaucccagagaugcaaucaucccuccuccagcaacauauggagcuguuggaguccucaguuauaccccugaugcacccccuggcagacccguccacaguuuucaaggacggugaugaggcugaggauuuuguugaaguucaccuucccgaugugcacaaacaggucuccgggguugaccugggucucccaaacugggggaaauacguauuacugagugcaggggcucugauugcuuugauguugauaauuuuccucaugacauguuguagaagagucaaucgaccagaaucuacgcaacgcugucuuggagggacagggagaaaggugucaguuacuucccaaagcgggaaagucauaucuucaugggagucauauaagagugggggugagacuagacuguga

SEQ ID NO: 63395 - RNA, 1575 nt, Artificial Sequence
  derived and/or modified CDS sequence (wt) from glycoprotein__RABV__JQ944707.1
augauuccucaagcucuuuuguuugugccccuucuggcuuuuccaauguguuucgggaaauuccccaucuacacaauaccagacaaacuuggucccuggagcccgauugacauacaucaucucagcuguccaaauaacuugguuguggaagacgaaggaugcaccaacuugucggguuucuccuacauggaacuuaaagugggauacauuucggccauaaaagugaacggguucacgugcacaggugugauuacagaggcugagacuuacacuaacuuugucgguuauguuaccaccacguucaagagaaagcauuuccgcccaacaccagaugcaugucgagcugcuuacaacuggaaaauggccggugaccccagauaugaagaaucucuucauaauccguacccugacuaccauuggcuucgaaccgugaaaaccacgaaggagucucucaucaucauauccccaaguguagcagaccuagauccauaugacaaaucccuucacucgagggucuuuccuagcgggaaguguuugggaauaacaauaucaucuaccuacugcucgacuaaccaugauuacaccaucuggaugcccgagaaucugagauuagggacaucuugugacaucuuuaccaauaguagagggaagagagcauccaaagggagcaagacuugcggauuuguugacgaaagaggcuuguauaagucuuugaagggggcaugcaagcucaaauuaugugggguucuaggacuuagacuuauggacggaacgugggucgcgaugcaaacaucggaugagaccaaguggugucccccugaucaguugguaaaucuccacgacuuucgcucggacgagaucgaacaucuugucguggaggaguuggucaagaaaagagaggagugucuggaugcccuagaguccaucaugacuaccaagucugugaguuuuagacgucucagccacuugagaaaacuugucccuggguuuggaaaagcauacaccauauucaacaaaacccugauggaagcugaugcucacuacaagucagucaggaccuggaacgagaucauccccuccaaggggugucugagaguuggagggaggugucauccccauguaaacggaguguuuuuuaacggcauaauacugggcccugauggccauguucugaucccagagaugcaaucaucccuccuucagcaacauauggaguuguuggaaucaucaguuaucccucugaugcauccuuuagcagacccgucuacaguuuucaaggacggugaugaagcagaggauuuuguugagguucaccuucccgaugugcacaaacaaaucucagggguugaccugggucucccuaacuggggaaaguaugucuuaauaauugcagggguauugauugccaugauauugacaaucuuccuaaugacauguuguggaagagguaaucgacccaaguccacacaacacagucuuggaggaauagggaggaaggugucagccacuucccaaagcgggaaggucauauccucgugggagucauauaaaagcgggggugagaccagacuguga

SEQ ID NO: 63396 - RNA, 1575 nt, Artificial Sequence
  derived and/or modified CDS sequence (wt) from glycoprotein__RABV__JQ944708.1
augguuccucaggcucuuuuguuuguaccccuucugguuuuuccauuguguuucgggaaauucccuauuuacacaauaccagacaaacuugguccuuggagcccgauugacauacaucaucucagcugcccaaacaauuugguuguggaagacgaaggaugcaccaaccugucaggguuuuccuacauggaacuuaaaguuggauacaucucagccauaaaagugaauggguuuacuugcacgggcguugugacagaggcagaaaccuacacuaacuuuguugguuaugucaccaccacguucaaaagaaagcauuuccguccaacaccagaugcauguagagccgcguacaacuggaagacggccggugaccccagauaugaggagucucuacacaauccguacccugacuaccauuggcuucgaacuguaaaaaccaccaaggagucucucguuaucauauccccaaguguggcagacuuggacccauaugacaaaucccuccacucgagggucuucccuaguggaaagugcucaggaauaacggugucuucuaccuacugcucaacuaaccacgauuacaccauuuggaugccggagaaucugagacuagggacgucuugugacauuuuuaucaauaguagaggaaagagagcauccaaagggagucagaccugcggcuuuauagaugagagaggccuguauaagucucuaaaaggagcaugcaaacucaaguuauguggaguucuuggacucagacuuauggacggaacaugggucgcgaugcaaacaucacaugagaccaaauggugcccuccugaucaguuggugaaucugcacgacuuucgcucggaugaaauugagcaucuuguuguagaggaguuggucaagaaaagagaggagugucuggaugcacuagaguccaucaugaccaccaagucagugaguuucagacgucucagucauuuaagaaagcuuguuccuggguuuggaaaagcauauacuauauucaacaagaccuugauggaggcugaugcucacuacaagucaguccggacuuggaacgagaucauccccucaaaagggugcuuaagaguuggagggaggugucacccucaugugaacgggguguuuuucaaugguauaauauuagggcccgaaggccauguucuaaucccggagaugcagucaucucuccuccagcaacauauggaguuguuggaauccucaguuauuccccugaugcacccccuggcagacccguccacaguuuucaaggaaggugaugaggcugagaacuuuguugaaguucaccuucccgaugugcacaaacaggucucagggguugaccugggccucccaaacugggggaaguauguauugcugaguucaggggcucugauugccuugauguugauaauuuuccuacugacauguuguagaagagucaaucgaccagaaucuacgcagcacagucuuggagggaaaaggaggaaagugucgaucacuucccaaagcgggaagguuauaucuucaugggagucauauaagagugggggugaaacuagacuguaa

SEQ ID NO: 63397 - RNA, 1575 nt, Artificial Sequence
  derived and/or modified CDS sequence (wt) from glycoprotein__RABV__JQ944709.1
augguuccucagguucuuuuguuuguaccccuucuggguuuuucguuguguuucgggaaguuccccauuuacacgauaccagacgaacuuggucccuggagcccuauugacauacaccaucucagcuguccaaauaaccugguuguggaggaugaaggauguaccaaccuguccgaguucuccuacauggaacucaaagugggauacaucucagccaucaaagugaacggguucacuugcacagguguugugacagaggcagagaccuacaccaacuuuguugguuaugucacaaccacauucaagagaaagcauuuccgccccaccccagacgcauguagagccgcguauaacuggaagauggccggugaccccagauaugaagagucccuacacaauccauaccccgacuaccacuggcuucaaacuguaagaaccaccaaagagucccucauuaucauauccccaagugugacagauuuggacccauaugacaaaucccuucacucaagggucuucccuggcggaaagugcucaggaauaacgguguccucuaccuacugcucaacuaaccaugauuacaccauuuggaugcccgagaauccgagaccaaggacaccuugugacauuuuuaccaauagcagagggaagagagcauccaaagggaacaagacuugcggcuuuguggaugaaagaggccuguauaagucucuaaaaggagcaugcaggcucaaguuauguggaguucuuggacuuagacuuauggauggaacaugggucgcgaugcaaacaucagaugagaccaaauggugcccuccagaucaguuggugaauuugcacgacuuucgcucagacgagauugagcaucucguuguggaggaguuagucaagaaaagagaggaaugucuggaugcauuagaguccaucaugaccaccaagucaguaaguuucagacgucucagucaccugagaaaacuugucccaggguuuggaaaagcauauaccauauucaacaaaaccuugauggaggcugaugcucacuacaagucaguccggaccuggaaugagaucauccccucaaaaggguguuugaaaguuggaggaaggugccauccucaugugaacgggguguuuuucaaugguauaauauuagggccugacggccauguccuaaucccagagaugcaaucaucccuccuccagcaacauauggaguuguuggaaucuucaguuaucccccugaugcacccccuggcagacccuucuacaguuuucaaagaaggugaugaggcugaggauuuuguugaaguucaccuccccgauguguacaaacagaucucagggguugaccugggucucccgaacuggggaaaguauguauugaugacugcaggggccaugauuggccugguguugauauuuucccuaaugacauggugcagaagagccaaucgaccagaaucgaaacaacgcaguuuuggagggacagggaggaaugugucagucacuucccaaagcggaaaagucauaccuucaugggaaucauauaagaguggaggugagaucagacuguga

SEQ ID NO: 63398 - RNA, 1575 nt, Artificial Sequence
  derived and/or modified CDS sequence (wt) from glycoprotein__RABV__JQ950447.1
augaucccucaggcuuuucuguuuguaccccuucugguuguuccauuguguuuugggaaauuccccauuuacacgauaccagacaaacucggucccuggagucccauugauauacaucaucucagcuguccgaauaauuugguuguggaggaugaaggauguaccaaucugucaggauucucauacauggaacuuaaaguaggauauauuucagccauaaaggugaauggguucacuuguacggguguggugacagaagcagaaaccuacacuaacuuuguuggcuaugucaccaccacguuuaagagaaagcacuuccgaccaacgccggaugcaugcagaucugcauacaauuggaagauggcuggugaccccagauaugaagagucucugcacaaucccuauccggauuaucauuggcuccgaacuguaaaaaccaccaaagaguccuuuguuaucauaucuccaaguguggcagaucuagacccguacgauaagucccuucauucgagaguuuuuccuagagggaaaugcucaggaauaacgguguccucuaccuacugcccuaccaaccaugacuacaccaucuggaugccugagaaucccagacuggggaccucuugugauauuuucaccaauagccgagggaagagagcauucaaagggagcaagaccuguggauuuguagaugagagaggcuuguacaaaucucuaaaaggggcaugcaaacugaagcuuugcgggguucuuggacucagacuuauggauggaacaugggucgcgauucagacaucagacgagaccaaguggugcccuccugaccagcuaguaaaucuacaugacuuucauucggaugagauugaacaucuuguuguggaggaguuggucaagaaaagagaagagugucuagaugcacuggaguccaucaugaccaccaaguccgugaguuuccgacgccucagucacuugaggaaacuugugccuggguuuggaaaagcauacaccauauucaauaagaccuugauggaggcugaugcucacuacaagucgguccgaacuuggaacgagaucauccccucuaaaggguguuuaagaguugggggcagaugucacccccaugugaacggaguguuuuucaacgguaucauccugggcccugacggucauguccugaucccggaaaugcagucaucccuccuccagcagcauauggagcuguuggaauccucgguuauccccuugaugcauccuuuggcagauccaucaacgguuuuuaaaaauggugacgaggcggaggauuuuguugagguacaccuuccagaugugcauaagcaggucucagggguugaucucggucucccaaguugggggaaguauguguugaugagugcaggcauucugacugcacuaauguugaugauuuucuuaaugacguguugccgaaggaccaauagaucagaaucaauacaacacagucuuggagagacggggaggaaagugucgguaaccucccaaagcgggagggucauaucuucaugggagucauauaaaaguggaggugagaccaagcuguaa

SEQ ID NO: 63399 - RNA, 1575 nt, Artificial Sequence
  derived and/or modified CDS sequence (wt) from glycoprotein__RABV__JQ950449.1
augaucccucaggcuuuucuguuuguaccccuucugguuguuccauuguguuuugggaaauuccccauuuacacgauaccagacaaacucggucccuggagucccauugauauacaucaucucagcuguccgaauaauuugguuguggaggaugaaggauguaccaaucugucaggauucucauacauggaacuuaaaguaggauauauuucagccauaaaggugaauggguucacuuguacggguguggugacagaagcagaaaccuacacuaacuuuguuggcuaugucaccaccacguuuaagagaaagcacuuccgaccaacgccggaugcaugcagaucugcauacaauuggaagauggcuggugaccccagauaugaagagucucugcacaaucccuauccggauuaucauuggcuccgaacuguaaaaaccaccaaagaguccuuuguuaucauaucuccaaguguggcagaucuagacccguacgauaagucccuucauucgagaguuuuuccuagagggaaaugcucaggaaugacgguguccucuaccuacugcccuaccaaccaugacuacaccaucuggaugccugagaaucccagacuggggaccucuugugauauuuucaccaauagccgagggaagagagcauucaaagggagcaagaccuguggauuuguagaugagagaggcuuguacaaaucucuaaaaggagcaugcaaacugaagcugugcgggguucuuggacucagacuuauggauggaacaugggucgcgauucagacaucagacgagaccaaguggugcccuccugaccagcuaguaaaucuacaugacuuucauucggaugagauugaacaucuuguuguggaggaguuggucaagaaaagagaagagugucuagaugcacuggaguccaucaugaccaccaaguccgugaguuuccgacgucucagucacuugaggaaacuugugccuggguuuggaaaagcauacaccauauucaauaagaccuugauggaggcugaugcucacuacaagucgguccgaacuuggaacgagaucauccccucuaaaggguguuuaagaguugggggcagaugucacccccaugugaacggaguguuuuucaacgguaucauccugggcccugacggucauguccugaucccggaaaugcagucaucccuccuccagcagcauauggagcuguuggaauccucgguuauccccuugaugcauccuuuggcagauccaucaacgguuuuuaaaaauggugacgaggcggaggauuuuguugagguacaccuuccagaugugcauaagcaggucucagggguugaucucggucucccaaguugggggaaguauguguugaugagugcaggcauucugacugcacugauguugaugauuuucuuaaugacguguugccgaaggaccaauagaucagaaucaauacaacacagucuuggagagacggggaggaaagugucgguaaccucccaaagcgggagggucauaucuucaugggagucauauaaaaguggaggugagaccaagcuguaa

SEQ ID NO: 63400 - RNA, 1575 nt, Artificial Sequence
  derived and/or modified CDS sequence (wt) from glycoprotein__RABV__JX088694.1
augguuccucaagcccuucuguuuguaccccuucuggccguuccauuguguuuugggaaauuccccauuuacacgauaccagacaaacucggucccuggagucccauugauauacaucaucucagcuguccgaauaauuugguuguggaggaugaaggauguaccaaucugucaggauuuucauacauggaacuuaaaguaggauacauuucagccauaaaggugaacggauucacuuguacggguguggugacggaagcagaaaccuacaccaacuuuguuggcuaugucaccaccgcguuuaagagaaagcacuuucgaccaacaccggaugcgugcagauccgcauacaauuggaagauggcuggugaccccagauacgaagagucucugcacaaucccuauccugauuaucauuggcuccggacuguaaaaaccaccaaagaguccuuugucaucauaucuccaaguguggcagaucuagauccguacgauaaaucccuucauucgagaguuuuuccuagaggaaaaugcucaggaauaacggugucuucuaccuacugcucuacuaaccaugacuacaccaucuggaugccugagaaucccagacugggaaccucuugugauauuuucaccaacagcagagggaagagagcauccaaagggagcaagaccuguggauuuguagaugagagaggcuuguacaaaucucuaaaaggagcaugcaaacugaagcugugugggguucuuggacuuagacuuauggauggaacaugggucgcaauucagacaucagacgagaccaaguggugcccuccugaccagcuagugaaucuacaugacuuucauucggaugagauugaacaucuuguuguggaggaguuggucaagaaaagggaagagugucuagaugcacuggaguccaucaugaccaccaaguccgugaguuuccgacgucucagucacuugaggaaacuugugccuggauucggaaaagcauacaccauauucaauaagaccuugauggaggcugacgcucacuacaaaucgguucggacuuggaacgagaucauccccucuaaaggguguuugagaguuggaggcagaugucauccccaugugaacgggguguuuuucaaugguauuauccuaggcccugacggccaugucuugaucccggaaaugcagucaucucuccuucagcagcauauggaguuguuggaauccucggucauccccuuaaugcauccuuuggcagauccaucaacgguuuuuaaagacggugacgaggcggaggauuuuguugagguucaccuuccagaugugcauaagcaggucucaggggucgaucucggucucccaagcugggggaaguauguguugaugagcgcaggcauuuugacugcacugauguugaugauuuucuugaugacguguugccgaaggaccaauagagcagaaucaauacaacauagucuuggagagacagggaggaaagugucgguaaccucccaaaacgggagggucauaucuucaugggagucauacaaaagcggaggugagaccaagcuguaa

SEQ ID NO: 63401 - RNA, 1575 nt, Artificial Sequence
  derived and/or modified CDS sequence (wt) from glycoprotein__RABV__JX473838.1
augguuccucaggcucuuuuguuuauaccccuuuugguuuuuccauugugucucgggaaauucccuaucuacacgauaccagacaaacuuggacccuggagcccgauugacauacaucaucucagcugcccaaacaauuugguuguggaggacgaaggaugcaccaaccugucgggauucuccuacauggaacuuaaaguuggauacaucucagccauaaaggugaacggguucacuugcacaggcguugugacagaggcugaaaccuacacuaacuuuguagguuaugucaccaccacguucaaaagaaagcauuuccgcccaauaccagaugcauguagagccgcauacaacuggaagauggccggugaccccagauaugaagagucucuacacaauccguacccugauuaccacuggcuucgaacuguaaaaaccaccaaggagucucucguuaucauauccccaaguguggcggauuuggacccauaugacaaaucucuucacucgaggaucuucccuagcgggaagugcucaggaauaacggugucuucuaccuacugcucaacuaaccacgauuacaccauuuggaugccugagaauccgagacuagggacgucuugcgacauuuuugccaauaguagagggaagagagcaucuaaaggggguaagaccugcggcuuaguagaugaaagaggccuguauaagucucuaaagggagcaugcaaacucaaguuauguggaguucuuggacuuagacucauggacgggacauggguugcgaugcaaacaucagaugagaccaaaugguguccuccugaucaguuggugaauaugcacgacuuucgcucugaugaaauugagcaucuuguuguagaggaguuggucaagaagagagaggagugucuggacgcacuagaguccaucaugaccaccaagucagugaguuucagacgucuuagucauuuaagaaaacuugucccuggguucggaaaagcauacaccauauucaacaagaccuugauggaggcugaugcucacuacaagucaguccggaccuggaaugagaucauccccucaaaaggguguuuaagaguuggagggaggugucauccccaugugaacgggguguuuuucaaugguauaauauuagggccugacggccauguucugauccccgagaugcaaucaucccuccuucaacaacauauggaguuauuggaauccucaguuauuccccugaugcacccccuggcagacccguccacaguuuucaaggauggggaugaggcugaggauuuuguggaaguucaccuuccugaugugcacaaacaggucucagggguugaccugggucucccgaacugggggaaauauguauuacugagugcagggacccugauugccuugauguugauaauuuuucuaaugacguguuguagaagagucaaucgaccagaaucuacgcaacgcagucucggaggggcagggaggagggugucggucacuucccagagcgggaaggucauaucuucaugggagucauauaaaagugggggugagacuagauuguaa

SEQ ID NO: 63402 - RNA, 1575 nt, Artificial Sequence
  derived and/or modified CDS sequence (wt) from glycoprotein__RABV__JX473839.1
augguuccucaggcucuuuuguuuauaccccuuuugguuuuuccauugugucucgggaaauucccuaucuacacgauaccagacaaacuuggacccuggagcccgauugacauacaucaucucagcugcccaaacaauuugguuguggaggacgaaggaugcaccaaccugucgggauucuccuacauggaacuuaaaguuggauacaucucagccauaaaggugaacggguucacuugcacaggcguugugacagaggcugaaaccuacacuaacuuuguagguuaugucaccaccacguucaaaagaaagcauuuccgcccaauaccagaugcauguagagccgcauacaacuggaagauggccggugaccccagauaugaagagucucuacacaauccguacccugauuaccacuggcuucgaacuguaaaaaccaccaaggagucucucguuaucauauccccaaguguggcggauuuggacccauaugacaaaucucuucacucgaggaucuucccuagcgggaagugcucaggaauaacggugucuucuaccuacugcucaacuaaccacgauuacaccauuuggaugccugagaauccgagacuagggacgucuugcgacauuuuugccaauaguagagggaagagagcaucuaaaggggguaagaccugcggcuuaguagaugaaagaggccuguauaagucucuaaagggagcaugcaaacucaaguuauguggaguucuuggacuuagacucauggacgggacauggguugcgaugcaaacaucagaugagaccaaaugguguccuccugaucaguuggugaauaugcacgacuuucgcucggaugaaauugagcaucuuguuguagaggaguuggucaagaagagagaggagugucuggacgcacuagaguccaucaugaccaccaagucagugaguuucagacgucuuagucauuuaagaaaacuugucccuggguucggaaaagcauacaccauauucaacaagaccuugauggaggcugaugcucacuacaagucaguccggaccuggaaugagaucauccccucaaaaggguguuuaagaguuggagggaggugucauccccaugugaacgggguguuuuucaaugguauaauauuagggccugacggccauguucugauccccgagaugcaaucaucccuccuucaacaacauauggaguuauuggaauccucaguuauuccccugaugcacccccuggcagacccguccacaguuuucaaggauggggaugaggcugaggauuuuguggaaguucaccuuccugaugugcacaaacaggucucagggguugaccugggucucccgaacugggggaaauauguauuacugagugcagggacccugauugccuugauguugauaauuuuucuaaugacguguuguagaagagucaaucgaccagaaucuacgcaacgcagucucggaggggcagggaggagggugucggucacuucccagagcgggaaggucauaucuucaugggagucauauaaaagugggggugagacuagauuguaa

SEQ ID NO: 63403 - RNA, 1575 nt, Artificial Sequence
  derived and/or modified CDS sequence (wt) from glycoprotein__RABV__JX473840.1
augguuccucgggcucuuuuguuuauaccccuuuugguuuuuucauuguguuucgggaaauucccuaucuacacgauaccagacaaacuuggacccuggaacccgauugacauacaucaucucagcugcccaaacaauuugguuguggaggacgaaggaugcaccaaccugucuggauucuccuacauggaacuuaaaguuggauacaucucagccauaaaggugaacggguucacuugcacaggcguugugacagaggcugaaaccuacacuaacuuuguagguuaugucaccaccacguucaaaagaaagcauuuccgcccaauaccagauacauguagagccgcauacaacuggaagauggccggugaccccagauaugaagagucucuacacaauccguacccugacuaccacuggcuucgaacuguaaaaaccaccaaggagucucucguuaucauauccccaaguguggcggauuuggacccauaugacaaaucucuucacucgaggaucuucccuagcgggaagugcucaggaauaacggugucuucuaccuacugcucaacuagccacgauuacaccauuuggaugccugagaauccgagacuagggacaucuugcgacauuuuugccaauaguagagggaagagagcaucuaaaggggguaagaccugcggcuuaguagaugaaagaggccuguauaagucucuaaagggagcaugcaaacucaaguuauguggaguucuugggcuuagacucauggaugggacauggguugcgaugcaaacaucagaugagaccaaaugguguccuccugaucaguuggugaauaugcacgacuuucgcucggaugaaauugagcaucuuguuguagaggaguuggucaagaaaagagaggagugucuggaugcacuagaguccaucaugaccaccaagucagugaguuucagacgucuuagucauuuaagaaaacuugucccuggguucggaaaagcauacaccauauucaacaagaccuugauggaggcugaugcucacuacaagucaguccggaccuggaaugagaucauccccucaaaaggguguuuaagaguuggagggaggugucauccccaugugaacgggguguuuuucaaugguauaauauuagggccugacggccauguucugauccccgagaugcaaucaucccuccuucagcaacauauggaguuauuggaauccucaguuauuccccugaugcacccccuggcagacccguccacaguuuucaaggauggggaugaggcugaggauuuuguggagguucaccuuccugaugugcacaaacaggucucagggguugaccugggucucccgaacugggggaaauauguauuacugagugcagggacccugauugccuugauguugaugauuuuucuaaugacguguuguagaagagucaaucgaccagaaucuacgcaacgcagucucggaggggcagggaggagggugucggucacuucccagagcgggaaggucauaucuucaugggagucauauaaaagugggggugagacuagauuguaa

SEQ ID NO: 63404 - RNA, 1575 nt, Artificial Sequence
  derived and/or modified CDS sequence (wt) from glycoprotein__RABV__JX473841.1
augguuccucaggcucuuuuguuuauaccccuuuugguuuuuucauuguguuucgggaaauucccuaucuacacgauaccagacaaacuuggacccuggaacccgauugacauacaucaucucagcugcccaaacaauuugguuguggaggacgaaggaugcaccaaccugucuggauucuccuacauggaacuuaaaguuggauacaucucagccauaaaggugaacggguucacuugcacaggcguugugacagaggcugaaaccuacacuaacuuuguagguuaugucaccaccacguucaaaagaaagcauuuccgcccaauaccagauacauguagagccgcauacaacuggaagauggccggugaccccagauaugaagagucucuacacaauccguacccugacuaccacuggcuucgaacuguaaaaaccaccaaggagucucucguuaucauauccccaaguguggcggauuuggacccauaugacaaaucucuucacucgaggaucuucccuagcgggaagugcucaggaauaacggugucuucuaccuacugcucaacuagccacgauuacaccauuuggaugccugagaauccgagacuagggacaucuugcgacauuuuugccaauaguagagggaagagagcaucuaaaggggguaagaccugcggcuuaguagaugaaagaggccuguauaagucucuaaagggagcaugcaaacucaaguuauguggaguucuuggacuuagacucauggaugggacauggguugcgaugcaaacaucagaugagaccaaaugguguccuccugaucaguuggugaauaugcacgacuuucgcucggaugaaauugagcaucuuguuguagaggaguuggucaagaaaagagaggagugucuggaugcacuagaguccaucaugaccaccaagucagugaguuucagacgucuuagucauuuaagaaaacuugucccuggguucggaaaagcauacaccauauucaacaagaccuugauggaggcugaugcucacuacaagucaguccggaccuggaaugagaucauccccucaaaaggguguuuaagaguuggagggaggugucauccccaugugaacgggguguuuuucaaugguauaauauuagggccugacggccauguucugauccccgagaugcaaucaucccuccuucagcaacauauggaguuauuggaauccucaguuauuccccugaugcacccccuggcagacccguccacaguuuucaaggauggggaugaggcugaggauuuuguggagguucaccuuccugaugugcacaaacaggucucagggguugaccugggucucccgaacugggggaaauauguauuacugagugcagggacccugauugccuugauguugaugauuuuucuaaugacguguuguagaagagucaaucgaccagaaucuacgcaacgcagucucggaggggcagggaggagggugucggucacuucccagagcgggaaggucauaucuucaugggagucauauaaaagugggggugagacuagauuguaa

SEQ ID NO: 63405 - RNA, 1575 nt, Artificial Sequence
  derived and/or modified CDS sequence (wt) from glycoprotein__RABV__JX871837.1
augaucccccaggcucuucuguuugugccucuccugauucccucgcugugucucgggaaguuccccaucuacacgauaccagauaagcuuggccccuggagcccgauagacauacaucaucucagcugucccaacaauuugguuguggaagacgaagggugcaccagucugucaggguucuccuauauggaacugaaggugggauacaucucagccauaaaggugaacggguucacuuguaccgguguugugacagaagccgagaccuacaccaacuuugucgguuaugucaccaccacauuuaagagaaaacacuuccgcccgaugccagaugccugcagagcugcacacgacuggaagauagccggcgauccuagauaugaagauucucuucaaaauccuuauccugauuaccauuggcuacggaccguaaagaccaccaaggagucucucguuauuauaucuccgaguguggcugaguuggaccccuacgacaaaucccuucauucaagaguuuuccccagugggaaguguuuggggauaacagucuccucuaccuacugcucaacuaaccacgauuacaccaucuggaugcccguagaagcaagacuugggacaucuugugauauuuucaccaauagcagagggaagaaagcaucuaaggggggcaggacuugcggauuuguagaugaaaggggcuuguacaagucucugaaaggagcaugcaaacucaagcuaugcggaguccccgggcuccggcugauggauggaaccugggucucaauccagacaucagaugauauuaaauggugcccuccugaucaauuggugaaucuacaugacuuucacucagaugaaauagaacaucucgucguagaggaauugaucaagaaaagggaaggauguuuagaugcacuggaguccauaaugaccacuaaaucagugagcuucagacgucucagccacuugagaaagcuuguuccgggguuugggaaggcauacaccauauucaauaauaccuuaauggaagcugaugcucauuacaagucaguucggacuuggaacgaagucauccccucaaaagguugccuaaaagucggagggaggugucaucccccugugaacggaguauucuucaaugguauaauuuuggguccagaugggaauguucugaucccugagaugcaaucgucccugcuucaacaacauauggaacuguuggaguccucuguuaucccucugaugcaccccuuggcagacccaucaacagucuucaaagacggugaugaggcggaagacuuuguugagguucaucuuccggauguucacaaacaggucucggauguugaccuuggucuuccgaguugggggaaguaucuguugaugagcgcagguguucuggcaacacugauucuggcgaucuucuuaauaacauguuguaggagggccaauaggacagaaucaacacagagaggucauagggagucaggagggaaagugucaguagccccucaaaacgggaaaaucauauccucaugggaguuguacaaaagugaaagugagaccgggauguga

SEQ ID NO: 63406 - RNA, 1575 nt, Artificial Sequence
  derived and/or modified CDS sequence (wt) from glycoprotein__RABV__JX871838.1
augauuccucaggcucuucuguuugugccucuccugauucccucucugugucuuggggaauuccccaucuacacgauaccagacaagcucggcccuuggagcccuaucgacauacaucaucucagcugucccaacaaucugguugcagaaaacgacgggugcaccagucugucagguuuuuccuauauggaacugaaggugggauacaucucugccauaaaggugaacggguucacuuguaccgguguugugacagaagcagagaccuacaccaacuuugucgguuaugucacuaccacauucaagaggaagcacuuccgcccgacgccagaugccugcagagccgcacaugacuggaagauggccggugaucccagauaugaagcuucccuucaaaauccuuauccugauuaccauuggcuacggaccguaaaaaccaccaaggagucacuuguuauuaucuccccgaguguugcugauuuggacccuuaugacaagucccuucauucaagaguuuuccccagugggaaguguuuggggauaacagucucuuccaccuacugcucaaccaaccaugauuacaccaucuggaugcccguagaaccaagacuuggaacaucuugugauauuuuuaccaauagcagagggaagagagcaucuaaggggggcaggguuuguggauucguggaugaaaggggcuuauacaagucucucaaaggagcaugcagacucaagcugugcggaguccccgggauccggcuguuggacggaacaugggucucaauccagacaucagaagauaucaaguggugcccuccugaucgauuagugaaucuacacgacuuucacucggaugaaauagaacaucuuguuguagcggaauuaaucaagaggagggaaaauugucuagaugcacuggaguccaucaugaccaccaaaucagugagcuucagacgucucagucacuugaggaaacuuguuccuggguuugggaaggcauacaccauauucaacaagaccuuaauggaagcugaugcucauuacaagucaguuaagacuuggaacgaaguuaucccuucgaaagguugccuggaagucggagggagaugucauccccaugugaacggaguauucuucaaugguauaauuuuggguccggauggaaauguucugaucccugagaugcagucuucccugcuucaacaacauauggagcuguuagagucuucugucaucccucugaugcaucccuuggcagacccaucaacagucuucaaggagggugaugaggcggaagacuuuguugagguucaucuuccagauguccacaagcagguuucggauguugaccuuggccuuccgaguugggggaaguaucuguugauuagugcaggugcuuuggcaauacugauucuggcuaucgucuuaauaauauguuguaggagggucaauaagacaggauccacacagagaggucauagggaaucaggagggaaaaugucuguaguaccucaaaacgggaagaucauauccucaugggaguuguacaaaagugaaagugagacugggcuguga

SEQ ID NO: 63407 - RNA, 1575 nt, Artificial Sequence
  derived and/or modified CDS sequence (wt) from glycoprotein__RABV__JX871839.1
augauuccucaggcucuucuguuugugccucuccugauucccucucugugucuuggggaauuccccaucuacacgauaccagacaagcucggcccuuggagcccuaucgacauacaucaucucagcugucccaacaaucugguugcagaaaacgacgggugcaccagucugucaggguuuuccuauauggaacugaaggugggauacaucucugccauaaaggugaacggguucacuuguaccgguguugugacagaagcagagaccuacaccaacuuugucgguuaugucacuaccacauucaagaggaagcacuuccgcccgacgccagaugccugcagagccgcacacgacuggaagauggccggugaucccagauaugaagcuucccuucaaaauccuuauccugauuaccauuggcuacggaccguaaaaaccaccaaagagucacuuguuauuauauccccgaguguugcugauuuggacccuuacgacaagucccuucauucaagaguuuuccccagugggaaguguuuggggauaacagucucuuccaccuacugcucaaccaaccaugauuacaccaucuggaugcccguagaaccaagacuuggaacaucuugugauauuuuuaccaauagcagagggaagagagcaucuaaggggggcagaguuuguggauucguggaugaaaggggcuuauacaagucucucaaaggagcaugcagacucaagcugugcggaguccccgggauccggcuguuggacggaacaugggucucaauccagacaucagaagauaucaaguggugcccuccugaucgauuagugaaucuacacgacuuucacucggaugaaauagaacaucuuguuguagcggaauugaucaagaggagggaaaauugucuagaugcacuggaguccaucaugaccaccaaaucagugagcuucagacgucucagucacuugaggaaacuuguuccuggguuugggaaggcauacaccauauucaacaagaccuuaauggaagcugaugcucauuacaagucaguuaagacuuggaacgaaguuaucccuucgaaagguugccuggaagucggagggagaugucauccccaugugaacggaguauucuucaaugguauaauuuuggguccggauggaaauguucugaucccugagaugcagucuucccugcuucagcaacauauggagcuguuagagucuucugucaucccucugaugcaucccuuggcagacccaucaacagucuucaaggagggugaugaggcggaagacuuuguugagguucaucuuccagauguccacaagcagguuucggauguugaccuuggccuuccgaguugggggaaguaucuguugauuagugcaggugcuuuggcaauacugauucuggcgaucgucuuaauaauauguuguaggagggucaauaagacaggauccacacagagaggucauagggaaucaggagggaaaaugucuguaguaccucaaaacgggaagaucauauccucaugggaguuguacaaaagugaaagugagacugggcuguga

SEQ ID NO: 63408 - RNA, 1575 nt, Artificial Sequence
  derived and/or modified CDS sequence (wt) from glycoprotein__RABV__JX871840.1
augaucucucaaacucuucuguuugugccucuccugauuuccucguuguguuucggggaauuccccaucuacacgauaccagaaaaacucggccccuggagucccaucgacauacaucaucucaguugcccuaacaauuugguuguggaggacgagggaugcaacagucugucgggguuuucuuacauggaacuaaaggugggauacaucucuuccauaaaagugaauggguucacuuguaccgguguagugacggaagccgagaccuacaccaacuuuguugguuaugucacaaccacauucaagagaaaacacuuccgcccgaugccagaugcaugcagagcugcauacaacuggaagaugucuggagauccuagauaugaagagucucuucacaauccuuacccugauuaccacugguuacgaacaguaaaaaccaccaaagagucucuuguuaucauaucgccaaguguggcugauuuggauccauacgacaagucccuucauucaagggucuucucuggugggaaguguuugggaauaacaaucucuucuaccuacugcuccacuaaccaugauuacacucucuggaugcccgaagaagcaagacuugggaccucuugugacauuuuuaucaacagcaaagggaagagagcaucuaaggggggcaggacuuguggauucguggaugaaaggggauuauauaagucccuaaaaggggcaugcaaacuuaaacugugcggaguuccuggacuuagacuuauggauggaacuugggucucaauucagacaucagaugagaccaaauggugcccuccugaucaacugguaaauauacaugauuuucgcucagaugagauagaacaucucguaguggaagaguuggucaagaagagggaagaaugccuggaugcacuggauucuauuaugaccaccaaaucaguaagcuucagacgucuuagccacuugagaaaacucguuccuggguucggaaaggcauauacuauauucaacaaaacauuaauggaagcugaugcucacuacaagucaguucggacuuggaaugaagucauccccucaaaagggugccuaagcgucggagggaggugccacccucauguggacggaguguucuucaaugguauaauucuggguccggacgggagugugcugaucccugagaugcaaucauccuuacuucaacaacauauggaguuguuggaguccucuguaaucccccuaaugcaucccuuggcaaacccaucaacagucuucaaggacggugaugaggcggaggacuuuguugaaguucaccuuccggacguucaagaacaggucucagggguugaccucggucucccaaacugggggaaguauaugcuuaugagugcaggugcucuggcuauccuacugcugacaaucuucuuaaugacauguugcagaagggccaauagaacaaaaucaauacgacaagguccugaagagucaagaaggaaaguaucuguuccuccccaaagcgggaaagucauaucuucaugggagucauuuaagagcgggggcgaaaccgggcuguga

SEQ ID NO: 63409 - RNA, 1575 nt, Artificial Sequence
  derived and/or modified CDS sequence (wt) from glycoprotein__RABV__JX871841.1
augauuccucaggcucuucuguuugugccucuccugauucccucucugugucuuggggaauuccccaucuacacgauaccagacaagcucggcccuuggagcccuaucgacauacaucaucucaguugucccaacaaucugguugcagaaaacgacgggugcaccagucugucaggguuuuccuauauggaacugaaggugggauacaucucugccauaaaggugaacggguucacuuguaccgguguggugacagaagcagagaccuacaccaacuuugucgguuaugucacuaccacauucaagaggaagcacuuccgcccgacgccagaugccugcagagccgcacacgacuggaagauggccggugaucccagauaugaagcuucccuucaaaauccuuauccugauuaccauuggcuacggaccguaaaaaccaccaaggagucacuuguuauuauauccccgaguguugcugauuuggacccuuacgacaagucccuucauucaagaguuuuccccagugggaaguguuuggggauaacagucuccuccaccuacugcucaaccaaccaugauuacaccaucuggaugcccguagaaccaagacuuggaacaucuugugauauuuuuaccaauagcagagggaagagagcaucuaaggggggcaggguuuguggauucguggaugaaaggggcuuauacaagucucucaaaggagcaugcagacucaagcugugcggaguccccgggauccggcuguuggacggaacaugggucucaauccagacaucagaagauaucaaguggugcccuccugaucgauuagugaaucuacacgacuuucacucggaugaaauagaacaucuuguuguagcggaauugaucaagaggagggaaaauugucuagaugcacuggaguccaucaugaccaccaaaucagugagcuucagacgucucagucacuugaggaaacuuguuccuggguuugggaaggcauacaccauauucaacaagaccuuaauggaagcugaugcucauuacaagucaguuaagacuuggaacgaaguuaucccuucgaaagguugccuggaagucggagggagaugucacccccaugugaacggaguauucuucaaugguauaauuuuggguccggacggaaauguucugaucccugagaugcagucuucccugcuucaacaacauauggagcuguuagagucuucugucaucccucugaugcaucccuuggcagacccaucaacagucuucaaggagggugaugaggcggaagacuuuguugagguucaucuuccagauguccacaagcagguuucggauguugaccuuggccuuccgaguugggggaaguaucuguugauuagugcaggugcuuuggcaauacugauucuggcgaucgucuuaauaauauguuguaggaaggucaauaagacaggauccacacagagaggucauagggaaucaggagggaaaaugucuguaguaccucaaaacgggaagaucauauccucaugggaguuguacaaaagugaaagugagacugggcuguga

SEQ ID NO: 63410 - RNA, 1575 nt, Artificial Sequence
  derived and/or modified CDS sequence (wt) from glycoprotein__RABV__JX871842.1
augaucccucaggcucuucuguuugugccuuuucuguuucccucguugugucucgggaaauuccccaucuauaccauaccggaaaagcucggcccuuggagucccaucgacauacaucaucucagcugcccuaacaauuugguuguggaggacgaggguugcgacagucugucaggguuuucuuacauggaacugaagguggguuacaucucugccauaaaggugaauggguucacuuguaccggugucgugacagaagcugagaccuacaccaacuuuguugguuaugucaccaccacauuuaagagaaaacacuuccgcccuaugccagaugcaugcagagcugcguacaacuggaagacagccggugacccuagauaugaggagucucuucacaauccuuauccugauuaccauuggcuacggaccguaaaaaccaccaaagaaucucuuauuaucauaucgccgaguguggcugauuuggacccauaugacaaaucccuucauucaagaguuuucccuggugggaaauguuuggggauaacagucucuucuaccuacugcucaacuaaccaugacuauacuaucuggaugcccgaagaagcaagacucgggacaucuugugacauuuuuaccaacagcaaagggaagagggcaucuaagggggguaggacuuguggauucguggaugaaaggggcuuauauaagucucuaaaaggggcauguaaacuuaagcugugcggaguuccuggacuuagacuuauggauggaacgugggucgcuauucagacaccaggugagaccaaauggugcucuccugaucagcugguaaaucuacaugacuuucguucagaugagauagaacaucucgucguggaggaguugaucaagaagagagaagaaugucuagaugcacuagauuccaucaugaccaccaaaucguuaagcuucggacgucucagcaacuugagaaaacuugucccuggguuuggaaaggcauacacuauauucaacaaaaccuuaauggaggcugaugcucacuacaagucauuucggacuugggaugaaaucauucccucaaaagggugccuaagagucggagggaggugucauccucauguaaacggaguguuuuucaaugguauaauucuggguccggauggacauguccugauuccagagaugcaaucgucccuccuccaacagcauauggagcuguuggaauccucuguaaucccccuaauacaucccuuggccgacccaucaacagucuucaaagacggugaugaagcggaggacuuuguugagguucaccuuccggacguucacaagcaggucucaggggucgaucuuggucucccaaacugggggaaguauguguugaugggugcagguguucuagcgaccgugauacugacaaucuucuuguuaacauguugcagaaggguuaacagaacaaaaccaaaacaacaaagucuugaggagucaggaaggaaaguaucgguuacuccucaaaaugggaaggucaugucuucaugggaguauuacaagagugagggcaggaccagucuguga

SEQ ID NO: 63411 - RNA, 1575 nt, Artificial Sequence
  derived and/or modified CDS sequence (wt) from glycoprotein__RABV__JX871844.1
augaucccccaggcucuucuguuugugccucuccugauucccucgcugugucucgggaaguuccccaucuacacgauaccagauaagcuuggccccuggagcccgauagacauacaucaucucagcugucccaacaauuugguuguggaagacgaagggugcaccagucugucaggguucuccuauauggaacugaaggugggauacaucucagccauaaaggugaacggguucacuuguaccgguguugugacagaagccgagaccuacaccaacuuugucgguuaugucaccaccacauuuaagagaaaacacuuccgcccgaugccagaugccugcagagcugcacacgacuggaagauagccggcgauccuagauaugaagauucucuucaaaauccuuauccugauuaccauuggcuacggacuguaaagacuaccaaggagucucucguuauuauaucuccgaguguggcugauuuggaccccuacgacaaaucccuucauucaagaguuuuccccagugggaaguguuuggggauaacagucuccucuaccuacugcucaacuaaccacgauuacaccaucuggaugcccguagaagcaagacuugggacaucuugugauauuuucaccaauagcagagggaagaaagcaucuaaggggggcaggacuugcggauuuguagaugaaaggggcuuguacaagucucugaaaggagcaugcaaacucaagcuaugcggaguccccgggcuccggcugauggauggaaccugggucucaauccagacaucagaugauauuaaauggugcccuccugaucaauuggugaaucuacaugacuuucacucagaugaaauagaacaucucgucguagaggaauugaucaagaaaagggaaggauguuuagaugcacuggaguccauaaugaccacuaaaucagugagcuucagacgucucagccacuugagaaagcuuguuccuggguuugggaaggcauacaccauauucaauaauaccuuaauggaagcugaugcucauuacaagucaguucggacuuggaacgaagucauccccucaaaagguugccuaaaagucggagggaggugucaucccccugugaacggaguauucuucaaugguauaauuuuggguccagaugggaauguucugaucccugagaugcaaucgucccugcuucaacaacauauggaacuguuggagucuucuguuaucccucugaugcaccccucggcagacccaucaacagucuucaaagacggugaugaggcggaagacuuuguugagguucaucuuccggauguucacaaacaggucucggauguugaccuuggucuuccgaguugggggaaguaucuguugaugagcgcaggugcucuggcaacacugauucuggcgaucuucuuaauaacauguuguaggagggccaauaggacagaaucaacacagagaggucauagggagucaggagggaaagugucaguagccccucaaaacgggaaaaucauauccucaugggaguuguacaaaagugaaagugagaccgggauguga

SEQ ID NO: 63412 - RNA, 1575 nt, Artificial Sequence
  derived and/or modified CDS sequence (wt) from glycoprotein__RABV__JX871846.1
augaucuuucaggcucuucuauuugugccucuccuaauuucuucguugugucuugggaaauuccccaucuacacgauaccagacaagcucgguccuuggagccccaucgacauacaucaccucagcuguccaaacaauuugguuguggaggacgaggggugcaccagccugucaggguuuucuuacauggaacuaaaggugggauacaucucugccauaaaggugaacggguuuaccuguaccgguguugugacagaagcugagaccuauacuaacuuuguugguuaugucaccaccacauucaagaggaaacauuuucgcccuauaccagaugcauguagggcugcauacaacuggaagauagcuggugaucccagauacgaggagucucuucaaaauccuuauccugauuaucauuggcuacggacagugaagaccaccaaagagucucuuaucaucauaucuccaaguguggcugauuuggacccauaugacaaaucccuucauucuagguuguucccuggugggaaguguuugggaauaacaauuucuucuaccuacugcuccaccaaccaugauuacacuaucuggaugccugaagaaccaagacucgggacaucuugugacauuuuuacuaauagcaaagggaaaaaggcaucuaaggggggcaagguuugcggauuuguagaugaaaggggcuuguauaagucucuaaagggagcauguaaacucaagcugugcggaguuuccggacuuagacuuauggauggaacuuggguuacaauucagacgucagaugagaccaaauggugcccuccagaucaauugguaaaucuacaugacuuucacucagaugaaauagagcaucucgucguggaggaauugguuaagaagagggaggaguguuuggaugcauuagaguccaucaugaccaccaaaucuguaaguuucagacgucuaagcuauuugagaaaacuuguccccggguuuggaaaggcauauacuauauucaacaagacuuugauggaagcugacgcccacuacaagucaguucggacuuggaaugagaucauccccucaaaaggauguuugaaagucagugauaggugucauccucauguagacggaguguuuuucaauggcauaauucuggguccugacgggaaugucuugauaccugaaaugcaaucgucccuacuucaacaacauauggagcuguuggaguccucuguaauccccuugaugcaucccuuggcagacccaucaacaguauucaaggauggagacgaagcggaggacuuuguugaaguucaccucccggauguucacaaacagaucucagggguugaccucggucucccuaguugggggaaguaucuccucaugauugcagguggucuagcgacacuaguucugauaaucuucuugauggcauguuguagaagaaccaagagaacagaaucaagacggcgaggcucuggggaaucaggagagaagguauuggcaacuccccaacccaagaaagucguaucuucaugggaguuguacaagagagaaggcgaugccaggcuguga

SEQ ID NO: 63413 - RNA, 1575 nt, Artificial Sequence
  derived and/or modified CDS sequence (wt) from glycoprotein__RABV__JX871847.1
augaucccucaggcucuucuguuugugccucuccugauucccucgcugugucucggggaauuccccaucuacacgauaccagacaaacucggcccuuggaccccuaucgacauacaucaucucagcugucccaacaaucugguugcagagaacgacgggugcaccagucugucaggguuuuccuauauggaacuaaaggugggauacaucucugccauaaaggugaacggguucacuuguaccgguguugugacagaagccgagaccuacacaaacuuuuuagguuaugucacuaccacauucaagagaaagcacuuccgcccgaugccagaugccugcagagcugcacaugacuggaagauggccggugauccuagauaugaagauucccuucaaaauccuuauccugauuaccauugguuacggacuguaaagaccaccaaggagucgcucguuauuauauccccgaguguugcugauuuggaccccuacgacaagucccuucauucaagaguuuuccccagugggaaguguuuggggauaacagucucuuccaccuacugcucaaccaaccaugauuacaccaucuggaugcccguagaaccaagacuuggaacaucuugugauauuuuuaccaauagcagagggaagagagcaucuaagggaggcaggguuugcggauuuguggaugaaaggggcuuauacaaaucucucaaaggagcaugcaaacucaagcugugcggagucccugggauuaggcugauggauggaaccugggucucaauccagacaucagaagauauuaaguggugcccuccugaucgauuagugaaucuacacgacuuucauucggaugaacuagaacaucuuguuguagaggaauugaucaagaggagggaaaauugucuagaugcacuggaguccaucaugaccaccaaaucagugagcuucagacgucucagccacuugaggaagcuuguuccuggguuugggaaggcauacaccauauucaacaagaccuuaauggaagcugaugcucauuacaagucagucaagacuuggaacgaggucaucccuucgaaagguugccuggaaguuggagggaaaugucaccccccugugaacggaguauucuucaaugguauaauuuuggguccagauggaaauguucugaucccugagaugcaaucuucccugcuucaacaacauauggagcuguuagagucuucuguuaucccucugaugcaucccuuggcagacccaucaacagucuucaaggaaggugaugaggcggaagacuuugucgagguucaucuuccagauguccacaaacagguuucugauguugaccuuggucuuccgaguugggggaaguaucuguugaugagugcaggugcucuagcaauacugauucuggcgaucgucuuaauaauauguugugggagggucaauaagacagggucaacacagagaggucauagggaaucaagagggaaaaugucaguagcaccucaaaaugggaagaucauauccucaugggaguuguacaaaagcgaaagugagacugggcuguga

SEQ ID NO: 63414 - RNA, 1575 nt, Artificial Sequence
  derived and/or modified CDS sequence (wt) from glycoprotein__RABV__JX871848.1
augaucccucaagcucuucuguuugugccucuccugauuuccucgcuguguuuaggagaauucccuaucuacacgauaccagaaaaacucggcccuuggaguccuaucgacauacaucaucucaguugcccuaacaauuugguuguagaggacgagggaugcaacagucugucgggguuuucuuacauggaacugaaagugggauacaucucuuccauaaaagugaauggguucacuuguacaggugucgugacagaagcugagaccuacaccaacuuuguugguuaugucaccaccaccuucaagagaaaacacuuccgcccgaugccagaugcaugcagagcugcauacaacuggaagauguccggagauccuagauaugaagagucucuucacaauccuuacccugauuaccauuggcuacgaacaguaaaaaccaccaaggagucucuuguuaucauaucgccaaguguggcugauuuggauccauacgacaagucccuucauucaagggucuucucuggugggaagugcuugggaauaacagucucuuccaccuacugcuccacuaaccaugauuacacuaucuggaugcccgaagaagcaagacuugggaccucuugugacauuuuuaccaacagcaaagggaagagagcaucuaaggggggcaagacuugcggguucguggacgagaggggauuauauaagucucuaaaaggggcaugcaaacuuaaacugugcggaguuccuggacuuagacuuauggauggaacuugggucucaauucagacaucggaugagaccaaaugguguccuccugaucaacugguaaauauacaugauuuucgcucagaugagauagaacaucucguaguggaggaguuggucaagaagagggaagagugccuggaugcacuagaguccauuaugaccaccaaaucaguaagcuucagacgucuuagccacuugagaaaacucguuccuggguuuggaaaggcauauacuauauucaacaaaacauuaauggaggcugaugcucacuacaagucaguucggacuuggaaugaagucauccccucuaaagggugccuaagcguaggagggaggugccauccucauguggacggaguguucuucaaugguauaauucuggguccggacgggaguguccugaucccugagaugcagucaucccuacuacaacagcauauggagcuguuggaguccucuguaaucccccuaaugcauccccuggcaaacccaucaacagucuucaaggacggugaugaggcagaggacuuugucgaaguucaccuuccggacguccaagaacaggucucagggguugaccucggucucccaaacugggggaaguaugugcuuaugagugcaggugcucuggcaguccuacugcugacaaucuucuuaaugacaugucgcagaagggccaauagaacaaauucaauacaacaagguccuggggagucgggaaggaaaauaucaguuccuccccaaaacgggaaagucauaucuucaugggaaucauuuaagagcggaggcgaaaccgggcuguga

SEQ ID NO: 63415 - RNA, 1575 nt, Artificial Sequence
  derived and/or modified CDS sequence (wt) from glycoprotein__RABV__JX871849.1
augaucccucaagcucuucugucugugccucuucuaauuuccucguuguguuucgggaaauuccccaucuacacgauaccagagaagcucggcccuuggagucccaucgacauacaucaccucagcuguccuaacaauuugguuguggaggaugagggaugcaacagucugucaggguuuucuuacauggaacugaaggugggauacaucucugccauaaaaguuaauggguucacuuguacugguguugugacagaagcugagaccuacaccaacuuuguugguuacgucaccaccacauuuaagagaaaacacuuccgcccuaugucggaugcaugcagagccgcauacaacuggaagacggccggcgauccuagauaugaagagucccuucacaauccuuauccugauuaccauuggcuaaggaccguaaaaaccaccaaagaaucccuuauuaucauaucgccaaguguggcugauuuggaccccuacgacaaaucucuucauucaagaaucuucccuggugggaaaugcuuggggauaacaaucucuuccaccuacuguucaacuaaccaugauuauacuaucuggaugcccgaagaagcaagacucgggacaucuugugacauuuuuaccaacagcaaagggaagagagcauccaaggggggcaggacuuguggauucguggaugaacggggcuuguauaagucucuaaaaggggcauguaaacuuaagcugugcggaguuccuggacuuagacuuauggauggaacguggguagcuauucagacaccaaaugagaccaaauggugcucuccugaucagcuggugaauguacaugacuuucgcucagaugagauagaacaucucgucguggaggaguugaucaggaaaagggaagaaugucuagaugcacuggaguccaucaugacuacaaaaucaguaagcuucaggcgucucagcaacuugagaaaacuuguuccuggguuuggaaaggcauauacuauauucaacaaaaccuugauggaggcugacgcucacuacaagucaguucggacuuggaaugaaaucauccccucaagagggugccugaaagucggagggaggugucauccucaugugaauggaguguuuuucaaugguauaauuuuggguccggaugggcauauccugauuccggaaaugcaaucaucccuccuccaacagcauauggagcuguuagaauccucuguaaucccuuuaauacauccucuggcagacccaucaacagucuucaaggacggugaugaggcggaggacuuuguugagguucaccuuccggacguucaccaacaggucucagggguugaccucggucucccagacugggggaaguaugugcugaugagugcaggugcucuagcgaccgugaugcugacaauauucuugauaaccuguugcagaagggucaagagaacagaaucaauacaacaaggucuuggugagucaggaaggaaaguaucgguuacuccccaaaacggaaaagucauguccucaugggaauauuacaagaguggaggcgggaccagguuguga

SEQ ID NO: 63416 - RNA, 1575 nt, Artificial Sequence
  derived and/or modified CDS sequence (wt) from glycoprotein__RABV__JX871853.1
augaucucccaggcucuucuguuugugccucuccugauucccucgcugugucucgggaaguuccccaucuacacgauaccagauaagcuuggccccuggagcccgauagacauacaucaucucagcugucccaacaauuugguuguggaagacgaagggugcaccagucugucaggguuuuccuauauggaacugaaggugggauacaucucagccauaaaggugaacggguucacuuguaccgguguugugacagaagccgagaccuacaccaacuuugucgguuaugucaccaccacauuuaagagaaaacacuuccgcccgaugccagaugccugcagagcagcacacgacuggaagauagccggcgauccuagauaugaagauucucuucaaacuccuuauccugauuaccauuggcuacggaccguaaagaccaccaaagagucucuuguuauuauaucuccgaguguggcugauuuggaccccuacgacaaaucccuucauucaagaguuuuccccagugggaaguguuuggggauaacaguauccucuaccuacugcucaacuaaccacgauuacaccaucuggaugcccguagaagcaagacuugggacaucuugugauauuuucaccaauagcagagggaagaaagcaucuaaggggggcaggacuugcggauuuguagaugaaaggggcuuguacaagucucugaaaggagcaugcaaacucaagcuaugcggaguccccgggcuccggcugauggauggaaccugggucucaauccagacaucagaugauauuaaauggugcccuccugaucaauuggugaaucuacaugacuuucacucagaugaaauagaacaucucgucguagaggaauugaucaagaaaagggaaggauguuuagaugcacuggaguccauaaugaccacuaaaucagugagcuucagacgucucagccacuugagaaagcuuguuccuggguuugggaaggcauacaccauauucaauaauaccuuaauggaagcugaugcucauuacaagucaguucggacuuggaacgaagucauccccucaaaagguugccuaaaagucggagggaggugucaucccccugugaacggaguauucuucaaugguauaauucuggguccagaugggaauguuuugaucccugagaugcaaucgucccuucuucaacaacauauggaacuguuggagucuucuguuaucccucugaugcaccccuuggcagacccaucaacagucuucaaagacggugaugaggcggaagacuuuguugagguucaucuuccggauguucacaaacaggucucggauguugaccuuggucuuccgaguugggggaaguaucuguugaugagcgcaggugcucuggcaacacugauucuggcgaucuucuuaauaacauguuguaggagggccaauaggacagaaucaacacagagaggucauagggagucaggagggaaagugucaguagccccucaaaacgggaaaaucauauccucaugggaguuguacaaaagugaaagugagaccgggauguga

SEQ ID NO: 63417 - RNA, 1575 nt, Artificial Sequence
  derived and/or modified CDS sequence (wt) from glycoprotein__RABV__JX871854.1
augaucccucaggcucuucuguuugugccuuuucuauuucccucguugugucucgggaaauuccccaucuacaccauaccggaaaagcucggcccuuggagucccaucgacauacaucaucucagcuguccuaacaauuugguuguggaggacgaggguugcgacagucugucaggguuuucuuacauggaacugaagguggguuacaucucugccauaaaggugaauggguucacuuguaccggugucguuacagaagcugagaccuacaccaacuuuguugguuaugucaccaccacauucaagagaaaacacuuccgcccuaugccagaugcaugcagagcugcguacaacuggaagacagccggugacccuagauaugaggagucucuucacaauccuuauccugauuaccauuggcuacggaccguaaaaaccacuaaagaaucucuuauuaucauaucgccgaguguggcugauuuggacccauaugacaaaucccuucauucaagaguuuucccuggugggaaauguuuggggauaacaaucucuucuaccuacugcucaacuaaccaugacuauacuaucuggaugcccgaagaagcaagacucgggacaucuugugacauuuuuaccaacagcaaagggaagagggcaucuaagggggguaggacuugcggauucguggaugaaaggggcuuauauaagucucuaaaaggggcauguaaacuuaagcugugcggaguuccuggacuuagacuuauggauggaacgugggucgcuauucagacaccaggugagaccaaauggugcucuccugaucagcugguaaaucuacaugacuuucguucagaugagauagaacaucucgucguggaggaguugaucaagaagagagaagaaugucuagaugcacuagaguccaucaugaccaccaaaucaguaagcuucagacgucucagcaacuugagaaaacuugucccuggguuuggaaaggcauacacuauauucaacaaaaccuuaauggaggcugaugcucacuacaagucaauucggacuugggaugaaaucauucccucaaaagggugccuaagagucggagggaggugucauccucauguaaacggaguguuuuucaaugguauaauucuggguccggaugggcauguccuaauuccagagaugcaaucgucccuccuccaacagcauauggagcuguuggaauccucuguaaucccccuaauacaucccuuggccgacccaucaacagucuucaaagacggugaugaagcggaggacuuuguugagguucaccuuccggacguucacgagcaggucucaggggucgaucuuggucucccaaacugggggaaguaugugcugauaagugcagguguucuagcgaccgugauacugacaaucuucuuguuaacauguugcagaaggguuaacagaacaaaaccaaaacaacaaagucuuggggagucaggaaggaaaguaucgguuacuccucaaaaugggaaggucaugucuucaugggaguauuacaagagugagggcaggaccagucuguga

SEQ ID NO: 63418 - RNA, 1575 nt, Artificial Sequence
  derived and/or modified CDS sequence (wt) from glycoprotein__RABV__JX871855.1
augauuccucaggcucuucuguuugugccucuccugauucccucucugugucuuggggaauuccccaucuacacgauaccagacaagcucggcccuuggagcccuaucgacauacaucaucucagcugucccaacaaucugguugcagaaaacgacgggugcaccagucugucaggguuuuccuauauggaacugaaggugggauacaucucugccauaaaggugaacggguucacuuguaccgguguugugacagaagcagagaccuacaccaacuuugucgguuaugucacuaccacauucaagaggaagcacuuccgcccgacgccagaugccugcagagccgcacacgacuggaagauggccggugaucccagauaugaagcuucccuucaaaauccuuauccugauuaccauuggcuacggaccguaaaaaccaccaaggagucacuuguuauuauauccccgaguguugcugauuuggacccuuacgacaagucccuucauucaagaguuuuccccagugggaaguguuuggggauaacagucucuuccaccuacugcucaaccaaccaugauuacaccaucuggaugcccguagaaccaagacuuggaacaucuugugauauuuuuaccaauagcagagggaagagagcaucuaaggggggcaggguuuguggauucguggaugaaaggggcuuauacaagucucucaaaggagcaugcagacucaagcugugcggaguccccgggauccggcuguuggacggaacaugggucucaauccagacaucagaagauaucaaguggugcccuccugaucgauuagugaaucuacacgacuuucacucggaugaaauagaacaucuuguuguagcggaauugaucaagaggagggaaaauugucuagaugcacuggaguccaucaugaccaccaaaucagugagcuucagacgucucagucacuugaggaaacuuguuccuggguuugggaaggcauacaccauauucaacaagaccuuaauggaagcugaugcucauuacaagucaguuaagacuuggaacgaaguuaucccuucgaaagguugccuggaagucggagggagaugucauccccaugugaacggaguauucuucaaugguauaauuuuggguccggauggaaauguucugaucccugagaugcagucuucccugcuucaacaacauauggagcuguuagagucuucugucaucccucugaugcaucccuuggcagacccaucaacagucuucaaggagggugaugaggcggaagacuuuguugagguucaucuuccagauguccacaagcagguuucggauguugaccuuggccucccgaguugggggaaguaucuguugauuagugcaggugcuuuggcaauacugauucuggcgaucgucuuaauaauauguuguaggagggucaauaagacaggauccacacagagaggucauagggaaucaggagggaaaaugucuguaguaccucaaaacgggaagaucauauccucaugggaguuguacaaaagugaaagugagacugggcuguga

SEQ ID NO: 63419 - RNA, 1575 nt, Artificial Sequence
  derived and/or modified CDS sequence (wt) from glycoprotein__RABV__JX871856.1
augaucccucaggcucuucuguuugugccuuuucuauuucccucguugugucucgggaaauuccccaucuacaccauaccggaaaagcucggcccuuggagucccaucgacauacaucaucucagcugcccuaacaauuugguuguggaggacgaggguugcgacagucugucaggguuuucuuacauggaacugaagguagguuacaucucugccauaaaggugaauggguucacuuguaccggugucgugacagaagcugagaccuacaccaacuuuguugguuaugucaccaccacauuuaagagaaaacacuuccgcccuaugccagaugcaugcagagcugcguacaacuggaagacagccggugacccuagauaugaggagucucuucacaauccuuauccugauuaccauuggcuacggaccguaaaaaccaccaaagaaucucuuauuaucauaucgccgaguguggcugauuuggacccauaugacaaaucccuucauucaagaguuuucccuggugggaaauguuuggggauaacagucucuucuaccuacugcucaacuaaccaugacuauacuaucuggaugcccgaagaagcaagacucgggacaucuugugacauuuuuaccaacagcaaagggaagagggcaucuaagggggguaggacuuguggauucguggaugaaaggggcuuauauaagucucuaaaaggggcauguaaacuuaagcugugcggaguuccuggacuuagacuuauggauggaacgugggucgcuauucagacaccaggugagaccaaauggugcucuccugaucagcugguaaaucuacaugacuuucguucagaugagauagaacaucucgucguggaggaguugaucaagaagagggaagagugucuagaugcauuagaguccaucaugaccaccaaaucaguaagcuucagacgucucagcaacuugagaaaacuugucccuggguuuggaaaggcauacacuauauucaacaaaaccuuaauggaggcugaugcucacuacaagucaguucggacuugggaugaaaucauucccucaaaagggugccuaagagucggagggaggugucauccucauguaaacggaguguuuuucaaugguauaauucuggguccggauggacaugucuugauuccagagaugcaaucgucccuccuccaacagcauauggagcuguuggaauccucuguaaucccccuaauacauccuuuggccgacccaucaacagucuucaaagacggugaugaagcggaggacuuuguugagguucaccuuccggacguucacaagcaggucucaggggucgaucuuggucucccaaacugggggaaguaugugcugaugagugcagguguucuagcgaccgugauacugacaaucuucuuguuaacauguugcagaaggguuaacagaacaaaaccaaaacaacaaagucuuggggagucaggaaggaaaguaucgguuacuccucaaaaugggaaggucaugucuucaugggaguauuacaagagugagggcaggaccagucuguga

SEQ ID NO: 63420 - RNA, 1575 nt, Artificial Sequence
  derived and/or modified CDS sequence (wt) from glycoprotein__RABV__JX871857.1
augauuccucaggcucuucuguuugugccucuccugauucccucucugugucuuggggaauuccccaucuacacgauaccagacaagcucggcccuuggagcccuaucgacauacaucaucucagcugucccaacaaucugguugcagaaaacgacgggugcaccagucugucaggguuuuccuauauggaacugaaggugggauacaucucugccauaaaggugaacggguucacuuguaccgguguugugacagaagcagagaccuacaccaacuuugucgguuaugucacuaccacauucaagaggaagcacuuccgcccgacgccagaugccugcagagccgcacacgacuggaagauggccggugaucccagauaugaagcuucccuucaaaauccuuauccugauuaccauuggcuacggaccguaaaaaccaccaaggagucacuuguuauuauauccccgaguguugcugauuuggacccuuacgacaagucccuucauucaagaguuuuccccagugggaaguguuuggggauaacagucucuuccaccuacugcucaaccaaccaugauuacaccaucuggaugcccguagaaccaagacuuggaacaucuugugauauuuuuaccaauagcagagggaagagagcaucuaaggggggcaggguuuguggauucguggaugaaaggggcuuauacaagucucucaaaggagcaugcagacucaagcugugcggaguccccgggauccggcuguuggacggaacaugggucucaauccagacaucagaagauaucaaguggugcccuccugaucgauuagugaaucuacacgacuuucacucggaugaaauagaacaucuuguuguagcggaauuaaucaagaggagggaaaauugucuagaugcacuggaguccaucaugaccaccaaaucagugagcuucagacgucucagucacuugaggaaacuuguuccuggguuugggaaggcauacaccauauucaacaagaccuuaauggaagcugaugcucauuacaagucaguuaagacuuggaacgaaguuaucccuucgaaagguugccuggaagucggagggagaugucauccccaugugaacggaguauucuucaaugguauaauuuuggguccggauggaaauguucugaucccugagaugcagucuucccugcuucaacaacauauggagcuguuagagucuucugucaucccucugaugcaucccuuggcagacccaucaacagucuucaaggagggugaugaggcagaagacuuuguugagguucaucuuccagauguccacaagcagguuucggauguugaccuuggccuuccgaguugggggaaguaucuguugaucagugcaggugcuuuggcaauacugauucuggcuaucgucuuaauaauauguuguaggagggucaauaagacaggauccacacagagaggucauagggaaucaggagggaaaaugucuguaguaccucaaaacgggaagaucauauccucaugggaguuguacaaaagugaaagugagacugggcuguga

SEQ ID NO: 63421 - RNA, 1575 nt, Artificial Sequence
  derived and/or modified CDS sequence (wt) from glycoprotein__RABV__JX871858.1
augaucccccaggcucuucuguuugugccucuccugauucccucgcugugucucgggaaguuccccaucuauacgauaccagauaagcuuggccccuggagcccgauagacauacaucaucucagcugucccaacaauuugguuguggaagacgaagggugcaccagucugucaggguucuccuauauggaacugaaggugggauacaucucagccauaaaggugaacggguucacuuguaccgguguugugacagaagccgagaccuacaccaacuuugucgguuaugucaccaccacauuuaagagaaaacacuuccgcccgaugccagaugccugcagagcugcacacgacuggaagauagccggcgauccuagauaugaagauucucuucaaaauccuuauccugauuaccauuggcuacggaccguaaagaccaccaaggagucucucguuauuauaucuccgaguguggcugaguuggacccuuacgacaaaucccuucauucaagaguuuuccccggugggaaguguuuggggauaacagucuccucuaccuacugcucaacuaaccacgauuacaccaucuggaugcccguagaagcaagacuugggacaucuugugauauuuucaccaauagcagagggaagaaagcaucuaaggggggcaggacuugcggauuuguagaugaaaggggcuuguacaagucucugaaaggagcaugcaaacucaagcuaugcggaguccccgggcuccggcugauggauggaaccugggucucaauccagacaucagaugauauuaaauggugcccuccugaucaauuggugaaucuacaugacuuucacucagaugaaauagaacaucucgucguagaggaauugaucaagaaaagggaaggguguuuagaugcacuggaguccauaaugaccacuaaaucagugagcuucagacgucucagccacuugagaaagcuuguuccuggguuugggaaggcauacaccauauucaauaauaccuuaauggaagcugaugcucauuacaagucaguucggacuuggaacgaagucauccccucaaaagguugccuaaaagucggagggaggugucaucccccugugaacggaguauucuucaaugguauaauuuuggguccagaugggaauguucugaucccugagaugcaaucgucccugcuucaacaacauauggaacuguuggaguccucuguuaucccucugaugcaucccuuggcagacccaucaacagucuucaaagacggugaugaggcggaagacuuuguugagguucaucuuccggauguucacaaacaggucucggauguugaccuuggucuuccgaguugggggaaguaucuguugaugagcgcaggugcucuggcgacacugauucuggcgaucuucuuaauaacauguuguaggagggccaauaggacagaaucaacacagagaggucauagggagucaggagggaaagugucaguagccccucaaaacgggaaaaucauauccucaugggaguuguacaaaagugaaagugagaccgggauguga

SEQ ID NO: 63422 - RNA, 1575 nt, Artificial Sequence
  derived and/or modified CDS sequence (wt) from glycoprotein__RABV__JX871859.1
augaucccucaggcucuucugucugugccucuucuaauuucuucguuguguuucgggaaauuccccaucuacacgauaccagagaagcucggcccuuggagucccaucgauauacaucaccucagcuguccuaacaauuugguuguggaggaugagggaugcaacagucugucaggguuuucuuacauggaacugaaggugggauacaucucugccauaaaaguuaauggguucacuuguacugguguugugacagaagcugagaccuacaccaacuuuguugguuacgucaccaccacauucaagagaaaacacuuccgcccuaugccggaugcaugcagagcugcauacaacuggaagacggccggcgauccuagauaugaagagucccuucacaauccuuauccugauuaccauuggcuaaggaccguaaaaaccaccaaagaaucccuuauuaucauaucgccaaguguggcugauuuggaccccuacgacaaaucucuucauucaagaaucuucccuggugggaaaugcuugggaauaacaaucucuuccaccuacuguucaacuaaccaugauuauacuaucuggaugcccgaagaagcaagacucgggacaucuugugacauuuuuaccaacagcaaagggaagagagcauccaagggggguaggacuuguggauucguggaugaacggggcuuguauaagucucuaaaaggggcauguaaacuuaagcugugcggaguuccuggacuuagacuuauggauggaacgugggucgcuauucagacaccaaaugagaccaaauggugcucuccugaucagcuggugaauguacaugacuuucgcucagaugagauagaacaucucgucguggaggaguugaucaggaaaagggaagaaugucuagaugcacuggaguccaucaugacuacaaaaucaguaagcuucaggcgucucagcaacuugagaaaacuuguuccuggguuuggaaaggcauauacuauauucaacaaaaccuuaauggaggcugaugcucacuacaagucaguucggacuuggaaugaaaucauccccucaagagggugccugaaagucggagguaggugucauccucaugugaauggaguguuuuucaaugguauaaucuuggguccggaugggcauauccugauuccggagaugcaaucaucccuccuccaacagcauauggagcuguuagaauccucuguaauccccuuaauacauccucuggcagacccaucaacagucuuuaaggacggugaugaggcggaggacuuuguugagguucaccuuccggacguucaccaacaggucucagggguugaccucggucucccagacugggggaaguaugugcugaugagugcaggugcucuagcgaccgugaugcugacaauauucuugauaaccuguugcagaagggucaagagaacagaaucaauacaacaaggucuuggugagucaggaaggaaagugucgguaacuccccaaaacggaaaagucauguccucaugggaauauuacaagaguggaggcgggaccaggcuguga

SEQ ID NO: 63423 - RNA, 1575 nt, Artificial Sequence
  derived and/or modified CDS sequence (wt) from glycoprotein__RABV__JX871860.1
augaucccucaggcucuucuguuugugccucuccugauucccucgcugugucucgggaaauuccccaucuacacgauaccagacaagcucggccccuggagcccgaucgacauacaucaucucagcugucccaacaaucugguugcagaagacgaagggugcaccagucugucaggguucuccuauauggaacugaaggugggauacaucucugccauaaaggugaacggguucacuuguaccgguguugugacagaagcugagaccuacaccaacuuugucgguuaugucaccaccacauuuaagagaaaacacuuccgcccgaugccagacgccugcagagcugcacacgacuggaagauggccggugauccuagauaugaagauucucuucagaauccuuauccugauuaccauuggcuacggaccguaaagaccaccaaggagucgcucguuauuauauccccgaguguggcugauuuggaccccuacgacaagucccuucauucaagaguuuuccccagugggaaguguuuggggauaacagucuccucuaccuacugcucaacuaaccaugauuacaccaucuggaugcccguagaagcaagacuugggacaucuugugauauuuuuaccaauagcaaagggaagaaagcaucuaaggggggcaggacuugcggauuuguagaugaaaggggcuuguacaagucucugaaaggagcaugcaaacucaagcuaugcggaguccccgggcucaggcuaauggacggaaccugggucucaauccagacaucagaugauauuaaauggugcccuccugaucaauuggugaaucuacaugacuuucacucagaugaaauagaacaucuugucguagaggaauugaucaagaaaagagaaggaugucuagaugcacuggaguccaucaugaccaccaaaucagugagcuucagacgucucagccacuugagaaagcuuguuccuggguuugggaaggcauacaccauauucaacaauaccuuaauggaagcugaugcucauuacaagucaguucggacuuggaacgaagucauccccucaaaagguugccuaaaggucggagggaggugucaucccccugugaauggaguauucuucaaugguauaauuuuggguccagaugggaauguucugaucccugagaugcaaucgucccugcuucaacaacauauggaacuguuggagucuucuguuaucccucugaugcaucccuuggcagacccaucaacagucuucaaggacggugaugaggcagaagauuuuguugagguucaucuuccggauguucacaaacaggucucggagauugaccuuggucucccgaguugggggaaguaucuguugaugagugcagguguuuuggcaacacugauucuggcgaucuucuugauaacaugcuguagaagggccaauaggacagaaucaacacagagaggucguagggagucaggagggaaagugucaguagccccucaaaacgggaaaaucauauccucaugggaguuguacaaaagugaaagugagaccgggcuguga

SEQ ID NO: 63424 - RNA, 1575 nt, Artificial Sequence
  derived and/or modified CDS sequence (wt) from glycoprotein__RABV__JX871862.1
augaucccucaggcucuucuguaugugccucuccugaucuccucguuguguuucgggggauuccccaucuacacgauaccagacaagcucggccccuggagucccauugacauacaucaucucagcugucccaacaauuugguuguggaggacgaggggugcaccagucugucaggguuuucuuacauggaacugaaggugggguacaucucugccauaaaggugaacggguucacuuguacuggugucgugacagaggccgagaccuacaccaacuuuguugguuaugucaccaccacauucaagagaaaacacuuucgcccuaugccagaugcaugcagagcugcauacaauuggaagguggccggugauccuagauaugaagaaucucuucaaaauccuuauccugacuacaguuggcuacggaccguaaagaccaccaaagagucucuuauuauuauaucuccaaguguagcggauuuggacccauacgacaaaucccuucauucaagaguuuucccuggugggaaguguuugggaauaacaaucucuucuaccuacugcucaacuaaccaugauuacaccaucuggaugccugaagaagcaagacucgggacaucuugugacauuuuuaccaacagcagagggaagagagcauccaaggggggcaagaccugcggauucguggacgaaaggggcuuguacaagucucuaaaaggagcauguaaacuuaagcugugcggaguucccggacucagacuuauggauggaaccugggucacaauucagacaucagaugaaaccaaauggugcccuucugaucaauugguaaaucuacaugacuuucacucagaugagauagaacaucuugucguggaggaguuggucaagaagagggaagaaugucuggaugcacuggaguccaucaugaccaccaaauccgugagcuucagacgucuuagccacuugagaaaacuuguuccuggguuuggaaaggcauauacuauauucaacaagaccuuaauggaagcugaugcucauuacaagucaauucggaccuggaacgagaucauccccucaaaagggugccuaaaagucggagggaggugucauccgcauguggacggaguguucuucaaugguauaauucuggguccggacgggaauguccuaaucccugagaugcaaucgucccuacuucaacaacauguggagcuguuggaguccucuguaaucccucuaaugcaucccuuggcagacccaucaacagucuuuaaggacggugaugaagcggaggacuuuguugagguucaccuuccggauauucacaaacaggucucaggggucgaccuuggucucccaaacugggggaaguaucugcuaauaagugcaggugcucuggcaacacuaaugcugacaaucuuuuuaaugacauguugcagaagagcuaaucgaacagaaucaauacaacgagaucccggggagccaggaaagaaaguaucgauaacuucccaagacgggaaagucauaucuucaugggaguuguacaagaguggaggcgagaccaggcuguga

SEQ ID NO: 63425 - RNA, 1575 nt, Artificial Sequence
  derived and/or modified CDS sequence (wt) from glycoprotein__RABV__JX871863.1
augaucccucaggcucuucuguuugugccucuucugauuuccucauuguguuucggaaaauuuccaaucuauacgauacccgaaaaacucggcccuuggagucccauugacauacaucaucucagcuguccuaacaauuugguugcggaggacgaaggaugcaacagucugucaggguuuucuuauauggaacugaaggugggauacaucucugccauaaaagugaacggguucacuuguacagguguugugacagaagcugagaccuauaccaacuuuguugguuaugucaccaccacauucaagagaaaacacuuccgcccgacaccagaugcaugcagagcugcauacaacuggaagauggccggugauccgagauaugaagagucucuucacaauccuuauccugauuaccauuggcuacggaccguaaaaaccaccaaagagucucuugucaucauaucgccaaguguggcugauuuggacccauacgacaaaucccuucauucaagaguuuucccugaugggaaguguuugggaauuacuaucucuucuacuuacugcucaacuaaccaugauuacacuaucuggaugccugaagaggcaagacucgggacaucuugugacauuuuuacaaccagcaaagggaagagagcaucuaagggagacaagauuugcggauucguggaugagaggggcuuauauaagucucuaaaaggagcaugcaaacuuaaguugugcggaguucuuggacuuagacuuauggauggaaccuggguuucaauucagacaccaggugaaaccaaauggugcucuccugaucagcuagugaaucuacaugauuuucacucagaugagauagagcaucucgucgcagaggaguuggucaagaagagggaagaaugucuggaugcacuggaguccaucaugaccaccaaaucagucaguuuuagacgucucagccauuugagaaaacuuguuccuggguuuggaaaggcauacaccauauucaacaaaaccuuaauggaggcugaugcucacuacaagucaguucggaccuggaacgaagucauccccucaaaagggugccuaagcgucggagggaggugucauccucaugugaauggaguguucuucaaugguauaauucuggguccggacggaagugucuugaucccggagaugcagucgucccuacuccaacagcauauggaacugcuggaguccucuguaaucccccugaugcaucccuuggcagacccaucaacagucuucaaggacgaugacgaggcagagaacuuuguugagguucaccuuccggacguucacaaacaagucucagggguugaccuuggucucccaaacugggggaaguauuugcugaugauugcaggugcucuggcgacccuaaugcugacaaucuucuuaaugacauguugcagaaggacuaagagaacagaaucgauacaacaaggucuuggggagucaggaaggaaagugucaguuacuccccaaagcgggaaagucauaucuucaugggagucguauaagaguggaggugagaccaggcuguga

SEQ ID NO: 63426 - RNA, 1575 nt, Artificial Sequence
  derived and/or modified CDS sequence (wt) from glycoprotein__RABV__JX871864.1
augauuccucaggcucuucuguuugugccucuccugauucccucucugugucuuggggaauuccccaucuacacgauaccagacaagcucggcccuuggagcccuaucgacauacaucaucucagcugucccaacaaucugguugcagaaaacgacgggugcaccagucugucaggguuuuccuauauggaacugaaggugggauacaucucugccauaaaggugaacggguucacuuguaccgguguugugacagaagcagagaccuacaccaacuuugucgguuaugucacuaccacauucaagaggaagcacuuccgcccgacgccagaugccugcagagccgcacacgacuggaagauggcaggugaucccagauaugaagcuucccuucaaaauccuuauccugauuaccauuggcuacggaccguaaaaaccaccaaggagucacuuguuauuauauccccgaguguugcugauuuggacccuuacgacaagucccuucauucaagaguuuuccccagugggaaguguuuggggauaacagucucuuccaccuacugcucaaccaaccaugauuacaccaucuggaugcccguagaaccaagacuuggaacaucuugugauauuuuuaccaauagcagagggaagagagcaucuaaggggggcaggguuuguggauucguggaugaaaggggcuuauacaagucucucaaaggagcaugcagacucaagcugugcggaguccccgggauccggcuguuggacggaacaugggucucaauccagacaucagaagauaucaaguggugcccuccugaucgauuagugaaucuacacgacuuucacucggaugaaauagaacaucuuguuguagcggaauuaaucaagaggagggaaaauugucuagaugcacuggaguccaucaugaccaccaaaucagugagcuucagacgucucagucacuugaggaaacuugucccuggguuugggaaggcauacaccauauucaacaagaccuuaauggaagcugaugcucauuacaaguuaguuaagacuuggaacgaauuuauaccuucgaaagguugccuggaagucggagggagaugucauccccaugugaacggaguauucuucaaugguauaauuuuggguccggauggaaauguucugaucccugagaugcagucuucccugcuucaacaacauauggagcuguuagagucuucugucaucccuuugaugcaucccuuggcagacccaucaacagucuucaaggagggugaugaggcggaagacuuuguugagguucaucuuccagauguccacaagcagguuucggauguugaccuuggccuuccgaguugggggaaguaucuguugauuagugcaggugcuuuggcaauacugauucuggcgaucgucuuaauaauauguuguaggagggucaauaagacaggauccacacagagaggucauagggaaucaggagggaaaaugucuguaguaccccaaaacgggaagaucauauccucaugggaguuguacaaaagugaaagugagacugggcuguga

SEQ ID NO: 63427 - RNA, 1575 nt, Artificial Sequence
  derived and/or modified CDS sequence (wt) from glycoprotein__RABV__JX871865.1
augaucccucaagcucuucugucugugccucuucuaauuuccucguuguguuucgggaaauuccccaucuacacgauaccagagaagcucggcccuuggagucccaucgacauacaucaccucagcuguccuaacaauuugguuguggaggaugagggaugcaacagucugucaggguuuucuuacauggaacugaaggugggauacaucucugccauaaaaguuaauggguucacuuguacugguguugugacagaagcugagaccuacaccaacuuuguugguuacgucaccaccacauuuaagagaaaacacuuccgcccuauggcggaugcaugcagagccgcauacaacuggaagacggccggcgauccuagauaugaagagucccuucacaauccuuauccagauuaccauuggcuaaggaccguaaaaaccaccaaagaaucccuuauuaucauaucgccaaguguggcugauuuggaccccuacgacaaaucucuucauucaagaaucuucccuggugggaaaugcuuggggauaacaaucucuuccaccuacuguucaacuaaccaugauuauacuaucuggaugcccgaagaagcaagacucgggacaucuugugacauuuuuaccaacagcaaggggaagagagcauccaagggggguaggacuuguggauucguggaugaacggggcuuguauaagucucuaaaaggggcauguaaacuuaagcugugcggaguuccuggacuuagacuuauggauggaacguggguggcuauucagacaccaaaugagaccaaauggugcucucccgaucagcuggugaauguacaugacuuucgcucagaugagauagaacaucucgucguggaggaguugaucaggaaaagggaagaaugucuagaugcacuggaguccaucaugacuacaaaaucaguaagcuucaggcgucucagcaacuugagaaaacuuguuccuggguuuggaaaggcauauacuauauucaacaaaaccuuaauggaggcugacgcucacuacaagucaguucggacuuggaaugaaaucauccccucaagagggugccugaaagucggagggaggugucauccucaugugaauggaguguuuuucaaugguauaauuuuggguccggaugggcauauccugauuccggaaaugcaaucaucccuccuccaacagcauauggagcuguuagaauccucuguaaucccuuuaauacauccucuggcagacccaucaacagucuucaaggacggugaugaggcggaggacuuuguugagguucaccuuccggacguucaccaacaggucucagggguugaccucggucucccagacugggggaaguaugugcugaugagugcaggugcucuagcgaccgugaugcugacaauauucuugauaaccuguugcagaagggucaagagaacagaaucaauacaacaagguccuggugagucaggaaggaaaguaucgguuacuccccaaaacggaaaagucauguccucaugggaauauuacaagaguggaggcgggaccagguuguga

SEQ ID NO: 63428 - RNA, 1575 nt, Artificial Sequence
  derived and/or modified CDS sequence (wt) from glycoprotein__RABV__JX871866.1
augauuccucaggcuauucuguuugugccucuccugauucccucucugugucuuggggaauuccccaucuacacgauaccagacaagcucggcccuuggagcccuaucgacauacaucaucucagcugucccaacaaucugguugcagaaaacgacgggugcaccagucugucaggguuuuccuauauggaacugaaggugggauacaucucugccauaaaggugaacggguucacuuguaccgguguugugacagaagcagagaccuacaccaacuuugucgguuaugucacuaccacauucaagaggaagcacuuccgcccgacgccagaugccugcagagccgcacacgacuggaagauggccggugaucccagauaugaagcuucccuucaaaauccuuauccugauuaccauuggcuacggaccguaaaaaccaccaaggagucacuuguuauuauauccccgaguguugcugauuuggacccuuacgacaagucccuucauucaagaguuuuccccagugggaaguguuuggggauaacagucucuuccaccuacugcucaaccaaccaugauuacaccaucuggaugcccguagaaccaagacuuggaacaucuugugauauuuuuaccaauagcagagggaagagagcaucuaaggggggcaggguuuguggauuuguggaugaaaggggcuuauacaagucucucaaaggagcaugcagacucaagcugugcggaguccccgggauccggcuguuggacggaacaugggucucaauccagacaucagaagauaucaaguggugcccuccugaucgauuagugaaucuacacgacuuucacucggaugaaauagaacaucuuguuguagcggaauuaaucaagaggagggaaaauugucuagaugcacuggaguccaucaugaccaccaaaucagugagcuucagacgucucagucauuugaggaaacuuguuccuggguuugggaaggcauacaccauauucaacaagaccuuaauggaagcugaugcucauuacaagucaguuaagacuuggaacgaaguuaucccuucgaaagguugccuggaagucggagggagaugucauccccaugugaacggaguauucuucaaugguauaauuuuggguccggauggaaauguucugaucccugagaugcagucuucccugcuucaacaacauauggagcuguuagagucuucugucaucccucugaugcaucccuuggcagacccaucaacagucuucaaggagggugaugaggcagaagacuuuguugagguucaucuuccagauguccacaagcagguuucggauguugaccuuggccuuccgaguugggggaaguaucuguugauuagugcaggugcuuuggcaauacugauucuggcuaucgucuuaauaauauguuguaggagggucaauaagacaggauccacacagagaggucauagggaaucaggagggaaaaugucuguaguaccucaaaacgggaagaucauauccucaugggaguuguacaaaagugaaagugagacugggcuguga

SEQ ID NO: 63429 - RNA, 1575 nt, Artificial Sequence
  derived and/or modified CDS sequence (wt) from glycoprotein__RABV__JX871867.1
augauuccucaggcucuucuguuugugccucuccugauucccucucugugucuuggggaauuccccaucuacacgauaccagacaagcucggcccuuggagcccuaucgacauacaucaucucagcugucccaacaaucugguugcagaaaacgacgggugcaccagucugucaggguuuuccuauauggaauugaaggugggauacaucucugccauaaaggugaacggguucacuuguaccgguguugugacagaagcagagaccuacaccaacuuugucgguuaugucacuaccacauucaagaggaagcacuuccgcccgacgccagaugccugcagagcugcacacgacuggaagauggccggugaucccagauaugaagcuucccuucaaaauccuuauccugauuaccauuggcuacggaccguaaaaaccaccaaggagucacuuguuauuauauccccgaguguugcugauuuggacccuuacgacaagucccuucauucaagaguuuucccuagugggaaguguuuggggauaacagucucuuccaccuacugcucaaccaaccaugauuacaccaucuggaugcccguagaaccaagacuuggaacaucuugugauauuuuuaccaauagcagagggaagagagcaucuaaggggggcaggguuuguggauucguggaugaaaggggcuuauacaagucucucaaaggagcaugcagacucaagcugugcggaguccccgggauccggcuguuggacggaacaugggucucaauccagacaucagaagauaucaaguggugcccuccugaucgauuagugaaucuacacgacuuucacucggaugaaauagaacaucuuguuguagcggaauuaaucaagaggagggaaaauugucuagaugcacuggaguccaucaugaccaccaaaucagugagcuucagacgucucagucauuugaggaaacuuguuccuggguuugggaaggcauacaccauauucaacaagaccuuaauggaagcugaugcucauuacaagucaguuaagacuuggaacgaaguuaucccuucgaaagguugccuggaagucggagggagaugucauccccaugugaacggaguauucuucaaugguauaauuuuggguccggauggaaauguucugaucccugagaugcagucuucccugcuucaacaacauauggagcuguuagagucuucugucaucccucugaugcaucccuuggcagacccaucaacagucuucaaggagggugaugaggcagaagacuuuguugagguucaucuuccagauguccacaagcagguuucggauguugaccuuggccuuccgaguugggggaaguaucuguugauuagugcaggugcuuuggcaauacugauucuggcuaucgucuuaauaauauguuguaggagggucaauaagacaggauccacacagagaggucauagggaaucaggagggaaaaugucuguaguaccucaaaacgggaagaucauauccucaugggaguuguacaaaagugaaagugagacugggcuguga

SEQ ID NO: 63430 - RNA, 1575 nt, Artificial Sequence
  derived and/or modified CDS sequence (wt) from glycoprotein__RABV__JX871868.1
augaucccccaggcuuuucuguuugugccucuccugauucccucgcugugucucgggaaguuccccaucuacacgauaccagacaagcuuggccccuggagcccgauagacauacaucaucucagcugucccaacaauuugguuguggaagacgaagggugcaccagucugucaggguuuuccuauauggaacugaaggugggauacaucucagccauaaaggugaacggguucacuuguaccgguguugugacagaagccgagaccuacaccaacuuugucgguuaugucaccaccacauuuaagagaaaacacuuccgcccgaugccagaugccugcagagcugcacacgacuggaagauagccggcgauccuagauaugaagauucucuucaaaauccuuauccugauuaccauuggcuacggaccguaaagaccaccaaggagucucucguuauuauaucuccgaguguggcugauuuggaccccuacgacaaaucccuucauucaagaguuuuccccagugggaaguguuuggggauaacagucuccucuaccuacugcccaacuaaccacgauuacacuaucuggaugcccguagaagcaagacuugggacaucuugugauauuuucaccaauagcagagggaagaaagcaucuaaggggggcaggacuugcggauuuguagaugaaaggggcuuguacaagucucugaaaggagcaugcaaacucaagcuaugcggaguccccgggcuccggcugauggauggaaccugggucucaauccagacaucagaugaugucaaauggugcccuccugaucaauuggugaaucuacaugacuuucacucagaugaaauagaacaucucgucguagaggaauugaucaagaaaagggaaggauguuuagaugcacuggaguccauaaugaccacuaaaucagugagcuucagacgucucagccacuugagaaagcuuguuccuggguuugggaaggcauacaccauauucaauaauaccuuaauggaagcugaugcucauuacaagucaguucggacuuggaacgaagucauccccucaaaagguugccuaaaagucggagggaggugucaccccccugugaacggaguauucuucaaugguauaauuuuggguccagaugggaauguucugaucccugagaugcaaucgucccugcuucaacaacauauggaacuguuggagucuucuguuaucccucugaugcaccccuuggcagacccaucaacagucuucaaggacggugaugaggcggaagacuuuguugagguucaucuuccggauguucacaaacaggucucggauguugaccuuggucuuccgaguuggggaaaguaucuguugaugagcgcaggugcucuggcaacacugauucuggcgaucuucuuaauaacauguuguagaagggccaauaggacaaaaucaacacagagaggucauagggagucaggagggaaagugucaguagccccucaaaacgggaaaaucauauccucaugggaguuguacaaaagugaaagugagaccgggauguga

SEQ ID NO: 63431 - RNA, 1575 nt, Artificial Sequence
  derived and/or modified CDS sequence (wt) from glycoprotein__RABV__JX871869.1
augaucccucaggcucuucugucugugccucuucuaauuucuucguuguguuucgggaaauuccccaucuacacgauaccagagaagcucggcccuuggagucccaucgauauacaucaccucagcuguccuaacaauuugguuguggaggaugagggaugcaacagucugucaggguuuucuuacauggaacugaaggugggauacaucucugccauaaaaguuaauggguucacuuguacugguguugugacagaagcugagaccuacaccaacuuuguugguuacgucaccaccacauucaagagaaaacacuuccgcccuaugccggaugcaugcagagcugcauacaacuggaagacggccggcgauccuagauaugaagagucccuucacaauccuuauccugauuaccauuggcuaaggaccguaaaaaccaccaaagaaucccuuauuaucauaucgccaaguguggcugauuuggaccccuacgacaaaucucuucauucaagaaucuucccuggugggaaaugcuugggaauaacaaucucuuccaccuacuguucaacuaaccaugauuauacuaucuggaugcccgaagaagcaagacucgggacaucuugugacauuuuuaccaacagcaaagggaagagagcauccaagggggguaggacuuguggauucguggaugaacggggcuuguauaagucucuaaaaggggcauguaaacuuaagcugugcggaguuccuggacuuagacuuauggauggaacgugggucgcuauucagacaccaaacgagaccaaauggugcucuccugaucagcuggugaauguacaugacuuucgcucagaugagauagaacaucucgucguggaggaguugaucaggaaaagggaagaaugucuagaugcacuggaguccaucaugacuacaaaaucaguaagcuucaggcgucucagcaacuugagaaaacuuguuccuggguuuggaaaggcauauacuauauucaacaaaaccuuaauggaggcugaugcucacuacaagucaguucggacuuggaaugaaaucauccccucaagagggugccugaaagucggagguaggugucauccucaugugaauggaguguuuuucaauggcauaauuuuggguccggaugggcauauccugauuccggagaugcaaucaucccuccuccaacagcauauggagcuguuagaauccucuguaauccccuuaauacauccucuggcagacccaucaacagucuuuaaggacggugaugaggcggaggacuuuguugagguucaccuuccggacguucaccaacaggucucagggguugaccucggucucccagacugggggaaguaugugcugaugagugcaggugcucuagcgaccgugaugcugacaauauucuugauaaccuguugcagaagggucaagagaacagaaucaauacaacaaggucuuggugagucaggaaggaaagugucgguaacuccccaaaacggaaaagucauguccucaugggaauauuacaagaguggaggcgggaccaggcuguga

SEQ ID NO: 63432 - RNA, 1575 nt, Artificial Sequence
  derived and/or modified CDS sequence (wt) from glycoprotein__RABV__JX871870.1
augaucuuucaggcucuucuauuugugccucuccuaauuucuucguugugucuugggaaauuccccaucuacacgauaccagacaagcucggucccuggagccccaucgacauacaucaccucagcuguccaaacaauuugguuguggaggacgaggggugcaccagccugucaggguuuucuuacauggaacuaaaggugggauacaucucugcuauaaaggugaauggguuuaccuguaccgguguugugacagaagcugagaccuauacuaacuuuguugguuaugucaccaccacauucaagaggaaacauuuucgcccuauaccagaugcauguagggcugcauacaacuggaagauagcuggugaucccagauacgaggagucucuucaaaauccuuauccugauuaucauuggcuacggacagugaagaccaccaaggagucucuuaucaucauaucuccaaguguggcugauuuggacccauaugacaaaucccuucauucuagguuguucccuggugggaaguguuugggaauaacaauuucuucuaccuacugcuccaccaaccaugauuacacuaucuggaugccugaagaaccaagacucgggacaucuugugacauuuuuacuaauagcaaagggaaaaaggcgucuaaggggggcaagguuugcggauuuguggaugaaaggggcuuguauaagucucuaaagggagcauguaaacucaagcugugcggaguuuccggacuuagacuuauggauggaacuuggguuacaauucagacgucagaugagaucaaauggugcccuccagaucaauugguaaaucuacaugacuuucacucagaugaaauagagcaucucgucguggaggaauugguuaagaagagggaggagugucuggaugcauuagaguccaucaugaccaccaaaucuguaaguuucagacgucuaagcuauuugagaaaacuuguccccggguuuggaaaggcauauacuauauucaacaagacuuugauggaagccgacgcccacuacaagucaguucggacuuggaaugagaucauccccucaaaaggauguuugaaagucagugauaggugucauccucauguagacggaguguucuucaauggcauaauucuggguccugacgggaaugucuugauaccugaaaugcaaucgucccuacuucaacaacauauggagcuguuggaguccucuguaauccccuugaugcaucccuuggcagacccaucaacaguauucaaggauggagacgaagcggaggacuuuguugaaguucaccucccggauguucacaaacagaucucagggguugaccucggucucccuaguugggggaaguaucuccucaugauugcagguggucuagcgacacuaguucugauaaucuucuugauggcauguuguagaagaaccaagagaacagaaucaagacggcgaggcucuggggaaucaggagagaagguauuggcaacuccccaacccaagaaagucguaucuucaugggaguuguacaagagagaaggcgaugccaggcuguga

SEQ ID NO: 63433 - RNA, 1575 nt, Artificial Sequence
  derived and/or modified CDS sequence (wt) from glycoprotein__RABV__JX871871.1
augauuccucaggcucuucuguuugugccucuccugauucccucucugugucuuggggaauuccccaucuacacgauaccagacaagcucggcccuuggagcccuaucgacauacaucaucucagcugucccaacaaucugguugcagaaaaugacgggugcaccagucugucaggguuuuccuauauggaacugaaggugggauacaucucugccauaaaggugaacggguucacuuguaccgguguugugacagaagcagagaccuacaccaacuuugucgguuaugucacuaccacauucaagaggaagcacuuccgcccgacgccagaugcaugcagagcugcacacgacuggaagauggccggugaucccagauaugaagcuucccuucaaaauccuuauccugauuaccauuggcuacggaccguaaaaaccaccaaggagucacuuguuauuauauccccgaguguugcugauuuggacccuuacgacaagucccuucauucaagaguuuucccuagugggaaguguuuggggauaacagucucuuccaccuacugcucaaccaaccaugauuacaccaucuggaugcccguagaaccaagacuuggaacaucuugugauauuuuuaccaauagcagagggaagagagcaucuaaggggggcaggguuuguggauucguggaugaaaggggcuuauacaagucucucaaaggagcaugcagacucaagcugugcggaguccccgggauccggcuguuggacggaacaugggucucaauccagacuucagaagauaucaaguggugcccuccugaucgauuagugaaucuacacgacuuucacucggaugaaauagaacaucuuguuguagcggaauuaaucaagaggagggaaaauugucuagaugcacuggaguccaucaugaccaccaaaucagugagcuucagacgucucagucacuugaggaaacuuguuccuggguuugggaaggcauacaccauauucaacaagaccuuaauggaagcugaugcucauuacaagucaguuaagacuuggaacgaaguuaucccuucgaaagguugccuggaagucggagggagaugucauccccacgugaacggaguauucuucaaugguauaauuuuggguccggauggaaauguucugaucccugagaugcagucuucccugcuucaacaacauauggagcuguuagagucuucugucaucccucugaugcaucccuuggcagacccaucaacagucuucaaggagggugaugaggcagaagacuuuguugagguucaucuuccagauguccacaagcagguuucggauguugaccuuggccuuccgaguugggggaaguaucuguugauuagugcaggugcuuuggcaauacugauucuggcuaucgucuuaauaauauguuguaggagggucaauaagacaagauccacacagagaggucauagggaaucaggagggaaaaugucuguaguaccucaaaacgggaagaucauauccucaugggaguuauacaaaagugaaagugagacugggcuguga

SEQ ID NO: 63434 - RNA, 1575 nt, Artificial Sequence
  derived and/or modified CDS sequence (wt) from glycoprotein__RABV__JX871872.1
augauuccucaggcucuucuguuugugccucuccugauucccucucugugucuuggggaauuccccaucuacacgauaccagacaagcucggcccuuggagcccuaucgacauacaucaucucagcugucccaacaaucugguugcagaaaacgacgggugcaccagucugucaggguuuuccuauauggaacugaaggugggauacaucucugccauaaaggugaacggguucacuuguaccgguguugugacagaagcagagaccuacaccaacuuugucgguuaugucacuaccacauucaagaggaagcacuuccgcccgacgccagaugccugcagagccgcacacgacuggaagauggccggugaucccagauaugaagcuucccuucaaaauccuuauccugauuaccauuggcuacggaccguaaaaaccaccaaggagucacuuguuauuauauccccgaguguugcugauuuggacccuuacgacaagucccuucauucaagaguuuuccccagugggaaguguuuggggauaacagucucuuccaccuacugcucgaccaaccaugauuacaccaucuggaugcccguagaaccaagacuuggaacaucuugugauauuuuuaccaauagcagagggaagagagcaucuaaggggggcaggguuuguggauucguggaugaaaggggcuuauacaagucucucaaaggagcaugcagacucaagcugugcggaguccccgggauccggcuguuggacggaacaugggucucaauccagacaucagaagauaucaaguggugcccuccugaucgguuagugaaucuacacgacuuucacucggaugaaauagaacaucuuguuguggcggaauuaaucaagaggagggaaaauugucuagaugcacuggaguccaucaugaccaccaaaucagugagcuucagacgucucagucacuugaggaaacuuguuccuggguuugggaaggcauacaccauauucaacaagaccuuaauggaagcugaugcucauuacaagucaguuaagacuuggaacgaaguuaucccuucgaaagguugccuagaagucggagggagaugucauccccaugugaacggaguauucuucaaugguauaauuuuggguccggauggaaauguucugaucccugagaugcagucuucccugcuucaacaacauauggagcuguuagagucuucugucaucccucugaugcaucccuuggcagacccaucaacagucuucaaggagggugaugaggcggaagacuuuguugagguucaucuuccagacguccacaagcagguuucggauguugaccuuggccuuccgaguugggggaaguaucuguugauuagugcaggugcuuuggcaauacugauucuggcgaucgucuuaauaauauguuguaggaggguuaauaagacaggauccacacagagaggucauagggaaucaggagggaaaaugucuguaguaccucaaaacgggaagaucauauccucaugggaguuguacaaaagugaaagugagacugggcuguga

SEQ ID NO: 63435 - RNA, 1575 nt, Artificial Sequence
  derived and/or modified CDS sequence (wt) from glycoprotein__RABV__JX871873.1
augauuccucaggcucuucuguuugugccucuccugauucccucucugugucuuggggaauuccccaucuacacgauaccagacaagcucggcccuuggagcccuaucgacauacaucaucucagcugucccaacaaucugguugcagaaaacgacgggugcaccagucugucaggguuuuccuauauggaacugaaggugggauacaucucugccauaaaggugaacggguucacuuguaccgguguugugacagaagcagagaccuacaccaacuuugucgguuaugucacuaccacauucaagaggaagcacuuccgcccgacgccagaugccugcagagcugcgcacgacuggaagauggccggugaucccagauaugaagcuucccuucaaaauccuuauccugauuaccauuggcuacggaccguaaaaaccaccaaggagucacuuguuauuauauccccgaguguugcugauuuggacccuuacgacaagucccuucauucaagaguuuucccuagugggaaguguuuggggauaacagucucuuccaccuacugcucaaccaaccaugauuacaccaucuggaugccuguagaaccaagacucgggacaucuugugauauuuuuaccaauagcagagggaagagagcaucuaaggggggcaggguuuguggauucguggaugaaaggggcuuauacaagucucucaaaggagcaugcagacucaagcugugcggaguccccgggauccggcuguuggacggaacaugggucucaauccagacaucagaagauaucaaguggugcccuccugaucgauuagugaaucuacacgacuuucacucggaugaaauagaacaucuuguuguagcggaauuaaucaagaggagggaaaauugucuagaugcacuggaguccaucaugaccaccaaaucagugagcuucagacgucucagucacuugaggaaacuuguuccuggguuugggaaggcauacaccauauucaacaagaccuuaauggaagcugaugcucauuacaagucaguuaagacuuggaacgaaguuaucccuucgaaagguugccuggaagucggagggagaugucauccccaugugaacggaguauucuucaaugguauaauuuuggguccggauggaaauguucugaucccugagaugcagucuucccugcuucaacaacauauggagcuguuagagucuucugucaucccucugaugcaucccuuggcagacccaucaacagucuucaaggagggugaugaggcagaagacuuuguugagguucaucuuccagauguccacaagcagguuucggauguugaccuuggccuuccgaguugggggaaguaucuguugauuagugcaggugcuuuggcaauacugauucuggcuaucgucuuaaucauauguuguaggagggucaauaagacaagauccacacagagaggucauagggaaucaggagggaaaaugucuguaguaccucaaaacgggaagaucauauccucaugggaguuauacaaaagugaaagugagacugggcuguga

SEQ ID NO: 63436 - RNA, 1575 nt, Artificial Sequence
  derived and/or modified CDS sequence (wt) from glycoprotein__RABV__JX871874.1
augauccuucaggcucuucuguuugugccuuuucuauuucccucguugugucucgggaaauuccccaucuauaccauaccggaaaagcucggcccuuggagucccaucgacauacaucaucucagcugcccuaacaauuugguuguggaggacgaggguugcgacagucugucaggguuuucuuacauggaacugaagguggguuacaucucugccauaaaggugaauggguucacuuguaccggugucgugacagaagcugagaccuacaccaacuuuguugguuaugucaccaccacauuuaagagaaagcacuuccgcccuaugccagaugcaugcagagcugcguacaacuggaagacagccggugacccuagauaugaggagucucuucacaauccuuauccugauuaccauuggcuacggaccguaaaaaccaccaaagaaucucuuauuaucauaucgccgaguguggcugauuuggacccauaugacaaaucccuucauucaagaguuuucccuggugggaaauguuuggggauaacagucucuucuaccuacugcucaacuaaccaugacuauacuaucuggaugcccgaagaagcaagacucgggacaucuugugacauuuuuaccaacagcaaagggaagagggcaucuaagggggguaggacuuguggauucguggaugaaaggggcuuauauaagucccuaaaaggggcauguaaacuuaaguugugcggaguuccuggacuuagacuuauggauggaacgugggucgcuauucagacaccaggugagaccaaauggugcucuccugaucagcugguaaaucuacaugacuuucguucagaugagauagaacaucucgucguggaggaguugaucaagaagagagaagaaugucuagaugcacuagaguccaucaugaccaccaaaucaguaagcuucagacgucucagcaacuugagaaaacuugucccuggguuuggaaaggcauacacuauauucaacaaaaccuuaauggaggcugaugcucacuacaagucaguucggacuugggaugaaaucauucccucaaaagggugccuaagagucggagggaggugucauccucauguaaacggaguguuuuucaaugguauaauucuggguccggauggacauguccugauuccagagaugcaaucgucccuccuccaacagcauauggagcuguuggaauccucuguaaucccccuaauacaucccuuggccgacccaucaacagucuucaaagauggugaugaagcggaggacuuuguugagguucaccuuccggacguucacaagcaggucucaggggucgaucuuggucucccaaacugggggaaguaugugcugaugggugcggguguucuagcgaccgugauacugacaaucuucuuguuaacauguugcagaaggguuaacagaacaaaaccaaaccaacaaagucuuggggagucaggaaggaaaguaucgguuacuccucaaaaugggaaggucaugucuucaugggaguauuacaagagugagggcaggaccagucuguga

SEQ ID NO: 63437 - RNA, 1575 nt, Artificial Sequence
  derived and/or modified CDS sequence (wt) from glycoprotein__RABV__JX871875.1
augaucccucaggcucuucuuuaugugccucuccuaauccccucguuguguuucgggggauuccccaucuacacgauaccagacaagcuuggccccuggagucccauugacauacaucaucucagcugucccaacaauuugguuguggaggacgaggggugcaccagucugucaggguuuucuuacauggaacugaaggugggguacaucucugccauaaaggugaacggguucacuuguacuggugucgugacagaagccgagacuuacaccaacuuuguugguuaugucaccaccacauucaagagaaaacacuuucgcccuaugccagaugcaugcagagcugcauacaauuggaagauggccggugauccuagauaugaagaaucucuucaaaauccuuauccugacuacagcuggcuacggaccguaaagaccaccaaagagucucuuauuaucauaucuccaaguguagcggauuuggacccauacgacaaaucccuucauucaagaguuuucccuggugggaaguguuugggaauaacaaucucuucuaccuacugcucaacuaaccaugauuacaccaucuggaugccugaagaagcaagacucgggacaucuugugacauuuuuaccaacagcagagggaagagagcauccaaggggggcaagaccugcggauucauggacgaaaggggcuuguacaagucucuaaaaggagcauguaaacuuaagcugugcggaguucccggacucagacuuauggauggaacuugggucacaauucagacaucagaugaaaccaaauggugcccuucugaucaauugguaaaucuacaugacuuucacucagaugagauagaacaucuugucguggaggaguuggucaagaagagggaagaaugucuggaugcacuggaguccaucaugaccaccaaauccguaagcuucagacgucuuagccacuugagaaaacuuguuccuggguuuggaaaggcauauacuauauucaacaagaccuuaauggaagcugaugcucauuacaagucaauucggaccuggaacgagaucauccccucaaaagggugccuaaaagucggagggaggugucauccucauguggacggaguguucuucaaugguauaauucuggguccggacgggaauguccugaucccugagaugcaaucgucccuacuccaacaacauguggagcugcuggaguccucuguaaucccucuaaugcaucccuuggcagacccaucaacagucuuuaaggacggugaugaagcggaggacuuuguugagguucaccuuccggauauucacaaacaggucucaggggucgaccuuggucucccaaacugggggaaguaucugcuaaugagugcaggugcucuggcaacacuaaugcugauaauccucuuaaugacauguugcagaagagcuaaucgaacagaaucaauacaacgagaucccggggagucaggaaggaaaguaucgauaacuuccccagaugggaaagucauaucuucaugggaguuguacaagaguggaggcgagaccaggcuguga

SEQ ID NO: 63438 - RNA, 1575 nt, Artificial Sequence
  derived and/or modified CDS sequence (wt) from glycoprotein__RABV__JX871876.1
augaucccucaggcucuucuguaugugccucuccugaucuccucguuguguuucgggggauuccccaucuacacgauaccagacaagcucggccccuggagucccauugacauacaucaucucagcugucccaacaauuugguuguggaggacgaggggugcaccagucugucaggguuuucuuacauggaacugaaggugggguacaucucugccauaaaggugaauggguucacuuguacuggugucgugacagaagccgagaccuacaccaacuuuguugguuaugucaccacuacauucaagagaaaacacuuucgcccuaugccagaugcaugcagagcugcauacaauuggaagauggccggugauccuagauaugaagaaucucuucaaaauccuuauccugacuacaguuggcuacggaccguuaagaccaccaaagagucucuuauuaucauaucuccaaguguagcggauuuggacccauacgacaaaucccuucauucaagaguuuucccuggugggaaguguuugggaauaacaaucucuucuaccuacugcucaacuaaccaugauuacaccaucuggaugccugaagaagcaagacucgggacuucuugugacauuuuuaccaacagcagagggaagagagcauccaaggggggcaagaccugcggauucguggacgaaaggggcuuguacaagucucuaaaaggagcauguaaacuuaagcugugcggaguucccggacucagacuuauggauggaaccugggucacaauucagacaucagaugaaaccaaauggugcccuucugaucaauugguaaaucuacaugacuuucacucagaugagauagaacaucuugucguggaggaguuggucaagaagagggaagaaugucuggaugcacuggaguccaucaugaccacuaaauccguaagcuucagacgucuuagccacuugagaaaacuuguuccuggguuuggaaaggcauauacuauauucaacaagaccuuaauggaggcugaugcucauuacaagucaauucggaccuggaacgaaaucauccccucaaaagggugccuaaaagucggagggaggugucauccucauguggacggaguguucuucaaugguauaauucuggguccggacgggaauguccugaucccugagaugcaaucgucccuacuucaacaacauguggagcuguuggaguccucuguaaucccucuaaugcaucccuuggcagacccaucaacaguauuuaaggacggugaugaagcggaggacuuuguugagguucaccuuccggacauucacaaacaggucucaggggucgaccuuggucucccaaacugggggaaguaucugcuaaugagugcaggugcucuggcaacacuaaugcugauaaucuucuuaauggcauguugcagaagagcuaaucgaacagaaucaauacaacgagaucccggggagucaggaaggaaaguaucgauaccuucccaagacgggaaagucauaucuucaugggaguuguacaagaguggaggcgagaccaggcuguga

SEQ ID NO: 63439 - RNA, 1575 nt, Artificial Sequence
  derived and/or modified CDS sequence (wt) from glycoprotein__RABV__JX871877.1
augaucuuucaggcucuucuauuugugccucuccuaauuucuucguugugucuugggaaauuccccaucuacacgauaccagacaagcucggucccuggagccccaucgacauacaucaccucagcuguccaaacaauuugguuguggaggacgaggggugcaccagccugucaggguuuucuuacauggaacuaaaggugggauacaucucugcuauaaaggugaacggguuuaccuguaccgguguugugacagaagcugagaccuauacuaacuuuguugguuaugucaccaccacauucaagaggaaacauuuucgcccuauaccagaugcauguagggcugcauacaacuggaagauagcuggugaucccagauacgaggagucucuucaaaauccuuauccugauuaucauuggcuacggacagugaagaccaccaaggagucucuuaucaucauaucuccaaguguggcugauuuggacccauaugacaaaucccuucauucuagguuguucccuggugggaaguguuugggaauaacaauuucuucuaccuacugcuccaccaaccaugauuacacuaucuggaugccugaagaaccaagacucgggacaucuugugacauuuuuacuaauagcaaagggaaaaaggcaucuaaggggggcaagguuugcggauuuguggaugaaaggggcuuguauaagucucuaaagggagcauguaaacucaagcugugcggaguuuccggacuuagacuuauggauggaacuuggguuacaauucagacgucagaugagaucaaauggugcccuccagaucaauugguaaaucuacaugacuuucacucagaugaaauagagcaucucgucguggaggaauugguuaagaagagggaggaguguuuggaugcauuagaguccaucaugaccaccaaaucuguaaguuucagacgucuaagcuauuugagaaaacuuguccccggguuuggaaaggcguauacuauauucaacaagacuuugauggaagccgacgcccacuacaagucaguucggacuuggaaugagaucauccccucaaaaggauguuugaaagucagugauaggugucauccucauguagacggaguguucuucaauggcauaauucuggguccugacgggaaugucuugauaccugaaaugcaaucgucccuacuucaacaacauauggagcuguuggaguccucuguaauccccuugaugcaucccuuggcagacccaucaacaguauucaaggauggagacgaagcggaggacuuuguugaaguucaccucccggauguucacaaacagaucucagggguugaccucggucucccuaguugggggaaguaucuccucaugauugcagguggucuagcgacacuaguucugauaaucuucuugauggcauguuguagaagaaccaagagaacagaaucaagacggcgaggcucuggggaaucaggagagaagguauuggcaacuccccaacccaagaaagucguaucuucaugggaguuguacaagagagaaggcgaugccaggcuguga

SEQ ID NO: 63440 - RNA, 1575 nt, Artificial Sequence
  derived and/or modified CDS sequence (wt) from glycoprotein__RABV__JX871879.1
augauuccucaggcucuucuguuugugccucucuugauucccucucugugucuuggggaauuccccaucuacacgauaccagacaagcucggcccuuggagcccuaucgacauacaucaucucagcugucccaacaaucugguugcagaaaacgacgggugcaccagucugucaggguuuuccuauauggaacugaaggugggauacaucucugccauaaaggugaacggguucacuuguaccgguguugugacagaagcagagaccuacaccaacuuugucgguuacgucacuaccacauucaagaggaagcacuuccgcccgacgccagaugccugcagagccgcacacgacuggaagauggccggugaucccagauaugaagcuucccuucaaaauccuuauccugauuaccauuggcuacggaccguaaaaaccaccaaggagucacuuguuauuauauccccgaguguugcugauuuggacccuuacgacaagucccuucauucaagaguuuuccccagugggaaguguuuggggauaacagucucuuccaccuacugcucaaccaaccaugauuacaccaucuggaugcccguagaaccaagacuuggaacaucuugugauauuuuuaccaauagcagagggaagagagcauccaaggggggcagaguuuguggauucguggaugaaaggggcuuauacaagucucucaaaggagcaugcagacucaagcugugcggaguccccgggauccggcuguuggacggaacaugggucucaauccagacauccgaagauaucaaguggugcccuccugaucgauuagugaaucuacacgacuuucacucggaugaaauagaacaucuuguuguagcagaauuaaucaagaggagggaaaauugucuagaugcacuggaguccaucaugaccaccaaaucagugagcuucagacgucucagucacuugaggaaacuuguuccuggguuugggaaggcauacaccauauucaacaagaccuuaauggaagcugaugcucauuacaagucaguuaagacuuggaacgaaguuaucccuucgaaagguugccuggaagucggagggagaugucauccccaugugaacggaguauucuucaaugguauaauuuuggguccggauggaaauguucugaucccugagaugcagucuuccuugcuucaacaacauauggagcuguuagagucuucugucaucccucugaugcaucccuuggcagacccaucaacagucuucaaggagggugaugaggcggaagacuuuguugagguucaucuuccagauguccacaagcagguuucggauguugaccuuggccuuccgaguugggggaaguaucuguugauuagugcaggugccuuggcaauacugauucuggcgaucgucuuaauaauauguuguaggagggucaauaagacaggauccacacagagaggucauagggaaucaggagggaaaaugucuguaguaccucaaaacgggaagaucauauccucaugggaguuguacaaaagugaaagugagacugggcuguga

SEQ ID NO: 63441 - RNA, 1575 nt, Artificial Sequence
  derived and/or modified CDS sequence (wt) from glycoprotein__RABV__JX871880.1
augaucccucaggcucuucuguuugugccuuuucuauuucccucguugugucucgggaaauuccccaucuacaccauaccggaaaagcucggcccuuggagucccaucgacauacaucaucucagcuguccuaacaauuugguuguggaggacgaggguugcgacagucugucaggguuuucuuacauggaacugaagguggguuacaucucugccauaaaggugaauggguucacuuguaccggugucguuacagaagcugagaccuacaccaacuuuguugguuaugucaccaccacuuucaagagaaaacacuuccgcccuaugccagaugcaugcagagcugcguacaacuggaagacagccggugacccuagauaugaggagucucuucacaauccuuauccugauuaccauuggcuacggaccguaaaaaccacuaaggaaucucuuauuaucauaucgccgaguguggccgauuuggacccauaugacaaaucccuucauucaagaguuuucccuggugggaaauguuuggggauaacaaucucuucuaccuacugcucaacuaaccaugacuauacuaucuggaugcccgaagaagcaagacucgggacaucuugugacauuuuuaccaacagcaaagggaagagggcaucuaagggggguaggacuugcggauucguggaugaaaggggcuuauauaagucucuaaaaggggcauguaaacuuaagcugugcggaguuccuggacuuagacuuauggauggaacgugggucgcuauucagacaccaggugagaccaaauggugcucuccugaucagcugguaaaucuacaugacuuucguucagaugagauagaacaucucgucguggaggaguugaucaagaagagagaagaaugucuagaugcacuagaguccaucaugaccaccaaaucaguaagcuucagacgucucagcaacuugagaaaacuugucccuggguuuggaaaggcauacacuauauucaacaaaaccuuaauggaggcugaugcucacuacaagucaauucggacuugggaugaaaucauucccucaaaagggugccuaagagucggagggaggugucauccucauguaaacggaguguuuuucaaugguauaauucuggguccggauggacauguccuaauuccagagaugcaaucgucccuccuccaacagcauauggagcuguuggaauccucuguaaucccccuaauacaucccuuggccgacccaucaacagucuucaaagacggugaugaagcggaggacuuuguugagguucaccuuccggacguucacgagcagaucucaggggucgaucuuggucucccaaacugggggaaguaugugcugaugagugcagguguucuagcgaccgugauacugacaaucuucuuguuaacaugcugcagaaggguuaacagaacaaaaccaaaacaacaaagucuuggggagucaggaaggaaaguaucgguuacuccucaaaaugggaaggucaugucuucaugggaguauuacaagagugagggcaggaccagucuguga

SEQ ID NO: 63442 - RNA, 1575 nt, Artificial Sequence
  derived and/or modified CDS sequence (wt) from glycoprotein__RABV__JX871881.1
augaucccucaggcucuucugucugugccucuucuaauuuccucguuguguuucgggaaauuccccaucuacacgauaccagagaagcucggcccuuggagucccaucgacauacaucaccucagcuguccuaacaauuugguuguggaggaugagggaugcaacagucugucaggguuuucuuacauggaacugaaggugggauacaucucugccauaaaaguuaauggguucacuuguacugguguugugacagaagcugagaccuacaccaacuuuguugguuacgucaccaccacauucaagagaaaacacuuccgcccuaugccggaugcaugcagagcugcauacaacuggaagacggccggcgauccuagauaugaagagucccuucacaauccuuauccugauuaccauuggcuaaggaccguaaaaaccaccaaagaaucccuuauuaucauaucgccaaguguggcugauuuggaccccuacgacaaaucucuucauucaagaaucuucccuggugggaaaugcuugggaauaacaaucucuuccaccuacuguucaacuaaccaugauuauacuaucuggaugcccgaagaagcaagacucgggacaucuugugacauuuuuaccaacagcaaagggaagagagcauccaagggggguaggacuuguggauucguggaugaacggggcuuguauaagucucuaaaaggggcauguaaacuuaagcugugcggaguuccuggacuuagacuuauggauggaacgugggucgcuauucagacaccaaaugagaccaaauggugcucuccugaucagcuggugaaugugcaugacuuucgcucagaugagauagaacaucucgucguggaggaguugaucaggaaaagggaagaaugucuagaugcacuggaguccaucaugacuacaaaaucaguaagcuucaggcgucucagcaacuugagaaaacuuguuccuggguuuggaaaggcauauacuauauucaacaaaaccuuaauggaggcugaugcucacuacaagucaguucggacuuggaaugaaaucauccccucaagagggugccugaaagucggagguaggugucauccucaugugaauggaguguuuuucaaugguauaauuuuggguccggauggacauauccugauuccggagaugcaaucaucccuccuccaacagcauauggagcuguuagaauccucuguaauccccuuaauacauccucuggcagacccaucaacagucuuuaaggacggugaugaggcggaggacuuuguugagguucaccuuccagacguucaccaacaggucucagggguugaccucggucucccagacugggggaaguaugugcugaugagugcaggugcucuagcgaccgugaugcugacaauauucuugauaaccuguugcagaagggucaagagaacagaaucaauacaacaagaucuuggugagucaggaaggaaagugucgguaacuccccaaaauggaaaagucauguccucaugggaauauuacaagaguggaggcgggaccaggcuguga

SEQ ID NO: 63443 - RNA, 1575 nt, Artificial Sequence
  derived and/or modified CDS sequence (wt) from glycoprotein__RABV__JX944575.1
augguuccucaggcucuccuguuuguaccccuucugguuuuuccauuguguuuugggaaauucccuauuuacacgauaccagacaagcuuggucccuggagcccgauugacauacaucaccucagcugcccaaacaauuugguaguggaggacgaaggaugcaccaaccugucaggguucuccuacauggaacuuaaaguuggauacaucucagccauaaaaaugaacggguucacuugcacaggcguugugacggaggcugaaaccuacacuaacuucguugguuaugucacaaccacguucaaaagaaagcauuuccgcccaacaccagaugcauguagagccgcguacaacuggaagauggccggugaccccagauaugaagagucucuacacaauccguacccugacuaccacuggcuucgaacuguaaaaaccaccaaggagucucucguuaucauaucuccaaguguggcagauuuggacccauaugacagaucccuucacucgagggucuucccuggcgggaauugcucaggaguagcggugucuucuaccuacugcuccacuaaccacgauuacaccauuuggaugcccgagaauccgagacuagggaugucuugugacauuuuuaccaauaguagagggaagagagcauccaaagggagugagacuugcggcuuuguagaugaaagaggccuauauaagucuuuaaaaggagcaugcaaacucaaguuauguggaguucucggacuuagacuuauggauggaacaugggucgcgaugcaaacaucaaaugaaaccaaauggugcccucccggucaguuggugaauuugcacgacuuucgcucagacgaaauugagcaccuuguuguagaggaguuggucaagaagagagaggagugucuggaugcacuagaguccaucaugaccaccaagucagugaguuucagacgucucagucauuuaagaaaacuugucccuggguuuggaaaagcauauaccauauucaacaagaccuugauggaagccgaugcucacuacaagucagucagaacuuggaaugagaucaucccuucaaaaggguguuuaagaguuggggggaggugucauccucauguaaacgggguauuuuucaaugguauaauauuaggaccugacggcaaugucuuaaucccagagaugcaaucaucccuccuccagcaacauauggaguuguugguauccucgguuaucccccuuaugcacccccuggcagacccgucuaccguuuucaagaacggugacgaggcugaggauuuuguugaaguucaccuucccgaugugcacgaacggaucucaggaguugacuugggucucccgaacugggggaaguauguauuacugagugcaggggcccugacugccuugauguugauaauuuuccugaugacaugcuggagaagagucaaucgaucggaaccuacacaacacaaucucagagggacagggagggaggugucagucacuccccaaagcgggaagaucauaucuucaugggaaucauacaagagcgggggugagaccggacuguga

SEQ ID NO: 63444 - RNA, 1575 nt, Artificial Sequence
  derived and/or modified CDS sequence (wt) from glycoprotein__RABV__JX944576.1
augguccaucagguucucuuguuugugccccuucuaguguucucacuguguuucgggaaguuccccaucuacacgauaccagacaagcuuggucccuggagucccauugacauacaucaucucagcuguccaaacaauuugguuguagaggaugaaggaugcaccaaucugucaggauucuccuacauggaacuuaaagugggauacaucucagccauaaaagugaauggcuuuacuuguacaggcgugguuacagaggcagagacuuacacuaacuucguugguuaugucacuaccacguuuagaagaaagcacuuccgcccaacaccugacgcguguagagcagcauacaacuggaaacuggccggcgaccccagauaugaagagucccuacacaauccauacccugauuaccauuggcuucggacugugaaaacuaccaaggagucucucgucauaauauccccgaguguggcagaucuagaucccuaugacaaaucccuucacucgagaguuuuucccggcggaaagugcuccgggauaacaguaucuuccacuuacugcucuacuaaccaugauuacaccaucuggaugccugaaaauccgagacuagggacaucuugugacaucuucgucaacagcagggggaagagggcgucuaagggaggcaagaccuguggguuuguagaugagagaggcuuguauaagucacuaaagggagcuugcaaacucaaauuguguggggugcccggacugagacuuauggauggaacgugggcugcgauucaaacgucggaugagaccaaauggugccccccugaucaguuaguaaaucuacaugauuaucgcucagaugaaaucgaacaucuagucguggaagaacuggucaagaaaagagaggagugcuuagaugcacuggaauccaucaugacuaccaagucaguaagcuucagacgucucagucacuugaggaaacuugucccuggguuugggaaagcauauaccauauucaacaaaaccuugauggaggccgaugcucacuauaagucggucaggacuuggaacgagaucauccccucaaaagggugucuaagaguuggggggagaugucauccucaugugaaugggguguucuuuaaugguauaauauuaggcccggauggccauguucugaucccggaaaugcaaucgucccuccuccaacaacacauggagcuguuggaauccucggucaucccccuaaugcauccauuggcagaccccucaacaguuuucaaagauggggaugaggcggaagauuuuguugagguucaccuuccggaugugcacaaacugaucucggggguugaccuuggucuucccagcugggggaaguauguguugaugagugcauguguuuuaacagcacugauguugaugauuuucuugaugacguguugcaggagggguaaucaagcagggucaaaacaacauggucuugaagggacagggaggaaagugucugucacuucccagaauggaaaagucauauccucaugggagucauauaaaagcggaggugagaccaggcuguga

SEQ ID NO: 63445 - RNA, 1575 nt, Artificial Sequence
  derived and/or modified CDS sequence (wt) from glycoprotein__RABV__JX944577.1
augguuccucagguucuuugguuuguaccccuucugguuuucucaauguguuucggaaaguucccuaucuacacgauaccagacaaacuuggucccuggagcccgauugacauacaucaucucagcuguccaaacaaccugguuguagaagaugaaggauguaccaacuugucggguuucuccuacauggaacuuaaggugggauacauuucagccauaaaaguaaauggguucacguguacagguguggugacagaggcagagacuuacacuaacuuuguugguuauguuaccaccacguucaaaagaaagcauuuccgcccaacaccagaugcaugucgagcugcuuacaacuggaagauggccggugaccccagauaugaagaaucuuugcacaauccguacccugacuaccacuggcuucgaaccgucaaaaccacaaaggagucccucgucaucauauccccaaguguagcggaccuggacccauaugacaaaucccuucacucgagggucuuuccuagcgggaagugcucggggauaacaauaucaucuaccuacugcucuacuaaccaugauuacacaaucuggaugcccgagaauccgagacuggggacaucuugugacaucuuuaccaacaguagagggaagagagcaucuaaagggagcaaaacuugcggauuuguugaugaaagaggcuuguauaagucuuugaaaggggcaugcaagcucaaguugugugggguucuuggccuuagacuuauggauggaacaugggucgcgaugcaaacaucggacgagaccaaguggugucccccugaucaguugguaaaucuacaugacuuucgcucggacgagaucgaacaucucguuguagaggaguuggucaagaaaagagaggagugucuggaugcacuagagucuaucaugaccaccaagucggugaguuucagacgucucagccacuugagaaaacuugucccuggguucggaaaagcauacaccauauucaacaaaacccugauggaagcagaugcucauuacaagucagucagaaccuggaaugagaucauccccuccaagggguguuugagaguuggagggaggugucauccucacgugaacgggguguuuuucaacgguauaauacuggguccugauggccauguucucaucccagagaugcaaucaucccuccuucagcagcauauggaguuguuggaauccucaguuaucccucugaugcacccuuuagcagacccguccacaguuuucaaggacggcgaugaagcagaggauuuugucgagguucaccuucccgauguacacaaacaaaucucagguguugaccugggucucccuaacuggggaaaguauguuuuggugagugcaggggucuugguuguccugauguuggcaauuuucauaaugacauguugcggaagaguaaaucgacccaagucuacacaacacagucucgaagguacagggaggaaggugucggucacuucccagagcgggaaggucauaucuucaugggagucauauaagagcgggggugagaccagacuguga

SEQ ID NO: 63446 - RNA, 1575 nt, Artificial Sequence
  derived and/or modified CDS sequence (wt) from glycoprotein__RABV__JX944578.1
auggucccucagguucucuuguuugugccccuucuaguguucucacuguguuucgggaaguuccccaucuacacgauaccagacaagcuuggucccuggaguccuauugacauacaucaucucagcuguccaaacaauuugguuguagaggaugaaggaugcaccaaucugucaggauucuccuacauggaacuuaaagugggauacaucucagccauaaaagugaauggcuuuacuuguacaggcgugguuacagaggcggagacuuacacuaacuucguugguuaugucacuaccacguuuagaagaaagcacuuccgcccaacgccugaugcgugcagagccgcauacaacuggaaacuggccggcgaccccagauaugaagagucccuacacaauccauacccugauuaccauuggcuucggacugugaaaacuaccaaggagucucucgucauaauauccccgaguguggcagaucuagaucccuaugacaaaucccuucacucgagaguuuuucccggcggaaagugcuccgggauaacaauaucuuccacuuacugcucuacuaaccaugauuacaccaucuggaugccugaaaauccgagacuagggacaucuugugacaucuucgucaacagcagggggaagagggcgucuaaggggggcaagaccuguggguuuguagaugagagaggcuuguauaagucgcuaaaaggagcuugcaaacucaaauuguguggggugcccggacugagacuuauggauggaacgugggcugcgauucaaacgucggaugagaccaaauggugccccccugaucaguuaguaaaucuacaugauuuucgcucagaugaaaucgaacaucuagucguggaagaacuggucaagaaaagagaggagugcuuagaugcacuggaauccaucaugacuaccaagucaguaagcuucagacgucucagucacuugaggaaacuugucccuggguuugggaaagcauauaccauauucaacaaaaccuugauggaggccgaugcucacuauaagucggucaggacuuggaacgagaucauccccucaaaaggguguuuaagaguuggggggagaugucauccucaugugaaugggguguucuuuaaugguauaauauuaggcccagacggccauguucugaucccggaaaugcaaucgucccuccuccaacaacacauggagcuguuggaauccucggucaucccccuaaugcauccauuggcagacccaucaacaguuuucaaagauggggaugaggcggaagauuuuguugagguucaccuuccggaugugcacaaacugaucucgggaguugaccuuggucuucccagcugggggaaguauguguugaugagcgcagguguuuuaacagcacugauguugaugauuuucuugaugacguguugcaggagggguaaucaagcagggucaaaacaacauggucuugaagggacagggaggaaagugucugucacuucccagaauggaaaagucauauccucaugggagucauauaaaagcggaggugagaccaggcuguga

SEQ ID NO: 63447 - RNA, 1575 nt, Artificial Sequence
  derived and/or modified CDS sequence (wt) from glycoprotein__RABV__JX944579.1
augguuccucagguucuuugguuuguaccccuucugguuuucucaauguguuucggaaaguucccuaucuacacgauaccagacaaacuuggucccuggagcccgauugacauacaucaucucagcuguccaaacaaccugguuguagaagaugaaggauguaccaacuugucggguuucuccuacauggaacuuaaggugggauacauuucagccauaaaaguaaauggguucacgugcacagguguggugacagaggcagagacuuacacuaacuuuguugguuauguuaccaccacguucaaaagaaagcauuuccgcccaacaccagaugcaugucgagcugcuuacaacuggaagauggccggugaccccagauaugaagaaucuuugcacaauccguacccugacuaccacuggcuucgaaccgucaaaaccacaaaggagucccucgucaucauauccccaaguguagcggaccuggacccauaugacaaaucccuucacucgagggucuuuccuagcgggaagugcucggggauaacaauaucaucuaccuacugcucuacuaaccaugauuacacaaucuggaugcccgagaauccgagacuggggacaucuugugacaucuuuaccaacaguagagggaagagagcauccaaagggagcaaaacuugcggauuuguugaugaaagaggcuuguauaagucuuugaaaggggcaugcaagcucaaguugugugggguucuuggccuuagacuuauggauggaacaugggucgcgaugcaaacaucggacgagaccaaguggugucccccugaucaguugguaaaucuacaugacuuucgcucggacgagaucgaacaucucguuguagaggaguuggucaagaaaagagaggagugucuggaugcacuagagucuaucaugaccaccaagucggugaguuucagacgucucagccacuugagaaaacuugucccuggguucggaaaagcauacaccauauucaacaaaacccugauggaagcagaugcucauuacaagucagucagaaccuggaaugagaucauccccuccaagggguguuugagaguuggagggaggugucauccucacgugaacgggguguuuuucaacgguauaauacuggguccugauggccauguucucaucccagagaugcaaucaucccuccuucagcagcauauggaguuguuggaauccucaguuaucccucugaugcacccuuuagcagacccgucuacaguuuucaaggacggcgaugaagcagaggauuuugucgagguucaccuucccgauguacacaaacaaaucucagguguugaccugggucucccuaacuggggaaaguauguuuuggugagugcaggggucuugguuguccugauguuggcaauuuucauaaugacauguugcggaagaguaaaucgacccaagucuacacaacacagucucgaagguacagggaggaaggugucggucacuucccagagcgggaaggucauaucuucaugggagucauauaagagcgggggugagaccagacuguga

SEQ ID NO: 63448 - RNA, 1575 nt, Artificial Sequence
  derived and/or modified CDS sequence (wt) from glycoprotein__RABV__JX944580.1
augguuccucagguucuuugguuuguaccccuucugguuuucucaauguguuucggaaaguucccuaucuacacgauaccagacaaacuuggucccuggagcccgauugacauacaucaucucagcuguccaaacaaccugguuguagaagaugaaggauguaccaacuugucggguuucuccuacauggaacuuaaggugggauacauuucagccauaaaaguaaauggguucacgugcacagguguggugacagaggcagagacuuacacuaacuuuguugguuauguuaccaccacguucaaaagaaagcauuuccgcccaacaccagaugcaugucgagcugcuuacaacuggaagauggccggugaccccagauaugaagaaucuuugcacaauccguacccugacuaccacuggcuucgaaccgucaaaaccacaaaggagucccucgucaucauauccccaaguguagcggaccuggacccauaugacaaaucccuucacucgagggucuuuccuagcgggaagugcucggggauaacaauaucaucuaccuacugcucuacuaaccaugauuacacaaucuggaugcccgagaauccgagacuggggacaucuugugacaucuuuaccaacaguagagggaagagagcauccaaagggagcaaaacuugcggauuuguugaugaaagaggcuuguauaagucuuugaaaggggcaugcaagcucaaguugugugggguucuuggccuuagacuuauggauggaacaugggucgcgaugcaaacaucggacgagaccaaguggugucccccugaucaguugguaaaucuacaugacuuucgcucggacgagaucgaacaucucguuguagaggaguuggucaagaaaagagaggagugucuggaugcacuagagucuaucaugaccaccaagucggugaguuucagacgucucagccacuugagaaaacuugucccuggguucggaaaagcauacaccauauucaacaaaacccugauggaagcagaugcucauuacaagucagucagaaccuggaaugagaucauccccuccaagggguguuugagaguuggagggaggugucauccucacgugaacgggguguuuuucaacgguauaauacuggguccugauggccauguucucaucccagagaugcaaucaucccuccuucagcagcauauggaguuguuggaauccucaguuaucccucugaugcacccuuuagcagacccgucuacaguuuucaaggacggcgaugaagcagaggauuuugucgagguucaccuucccgauguacacaaacaaaucucagguguugaccugggucucccuaacuggggaaaguauguuuuggugagugcaggggucuugguuguccugauguuggcaauuuucauaaugacauguugcggaagaguaaaucgacccaagucuacacaacacagucucgaagguacagggaggaaggugucggucacuucccaaagcgggaaggucauaucuucaugggagucauauaagagcgggggugagaccagacuguga

SEQ ID NO: 63449 - RNA, 1575 nt, Artificial Sequence
  derived and/or modified CDS sequence (wt) from glycoprotein__RABV__JX944581.1
augguuccucagguucuuugguuuguaccccuucugguuuucucaauguguuucggaaaguucccuaucuacacgauaccagacaaacuuggucccuggagcccgauugacauacaucaucucagcuguccaaacaaccugguuguagaagaugaaggauguaccaacuugucggguuucuccuacauggaacuuaaggugggauacauuucagccauaaaaguaaauggguucacguguacagguguggugacagaggcagagacuuacacuaacuuuguugguuauguuaccaccacguucaaaagaaagcauuuccgcccaacaccagaugcaugucgagcugcuuacaacuggaagauggccggugaccccagauaugaagaaucuuugcacaauccguacccugacuaccacuggcuucgaaccgucaaaaccacaaaggagucccucgucaucauauccccaaguguagcggaccuggacccauaugacaaaucccuucacucgagggucuuuccuagcgggaagugcucggggauaacaauaucaucuaccuacugcucuacuaaccaugauuacacaaucuggaugcccgagaauccgagacuggggacaucuugugacaucuuuaccaacaguagagggaagagagcaucuaaagggagcaaaacuugcggauuuguugaugaaagaggcuuguauaagucuuugaaaggggcaugcaagcucaaguugugugggguucuuggccuuagacuuauggauggaacaugggucgcgaugcaaacaucggacgagaccaaguggugucccccugaucaguugguaaaucuacaugacuuucgcucggacgagaucgaacaucucguuguagaggaguuggucaagaaaagagaggagugucuggaugcacuagagucuaucaugaccaccaagucggugaguuucagacgucucagccacuugagaaaacuugucccuggguucggaaaagcauacaccauauucaacaaaacccugauggaagcagaugcucauuacaagucagucagaaccuggaaugagaucauccccuccaagggguguuugagaguuggagggaggugucauccucacgugaacgggguguuuuucaacgguauaauacuggguccugauggccauguucucaucccagagaugcaaucaucccuccuucagcagcauauggaguuguuggaauccucaguuaucccucugaugcacccuuuagcagacccgucuacaguuuucaaggacggcgaugaagcagaggauuuugucgagguucaccuucccgauguacacaaacaaaucucagguguugaccugggucucccuaacuggggaaaguauguuuuggugagugcaggggucuugguuguccugauguuggcaauuuucauaaugacauguugcggaagaguaaaucgacccaagucuacacaacacagucucgaagguacagggaggaaggugucggucacuucccagagcgggaaggucauaucuucaugggagucauauaagagcgggggugagaccagacuguga

SEQ ID NO: 63450 - RNA, 1575 nt, Artificial Sequence
  derived and/or modified CDS sequence (wt) from glycoprotein__RABV__JX944582.1
augguuccucagguucuuugguuuguaccccuucugguuuucucaauguguuucggaaaguucccuaucuacacgauaccagacaaacuuggucccuggagcccgauugacauacaucaucucagcuguccaaacaaccugguuguagaagaugaaggauguaccaacuugucggguuucuccuacauggaacuuaaggugggauacauuucagccauaaaaguaaauggguucacgugcacagguguggugacagaggcagagacuuacacuaacuuaguugguuauguuaccaccacauucaaaagaaagcauuuccgcccaacaccagaugcaugucgagcugcuuacaacuggaagauggccggugaccccagauaugaagaaucuuugcacaauccguacccugacuaccacuggcuucgaaccgucaaaaccacaaaggagucccucgucaucauauccccaaguguagcggaccuggacccauaugacaaaucccuucacucgagggucuuuccuagcgggaagugcucggggauaacaauaucaucuaccuacugcucuacuaaccaugauuacacaaucuggaugcccgagaauccgagacuggggacaucuugugacaucuuuaccaacaguagagggaagagagcauccaaagggagcaaaacuugcggauuuguugaugaaagaggcuuguauaagucuuugaaaggggcaugcaagcucaaguugugugggguucuuggccuuagacuuauggauggaacaugggucgcgaugcaaacaucggacgagaccaaguggugucccccugaucaguugguaaaucuacaugacuuucgcucggacgagaucgaacaucucguuguagaggaguuggucaagaaaagagaggagugucuggaugcacuagagucuaucaugaccaccaagucggugaguuucagacgucucagccacuugagaaaacuugucccuggguucggaaaagcauacaccauauucaacaaaacccugauggaagcagaugcucauuacaagucagucagaaccuggaaugagaucauccccuccaagggguguuugagaguuggagggaggugucauccucacgugaacgggguguuuuucaacgguauaauacuggguccugauggccauguucucaucccagagaugcaaucaucccuccuucagcagcauauggaguuguuggaauccucaguuaucccucugaugcacccuuuagcagacccgucuacaguuuucaaggacggcgaugaagcagaggauuuugucgagguucaccuucccgauguacacaaacaaaucucagguguugaccugggucucccuaacuggggaaaguauguuuuggugagugcaggggucuugguuguccugauguuggcaauucucauaaugacauguugcggaagaguaaaucgacccaagucuacacaacacagucucgaagguacagggaggaaggugucggucacuucccagagcgggaaggucauaucuucaugggagucauauaagagcgggggugagaccagacuguga

SEQ ID NO: 63451 - RNA, 1575 nt, Artificial Sequence
  derived and/or modified CDS sequence (wt) from glycoprotein__RABV__JX944583.1
augauuccucagguucuuugguuuguaccccuucugguuuucucaauguguuucggaaaguucccuaucuacacgauaccagacaaacuuggucccuggagcccgauugacauacaucaucucagcuguccaaacaaccugguuguagaagaugaaggauguaccaacuugucggguuucuccuacauggaacuuaaggugggauacauuucagccauaaaaguaaauggguucacguguacagguguggugacagaggcagagacuuacacuaacuuuguugguuauguuaccaccacguucaaaagaaagcauuuccgcccaacaccagaugcaugucgagcugcuuacaacuggaagauggccggugaccccagauaugaagaaucuuugcacaauccguacccugacuaccacuggcuucgaaccgucaaaaccacaaaggagucccucgucaucauauccccaaguguagcggaccuggacccauaugacaaaucccuucacucgagggucuuuccuagcgggaagugcucggggauaacaauaucaucuaccuacugcucuacuaaccaugauuacacaaucuggaugcccgagaauccgagacuggggacaucuugugacaucuuuaccaacaguagagggaagagagcaucuaaagggagcaaaacuugcggauuuguugaugaaagaggcuuguauaagucuuugaaaggggcaugcaagcucaaguugugugggguucuuggccuuagacuuauggauggaacaugggucgcgaugcaaacaucggacgagaccaaguggugucccccugaucaguugguaaaucuacaugacuuucgcucggacgagaucgaacaucucguuguagaggaguuggucaagaaaagagaggagugucuggaugcacuagagucuaucaugaccaccaagucggugaguuucagacgucucagccacuugagaaaacuugucccuggguucggaaaagcauacaccauauucaacaaaacccugauggaagcagaugcucauuacaagucagucagaaccuggaaugagaucauccccuccaagggguguuugagaguuggagggaggugucauccucacgugaacgggguguuuuucaacgguauaauacuggguccugauggccauguucucaucccagagaugcaaucaucccuccuucagcagcauauggaguuguuggaauccucaguuaucccucugaugcacccuuuagcagacccgucuacaguuuucaaggauggcgaugaagcagaggauuuugucgagguucaccuucccgauguacacaaacaaaucucagguguugaccugggucucccuaacuggggaaaguauguuuuggugagugcaggggucuugguuguccugauguuggcaauuuucauaaugacauguugcggaagaguaaaucgacccaagucuacacaacacagucucgaagguacagggaggaaggugucggucacuucccagagcgggaaggucauaucuucaugggagucauauaagagcgggggugagaccagacuguga

SEQ ID NO: 63452 - RNA, 1575 nt, Artificial Sequence
  derived and/or modified CDS sequence (wt) from glycoprotein__RABV__JX944584.1
augguuccucagguucuuugguuuguaccccuucugguuuucucaauguguuucggaaaguucccuaucuacacgauaccagacaaacuuggucccuggagcccgauugacauacaucaucucagcuguccaaacaaccugguuguagaagaugaaggauguaccaacuugucggguuucuccuacauggaacuuaaggugggauacauuucagccauaaaaguaaauggguucacgugcacagguguggugacagaggcagagacuuacacuaacuuuguugguuauguuaccaccacguucaaaagaaagcauuuucgcccaacaccagaugcaugucgagcugcuuacaacuggaagauggccggugaccccagauaugaagaaucucugcacaauccguacccugacuaccacuggcuucgaaccgucaaaaccacaaaggagucccucgucaucauauccccaaguguagcggaccuggacccauaugacaaaucccuucacucgagggucuuuccuagcgggaagugcucggggauaacaauaucaucuaccuacugcucuacuaaccaugauuacacaaucuggaugcccgagaauccgagacuggggacaucuugugacaucuuuaccaacaguagagggaagagagcauccaaagggagcaaaacuugcggauuuguugaugaaagaggcuuguauaagucuuugaaaggggcaugcaagcucaaguugugugggguucuuggccuuagacuuauggauggaacaugggucgcgaugcaaacaucggacgagaccaaguggugucccccugaucaguugguaaaucuacaugacuuucgcucggacgagaucgaacaucucguuguagaggaguuggucaagaaaagagaggagugucuggaugcacuagagucuaucaugaccaccaagucggugaguuucagacgucucagccacuugagaaaacuugucccuggguucggaaaagcauacaccauauucaacaaaacccugauggaagcagaugcucacuacaagucagucagaaccuggaaugagaucauccccuccaagggguguuugagaguuggagggaggugucauccucacgugaacgggguguuuuucaacgguauaauacuggguccugauggccauguucucaucccagagaugcaaucaucccuccuucagcagcauauggaguuguuggaauccucaguuaucccucugaugcacccuuuagcagacccgucuacaguuuucaaggacggcgaugaagcagaggauuuugucgagguucaccuucccgauguacacaaacaaaucucagguguugaccugggucucccuaacuggggaaaguauguuuuggugagugcaggggucuugguuguccugauguuggcaauuuucauaaugacauguugcggaagaguaaaucgacccaagucuacacaacacagucucgaagguacagggaggaaggugucggucacuucccagagcgggaaggucauaucuucaugggagucauauaagagcgggggugagaccagacuguga

SEQ ID NO: 63453 - RNA, 1575 nt, Artificial Sequence
  derived and/or modified CDS sequence (wt) from glycoprotein__RABV__JX944586.1
augguuccucagguucuuuuguuuguaccccuucugguuuucucaauguguuucgggaaauucccuaucuauacgauaccagacaaacuuggucccuggagcccgauugacauacaucaucucagcuguccaaacaaccugguuguggaagaugaaggaugcacuaaccugucggguuucuccuacauggaacuuaaggugggauacaucucggccauaaaaguaaacggguucacuugcacagguguggugacagaggcagagacuuacacuaacuuugucgguuauguuaccaccacguucaaaagaaagcauuuccgcccaacacccgaugcaugucgagcugcuuacaauuggaagauggccggugaccccagauaugaagaaucgcugcacaauccguacccugacuaccacuggcuucgaacuguuaaaaccacaaaggagucccucgucaucauauccccaaguguagcggacuuggacccauacgacaaaucccuucauucgagagucuuuccuagcgggaaaugcucggggauaacaauaucaucuacuuacugcucuacuaaccaugauuacacaaucuggaugcccgagaauccgagacuggggacaucuugugacaucuuuaccaacaguagagggaagagagcauccaaagggggcaaaacuugcggauucguugaugaaagaggcuuauauaagucuuugaaaggggcaugcaaacucaaguuauguggaguucuuggccuuagacuuauggauggaacguggguugcgaugcaaacaucggacgaaaccaaguggugcccuccugaccaguugguaaaucuacacgacuuucgcucagacgagaucgaacaucuuguuguggaggaguuggucaagaaaagagaggagugucuggaugcauuagagucuaucaugacuaccaagucggugaguuucagacgucucagccacuugagaaaacuugucccuggguucgggaaggcauacacuauauucaacaaaacuuugauggaagcagaugcucauuacaagucaauccgaaccuggaaugagaucauccccuccaaaggguguuugagaguuggagggaggugucauccucacgugaacgggguguuuuuuaacgguauaauacuggguccugacggccauguucuaaucccagagaugcaaucaucccuccuucagcagcauauggaguuguuggaauccucgguuaucccccugaugcacccuuuagcggacccgucuacaguuuucaaggacggugaugaagcagaggauuuuguugagguucaccuucccgacgugcacaaacaaauuucagguguugaccugggucuccccagcuggggaaaguauguuuuggugagugcaggggucuugguuguccugauguugacaauuuucauaaugacauguugugggagaguccgucgacccaagucuacacaacacagucucggagagacagggaggaaggugucggucacuucccaaagcgggaaggucauaucuucaugggagucauauaagagcgggggugagaccagacuguga

SEQ ID NO: 63454 - RNA, 1575 nt, Artificial Sequence
  derived and/or modified CDS sequence (wt) from glycoprotein__RABV__JX944587.1
augguuccucagguucuuugguuuguaccccuucugguuuucucaauguguuucggaaaguucccuaucuacacgauaccagacaaacuuggucccuggagcccgauugacauacaucaucucagcuguccaaacaaccugguuguagaagaugaaggauguaccaacuugucggguuucuccuacauggaacuuaaggugggauacauuucagccauaaaaguaaauggguucacgugcacagguguggugacagaggcagagacuuacacuaacuuuguugguuauguuaccaccacguucaaaagaaagcauuuccgcccaacaccagaugcaugucgagcugcuuacaacuggaagauggccggugaccccagauaugaagaaucuuugcacaauccguacccugacuaccacuggcuucgaaccgucaaaaccacaaaggagucccucgucaucauauccccaaguguagcggaccuggacccauaugacaaaucccuucacucgagggucuuuccuagcgggaagugcucggggauaacaauaucaucuaccuacugcucuaccaaccaugauuacacaaucuggaugcccgagaauccgagacuggggacaucuugugacaucuuuaccaacaguagagggaagagagcauccaaagggagcaaaacuugcggauuuguugaugaaagagguuuguauaagucuuugaaaggggcaugcaagcucaaguugugugggguucuuggccuuagacuuauggauggaacaugggucgcgaugcaaacaucggacgagaccaaguggugucccccugaucaguugguaaaucuacaugacuuucgcucggacgagaucgaacaucucguuguagaggaguuggucaagaaaagagaggagugucuggaugcacuagagucuaucaugaccaccaagucggugaguuucagacgucucagccacuugagaaaacuugucccuggguucggaaaagcauacaccauauucaacaaaacccugauggaagcagaugcucauuacaagucagucagaaccuggaaugagaucauccccuccaagggguguuugagaguuggagggaggugucauccucacgugaacgggguguuuuucaacgguauaauacuggguccugauggccauguucucaucccagagaugcaaucaucccuccuucagcagcauauggaguuguuggaauccucaguuaucccucugaugcacccuuuagcagacccgucuacaguuuucaaggacggcgaugaagcagaggauuuugucgagguucaccuucccgauguacacaaacaaaucucagguguugaccugggucucccuaacuggggaaaguauguuuuggugagugcaggggucuugguuguccugauguuggcaauuuucauaaugacauguugcggaagaguaaaucgacccaagucuacacaacacagucucgaagguacagggaggaaggugucggucacuucccaaagcgggaaggucauaucuucaugggagucauauaagagcgggggugagaccagacuguga

SEQ ID NO: 63455 - RNA, 1575 nt, Artificial Sequence
  derived and/or modified CDS sequence (wt) from glycoprotein__RABV__JX944588.1
auggucccucagguucucuuguuugugccccuucuaguguucucacuguguuucgggaaguuccccaucuacacgauaccagacaagcuuggucccuggaguccuauugacauacaucaucucagcuguccaaacaauuugguuguagaggaugaaggaugcaccaaucugucaggauucuccuacauggaacuuaaagugggauacaucucagccauaaaagugaauggcuuuacuuguacaggcgugguuacagaggcggagacuuacacuaacuucguugguuaugucacuaccacguuuagaagaaagcacuuccgcccaacgccugaugcgugcagagccgcauacaacuggaaacuggccggcgaccccagauaugaagagucccuacacaauccauacccugauuaccauuggcuucggacugugaaaacuaccaaggagucucucgucauaauauccccgaguguggcagaucuagaucccuaugacaaaucccuucacucgagaguuuuucccggcggaaagugcuccgggauaacaauaucuuccacuuacugcucuacuaaccaugauuacaccaucuggaugccugaaaauccgagacuagggacaucuugugacaucuucgucaacagcagggggaagagggcgucuaaggggggcaagaccuguggguuuguagaugagagaggcuuguauaagucgcuaaaaggagcuugcaaacucaaauuguguggggugcccggacugagacuuauggauggaacgugggcugcgauucaaacgucggaugagaccaaauggugccccccuaaucaguuaguaaaucuacaugauuuucgcucagaugaaaucgaacaucuagucguggaagaacuggucaagaaaagagaggagugcuuagaugcacuggaauccaucaugacuaccaagucaguaagcuucagacgucucagucacuugaggaaacuugucccuggguuugggaaagcauauaccauauucaacaaaaccuugauggaggccgaugcucacuauaagucggucaggacuuggaacgagaucauccccucaaaaggguguuuaagaguuggggggagaugucauccucaugugaaugggguguucuuuaaugguauaauauuaggcccggacggccauguucugaucccggaaaugcaaucgucccuccuccaacaacacauggagcuguuggaauccucggucaucccccuaaugcauccauuggcagacccaucaacaguuuucaaagauggggaugaggcggaagauuuuguugagguucaccuuccggaugugcacaaacugaucucgggaguugaccuuggucuucccagcugggggaaguauguguugaugagcgcagguguuuuaacagcacugauguugaugauuuucuugaugacguguugcaggagggguaaucaagcagggucaaaacaacauggucuugaagggacagggaggaaagugucugucacuucccagaauggaaaagucauauccucaugggagucauauaaaagcggaggugagaccaggcuguga

SEQ ID NO: 63456 - RNA, 1575 nt, Artificial Sequence
  derived and/or modified CDS sequence (wt) from glycoprotein__RABV__JX944593.1
augguuccucagguucuuuuguuuguaccccuucuggcuuucucaauguguuucgggaaauucccuaucuauacgauaccagacaaacuuggucccuggagcccgauugacauacaucaucucagcuguccaaacaaccugguuguggaagaugagggaugcacuaacuugucggguuucuccuacauggaacuuaaggugggauacaucucggccauaaaaguaaacggguucacgugcacagguguggugacagaggcagagacuuacacuaacuuugucgguuauguuaccaccacauucaaaagaaagcauuuccgcccaacaccagaugcaugucgagcugcuuacaacuggaagauggcaggugaccccagauaugaagaaucgcugcacaauccguacccugacuaccacuggcuucgaaccgucaaaaccacaaaggagucccucgucaucauauccccaaguguagcggaucuggacccauacgacaaaucccuucauucgagggucuuuccuagcgggaagugcucgggaauaacaauaucaucuacuuacugcucuacuaaccaugauuacacaaucuggaugcccgagaauccgagacuggggacaucuugugacaucuucaccaacaguagagggaagagagcauccaaaggggguaaaacuugcggauucguugaugaaagaggcuuguauaagucuuugaaaggggcaugcaaacucaaguuguguggaguucucggccuuagacuuauggauggaacguggguugcgaugcaaacaucggacgaaaccaagugguguccuccugaucaguugguaaaucuacacgacuuucgcucggacgagaucgaacaucuuguuguggaggaguuggucaagaaaagagaggagugucuggaugcacuagaguccaucaugaccaccaagucggugaguuucagacgucucagccacuugagaaaacuuguccccggguucgggaaagcauacaccauauucaacaaaaccuugauggaagcagaugcccauuacaagucaguccgaaccuggaaugaaaucauccccucgaaaggguguuugagaguuggagggaggugucauccucacguaaaggggguguuuuuuaacgguauaauacuagguccugacggccauguucuaaucccagagaugcaaucaucccuccuucagcagcauauggaguuguuggaauccucaguuaucccccugaugcacccuuuagcagacccgucuacaguuuucaaggacggugaugaagcagaggauuuuguugagguucaccuucccgacgugcacaaacaaauuucagguguugaccugggucuccccagcuggggaaaguauguuuuggugagugcagggguuuugguuguccugaugcugacaauuuucauaauaacauguugcggaagaguccaucgacccaagucuacacaacacggucucggggggacagggaggaaggugucggucacuucccaaagcgggaaggucauaucuucaugggagucauacaagagugggggugagaccagacuguga

SEQ ID NO: 63457 - RNA, 1575 nt, Artificial Sequence
  derived and/or modified CDS sequence (wt) from glycoprotein__RABV__JX987718.1
augguuccucagguucuuuuguuuguaccccuucugguuuucucaauguguuucgggaaauucccuaucuauacaauaccagacaaacuugguccuuggagcccgaucgacauacaucaucucagcuguccaaacaaccuaguuguggaagaugaaggaugcaccaacuugucagguuucuccuacauggaacuuaaggugggauacaucucggccauaaaaguaaacggauucacgugcacagguguggugacagaggcagagacuuacacuaacuuugucgguuauguuaccaccacguucaaaagaaagcauuuccgcccaacaccagaugcaugucgagcugcuuacaacuggaagauggccggugaccccagauaugaagaaucucugcauaauccguacccggacuaccacuggcucagaaccgucaagaccacaaaggagucccucgucauuauauccccaaguguagcggaucuggacccauaugacaaaucccuucauucgagggucuuccccagcgggaagugcuugggaauaacaauaucaucuacuuacugcucuacuaaccaugauuacacaaucuggaugcccgagaauccgagacuggggacaucuugugacaucuuuaccaacaguagagggaagagagcauccaaagggagcaaaacuugcggauuuguugaugaaagaggcuuguauaagucuuugaaaggggcgugcaaacucaaguuauguggaguucuuggccuuagacuuauggauggaacguggguugcgaugcaaacaucagacgaaaccaagugguguccuccugaucaguuggugaaucuacacgacuuucgcucggacgagauugaacaucuuguuguggaggaguuggucaagaaaagagaggagugucuggaugcacuagaguccaucaugaccaccaagucggugaguuucagacgucucagccacuugagaaaacuugucccuggguucggaaaagcauacaccauauucaacaaaaccuugauggaagcagaugcucauuacaagucaguccgaaccuggaaugagaucauccccuccaaaggguguuugagaguuggagggaggugucauccucacgugaaugggguguuuuuuaacgguauaauacuggguccugacggccauguucuaaucccagagaugcaaucgucccuccuucagcagcauauggaguugcuggaguccucagucaucccccugaugcacccuuuagcagacccguccacaguuuucaaggaaggugaugaggcagaggauuuuguugagguucaccuucccgacgugcacaaacaaauuucaggugucgaccugggucuccccagcuggggaaaguauguuuuggugagugcagggguccuggucguccugauguugacaauuuucauaaugacauguugcgggagaguccaucgacccaagucuacacaacacagucucggagggaccgggaggaaggugucggucacuucucaaagcgggaaggucauaucuuccugggagucauauaagagcgggggugagaccagacuguaa

SEQ ID NO: 63458 - RNA, 1575 nt, Artificial Sequence
  derived and/or modified CDS sequence (wt) from glycoprotein__RABV__JX987719.1
augguuccucagguucuuuuguuuguaccccuucuuguuuucucaauguguuucgggaaauucccuaucuauacaauaccagacaaacuuggucccuggagcccgaucgacauacaucaucucagcuguccaaacaaccugguuguggaagaugaaggauguaccaacuugucggguuucuccuacauggaacuuaaggugggauacaucucggccauaaaaguaaacggauucacgugcacagguguggugacagaggcagagacuuacacuaacuuugucgguuaugucaccaccacuuucaaaagaaagcauuuccgcccaacaccagaugcaugucgagcugcuuacaacuggaagcuggccggugaccccagauaugaagaaucucugcacaauccguacccugacuaccacuggcuucgaacagucaaaaccacaaaggagucccucgucaucauauccccaaguguagcggaccuggacccauacgacaaaucccuucauucgagggucuuuccuagcgggaagugcuugggaauaacaauaucaucuacuuacugcucuacuaaccaugauuacacaaucuggaugcccgagaauccgagacuggggacaucuugugacaucuuuaccaacaguagagggaagagagcauccaaagggaguaaaacuugcggauuuguugaugaaagaggcuuguauaagucuuugaaaggggcaugcaaacucaaguuaugugggguucuuggccuuagacuuauggacggaacguggguugcgaugcaaacaucggacgaaaccaagugguguccuccugaucaguugguaaaucuacacgacuuucgcucggacgagauugaacaucuuguuguggaggaguuggucaagaaaagagaggagugucuggaugcacuagaguccaucaugacuaccaaaucggugaguuucagacgucucagccaucugagaaaacuugucccuggguucggaaaagcauacaccauauucaacaaaaccuugauggaagcagaugcucauuauaagucaauccgaaccuggaaugagaucauccccuccaaaggguguuugagagugggagggaggugucauccucacgugaaugggguguuuuuuaacgguauaauacuggguccugacggccauguucuaaucccagagaugcaaucaucccuccuucagcagcauauggaguuguuggaauccucaguuaucccccugaugcacccuuuagcagacccaucuacaguuuuuaaggacggugaugaagcagaagauuuuguugagguucaccuucccgacgugcacaaacaaauuucagguguugaccugggucuccccagcuggggaaaguauguuuuggugagugcaggggucuugguuguccugauguugacaauuuucauaaugacauguugcggaagaguccgucgacccaagucuacgcaacacagucucggagggaccgggaggaaggugucggucacuucccaaagcgggaaggucauaucuucaugggagucauauaagagcgggggugagaccagacuguga

SEQ ID NO: 63459 - RNA, 1575 nt, Artificial Sequence
  derived and/or modified CDS sequence (wt) from glycoprotein__RABV__JX987720.1
augguuccucagguucuuuuguuuguaccccuucugguuuucucaauguguuucgggaaauucccuaucuauacaauaccagacaaacuugguccuuggagcccgaucgacauacaucaucucagcuguccaaacaaccuaguuguggaagaugaaggaugcaccaacuugucagguuucuccuacauggaacuuaaggugggauacaucucggccauaaaaguaaacggauucacgugcacagguguggugacagaggcagagacuuacacuaacuuugucgguuauguuaccaccacguucaaaagaaagcauuuccgcccaacaccagaugcaugucgagcugcuuacaacuggaagauggccggugaccccagauaugaagaaucucugcauaauccguacccggacuaccacuggcucagaaccgucaaaaccacaaaggagucccucgucauuauauccccaaguguagcggaucuggacccauaugacaaaucccuucauucgagggucuuccccagcgggaagugcuugggaauaacaauaucaucuacuuacugcucuacuaaccaugauuacacaaucuggaugcccgagaauccgagacuggggacaucuugugacaucuuuaccaacaguagagggaagagagcauccaaagggagcaaaacuugcggauuuguugaugaaagaggcuuguauaagucuuugaaaggggcgugcaaacucaaguuauguggaguucuuggccuuagacuuauggauggaacguggguugcgaugcaaacaucagacgaaaccaagugguguccuccugaucaguuggugaaucuacacgacuuucgcucggacgagauugaacaucuuguuguggaggaguuggucaagaaaagagaggagugucuggaugcacuagaguccaucaugaccaccaagucggugaguuucagacgucucagccacuugagaaaacuugucccuggguucggaaaagcauacaccauauucaacaaaaccuugauggaagcagaugcucauuacaagucaguccgaaccuggaaugagaucauccccuccaaaggguguuugagaguuggagggaggugucauccucacgugaaugggguguuuuuuaacgguauaauacuggguccugacggccauguucuaaucccagagaugcaaucgucccuccuucagcagcauauggaguugcuggaguccucagucaucccccugaugcacccuuuagcagacccguccacaguuuucaaggaaggugaugaggcagaggauuuuguugagguucaccuucccgacgugcacaaacaaauuucaggugucgaccugggucuccccagcuggggaaaguauguuuuggugagugcagggguccuggucguccugauguugacaauuuucauaaugacauguugcgggagaguccaucgacccaagucuacacaacacagucucggagggaccgggaggaaggugucggucacuucucaaagcgggaaggucauaucuuccugggagucauauaagagcgggggugagaccagacuguaa

SEQ ID NO: 63460 - RNA, 1575 nt, Artificial Sequence
  derived and/or modified CDS sequence (wt) from glycoprotein__RABV__JX987721.1
auggucccucagguucucuuguuugugccccuucuaguguucucacuguguuucgggaaguuccccaucuacacgauaccagacaagcuuggucccuggaguccuauugacauacaucaucucagcuguccaaacaauuugguuguagaggaugaaggaugcaccaaucugucaggauucuccuacauggaacuuaaagugggauacaucucagccauaaaagugaauggcuuuacuuguacaggcgugguuacagaggcagagacuuacacuaacuucguugguuaugucacuaccacguuuagaagaaggcacuuccgcccaacgccugauacgugcagagccgcguacaacuggaaacuggccggcgaccccagauaugaagagucccuacacaauccauacccugauuaccauuggcuucggacugugaaaacuaccaaggagucucucgucauaauauccccgaguguggcagaucuagaucccuaugacaaaucccuucacucgagaguuuuucccggcggaaagugcuccgggauaacaguaucuuccacuuacugcucuacuaaccaugauuacaccauauggaugccugaaaauccgagacuagggacaucuugugacaucuucgucaacagcagggggaagagggcgucuaaggggggcaagaccuguggguuuguagaugagagaggcuuguauaagucgcugaaaggagcuugcaaacucaaauuguguggggugcccggacugagacuuauggauggaacgugggcugcgauucaaacgucggaugagaccaaauggugccccccugaucagcuaguaaaucuacaugacuuucgcucagaugaaaucgaacaucuagucguggaagaacuggucaagaaaagagaggagugcuuagaugcacuggaauccaucaugacuaccaagucaguaagcuucagacgucucagucacuugaggaaacuugucccuggguuugggaaagcauauaccauauuuaacaaaaccuugauggaggccgaugcucacuauaagucggucaggacuuggaacgagaucauccccucaaaagggugucuaagaguuggggggagaugucauccucaugugaaugggguguucuuuaaugguauaauauuaggcccggacggccacguucugaucccggaaaugcaaucgucccuccuccaacaacacauggagcuguuggaauccucggucaucccccuaaugcauccauuggcagacccaucaacaguuuucaaagaugggggugaggcggaagauuuuguugagguucaccuuccggaugugcacaaacugaucucgggaguugaccuuggucuucccagcugggggaaguaugugcugaugagugcagguguuuuaacagcacugauguugaugauuuucuugaugacguguugcaggagggguaaucaagcagggucaaaacaacauggucuugaagggacagggaggaaagugucugucacuucccagaauggaaaagucauauccucaugggagucauauaaaagcggaggugagaccaggcuguga

SEQ ID NO: 63461 - RNA, 1575 nt, Artificial Sequence
  derived and/or modified CDS sequence (wt) from glycoprotein__RABV__JX987723.1
augguuccucagguucuuuuguuuguaccccuucugguuuucucaauguguuucgggaaauucccuaucuauacaauaccagacaaacuugguccuuggagcccgaucgacauacaucaucucagcuguccaaacaaccuaguuguggaagaugaaggaugcaccaacuugucagguuucuccuacauggaacuuaaggugggauacaucucggccauaaaaguaaacggauucacgugcacagguguggugacagaggcagagacuuacacuaacuuugucgguuauguuaccaccacguucaaaagaaagcauuuccgcccaacaccagaugcaugucgagcugcuuacaacuggaagauggccggugaccccagauaugaagaaucucugcauaauccguacccggacuaccacuggcucagaaccgucaaaaccacgaaggagucccucgucauuauauccccaaguguagcggaucuggacccauaugacaaaucccuucauucgagggucuuccccagcgggaagugcuugggaauaacaauaucaucuacuuacugcucuacuaaccaugauuacacaaucuggaugcccgagaauccgagacuggggacaucuugugacaucuuuaccaacaguagagggaagagagcauccaaagggagcaaaacuugcggauuuguugaugaaagaggcuuguauaagucuuugaaaggggcgugcaaacucaaguuauguggaguucuuggccuuagacuuauggauggaacguggguugcgaugcaaacaucagacgaaaccaagugguguccuccugaucaguuggugaaucuacacgacuuucgcucggacgagauugaacaucuuguuguggaggaguuggucaagaaaagagaggagugucuggaugcacuagaguccaucaugaccaccaagucggugaguuucagacgucucagccacuugagaaaacuugucccuggguucggaaaagcauacaccauauucaacaaaaccuugauggaagcagaugcucauuacaagucaguccgaaccuggaaugagaucauccccuccaaaggguguuugagaguuggagggaggugucauccucacgugaaugggguguuuuuuaacgguauaauacuggguccugacggccauguucuaaucccagagaugcaaucgucccuccuucagcagcauauggaguugcuggaguccucagucaucccccugaugcacccuuuagcagacccguccacaguuuucaaggaaggugaugaggcagaggauuuuguugagguucaccuucccgacgugcacaaacaaauuucaggugucgaccugggucuccccagcuggggaaaguauguuuuggugagugcagggguccuggucguccugauguugacaauuuucauaaugacauguugcgggagaguccaucgacccaagucuacacaacacagucucggagggaccgggaggaaggugucggucacuucucaaagcgggaaggucauaucuuccugggagucauauaagagcgggggugagaccagacuguaa

SEQ ID NO: 63462 - RNA, 1575 nt, Artificial Sequence
  derived and/or modified CDS sequence (wt) from glycoprotein__RABV__JX987724.1
auggucccucagguucucuuguuugugccccuucuaguguucucucuguguuucgggaaguuccccaucuacacgauaccagacaagcuuggucccuggaguccuauugacauacaucaucucagcuguccaaacaauuugguuguagaggaugaaggaugcaccaaucugucaggauucuccuacauggaacuuaaagugggauacaucucagccauaaaagugaauggcuuuacuuguacaggcgugguuacagaggcagagacuuacacuaacuucguugguuaugucacuaccacguuuagaagaaagcacuuccgcccaacgccugaugcgugcagagccgcauacaacuggaaacuggccggcgaccccagauaugaagagucccuacacaauccauacccugauuaccauuggcuucggacugugaaaacuaccaaggagucucucgucauaauauccccgaguguggcagaucuagaucccuaugacaaaucccuucacucgagaguuuuucccggcggaaagugcuccggaauaacaguaucuuccacuuacugcucuacuaaccaugauuacaccaucuggaugccugaaaauccgagacuagggacaucuugugacaucuucgucaacagcagggggaagagggcgucuaaggggggcaagaccuguggguuuguagaugagagaggcuuguauaagucgcuaaaaggagcuugcaaacucaaauuguguggggugcccggacugagacuuauggauggaacaugggcugcgauucaaacgucagaugagaccaaauggugccccccugaucaguuaguaaaucuacaugauuuucgcucagaugaaaucgaacaucuagucguggaagaacuggucaagaaaagagaggagugcuuagaugcacuggaauccaucaugaccaccaagucaguaagcuucagacgucucagucacuugaggaaacuugucccuggguuugggaaagcauauaccauauucaacaaaaccuugauggaggccgaugcucacuauaagucggucaggacuuggaacgagaucauccccucaaaagggugucuaagaguuggggggagaugucauccucaugugaaugggguguucuuuaaugguauaauauuaggcccggacggccauguucugaucccggaaaugcaaucgucccuccuccaacaacacauggagcuguuggaauccucggucaucccccuaaugcauccauuggcagacccaucaacaguuuucaaagauggggaugaggcggaagauuuuguugagguucaccuuccggaugugcacaaacugaucucgggaguugaccuuggucuucccagcugggggaaguauguguugaugagugcagguguuuuaacagcacugauguugaugauuuucuugaugacguguugcagaagggguaaucaagcagggucaaaacaacauggucuugaacggacagggaggaaagugucugucacuucccagaauggaaaagucauauccucaugggagucauauaaaagcggaggugagaccaggcuguga

SEQ ID NO: 63463 - RNA, 1575 nt, Artificial Sequence
  derived and/or modified CDS sequence (wt) from glycoprotein__RABV__JX987725.1
augguuccucagguucuuugguuuguaccccuucugguuuucucaauguguuucggaaaguucccuaucuacacgauaccagacaaacuuggucccuggagcccgauugacuuacaucaucucagcuguccaaacaaccugguuguagaagaugaaggauguaccaacuugucggguuucuccuacauggaacuuaaggugggauacauuucagccauaaaaguaaauggguucacguguacagguguggugacagaggcagagacuuacacuaacuuuguugguuauguuaccaccacguucaaaagaaagcauuuccgcccaacaccagaugcaugucgagcugcuuacaacuggaagauggccggugaccccagauaugaagaaucuuugcacaauccguacccugacuaccacuggcuucgaaccgucaaaaccacaaaggagucccucgucaucauauccccaaguguagcggaccuggacccauaugacaaaucccuucacucgagggucuuuccuagcgggaagugcucggggauaacaauaucaucuaccuacugcucuacuaaccaugauuacacaaucuggaugcccgagaauccgagacuggggacaucuugugacaucuuuaccaacaguagagggaagagagcaucuaaagggagcaaaacuugcggauuuguugaugaaagaggcuuguauaagucuuugaaaggggcaugcaagcucaaguugugugggguucuuggccuuagacuuauggauggaacaugggucgcgaugcaaacaucggacgagaccaaguggugucccccugaucaguugguaaaucuacaugacuuucgcucggacgagaucgaacaucucguuguagaggaguuggucaagaaaagagaggagugucuggaugcacuagagucuaucaugaccaccaagucggugaguuucagacgucucagccacuugagaaaacuugucccuggguucggaaaagcauacaccauauucaacaaaacccugauggaagcagaugcucauuacaagucagucagaaccuggaaugagaucauccccuccaagggguguuugagaguuggagggaggugucauccucacgugaacgggguguuuuucaacgguauaauacuggguccugauggccauguucucaucccagagaugcaaucaucccuccuucagcagcauauggaguuguuggaauccucaguuaucccucugaugcacccuuuagcagacccgucuacaguuuucaaggauggcgaugaagcagaggauuuugucgagguucaccuucccgauguacacaaacaaaucucagguguugaccugggucucccuaacuggggaaaguauguuuuggugagugcaggggucuugguuguccugauguuggcaauuuucauaaugacauguugcggaagaguaaaucgacccaagucuacacaacacagucucgaagguacagggaggaaggugucggucacuucccagagcgggaaggucauaucuucaugggagucauauaagagcgggggugagaccagacuguga

SEQ ID NO: 63464 - RNA, 1575 nt, Artificial Sequence
  derived and/or modified CDS sequence (wt) from glycoprotein__RABV__JX987727.1
augguuccucagguucuuugguuuguaccccuucugguuuucucaauguguuucggaaaguucccuaucuacacgauaccagacaaacuuggucccuggagcccgauugacauacaucaucucagcuguccaaacaaccugguuguagaagaugaaggauguaccaacuugucggguuucuccuacauggaacuuaaggugggauacauuucagccauaaaaguaaauggguucacguguacagguguggugacagaggcagagacuuacacuaacuuuguugguuauguuaccaccacguucaaaagaaagcauuuccgcccaacaccagaugcaugucgagcugcuuacaacuggaagauggccggugaccccagauaugaagaaucuuugcacaauccguacccugacuaccacuggcuucgaaccgucaaaaccacaaaggagucccucgucaucauauccccaaguguagcggaccuggacccauaugacaaaucccuucacucgagggucuuuccuagcgggaagugcucggggauaacaauaucaucuaccuacugcucuacuaaccaugauuacacaaucuggaugcccgagaauccgagacuggggacaucuugugacaucuuuaccaacaguagagggaagagagcaucuaaagggagcaaaacuugcggauuuguugaugaaagaggcuuguauaagucuuugaaaggggcaugcaagcucaaguugugugggguucucggccuuagacuuauggauggaacaugggucgcgaugcaaacaucggacgagaccaaguggugucccccugaucaguugguaaaucuacaugacuuucgcucggacgagaucgaacaucucguuguagaggaguuggucaagaaaagagaggagugucuggaugcacuagagucuaucaugaccaccaagucggugaguuucagacgucucagccacuugagaaaacuugucccuggguucggaaaagcauacaccauauucaacaaaacccugauggaagcagaugcucauuacaagucagucagaaccuggaaugagaucauccccuccaagggguguuugagaguuggagggaggugucauccucacgugaacgggguguuuuucaacgguauaauacuggguccugauggccauguucucaucccagagaugcaaucaucccuccuucagcagcauauggaguuguuggaauccucaguuaucccucugaugcacccuuuagcagacccgucuacaguuuucaaggacggcgaugaagcagaggauuuugucgagguucaccuucccgauguacacaaacaaaucucagguguugaccugggucucccuaacuggggaaaguauguuuuggugagugcaggggucuugguuguccugauguuggcaauuuucauaaugacauguugcggaagaguaaaucgacccaagucuacacaacacagucucgaagguacagggaggaaggugucggucacuucccagagcgggaaggucauaucuucaugggagucauauaagagcgggggugagaccagacuguga

SEQ ID NO: 63465 - RNA, 1575 nt, Artificial Sequence
  derived and/or modified CDS sequence (wt) from glycoprotein__RABV__JX987728.1
augguuccucaggcucuuuuguuuguaccccuucugguuuuuucauuguguuuugggaaauucccuauuuacacgauaccagacaagcucgguccuuggagcccgauugacauacaucaucugagcugcccaaacaaucugguuguggaggacgaaggaugcaccaaccugucaggauucuccuacauggaacuuaaaguuggauacaucucagccauaaaagugaacggguucacuugcacgggcguugugacagaggcagaaaccuacacuaacuuuguugguuaugucaccaccacguucaaaagaaagcauuuccguccaacaccagaugcaugcagagcugcguacaacuggaagauggccggugaccccagauaugaggagucucuacauaauccguaccccgacuaccauuggcuucgaacuguaaaaaccaccaaggagucucucguuaucauauccccaaguguggcagauuuggacccauaugacaaaucccuucacucaagggucuuccccagcggaaagugcucaggaauaacagugucuucuaccuacugcucaacuaaccacgauuacaccauuuggaugcccgagaauccgagacuagggacaucuugugacaucuucaccaauaguagagggaagagagcauccaaagggaguaagaccugcggcuuuguagaugagagaggccuguauaagucucugaaaggagcauguaaacucaaguuauguggaguucuuggacucagacuuauggauggaacaugggucgcgaugcaaacaucggaugagaccaaauggugcccuccugaucaguuggugaaucuucacgacuuucgcucggaugaaauugagcaucuuguuguagaggaguuggucaagaaaagagaggagugucuggaugcacuagaguccaucaugaccaccaagucagugaguuucagacgucucagucauuuaagaaaacuuguuccuggguuuggaaaagcauauacuauauucaacaagaccuugauggaggcugaugcucauuacaagucaguccggacuuggaaugagaucauccccucaaaagggugucuaagaguuggagggaggugucauccucaugugaacgggguguuuuucaacgguauaauauuagggcccgacggccauguucuaaucccagagaugcaaucaucccuccuucagcaacauauggaguuguuggaauccucggucauuccccugaugcacccccuggcagacccguccacaguauucaaggacggugaugaggcugaggauuuuguugaaguucaccuucccgaugugcacaaacaggucucagggguugaccugggccuuccaaacugggguaaguauguauugcuaagugcaggggcccugauugccuugauguugaugauuuuccuaaugacauguuguaggagagucaaucgaccagaaucuacgcagcccagucucggagggacagggaggaagguaucgaucacuucccaaagcgggaaggucauaucuucaugggagucauauaagagugggggugagacuagacuguga

SEQ ID NO: 63466 - RNA, 1575 nt, Artificial Sequence
  derived and/or modified CDS sequence (wt) from glycoprotein__RABV__JX987729.1
augguuccucaaguucuuuuguuuguaccccuucugguuuucccauuguguuccgggaaauucccuauuuacacgauaccagacaaacuugguccuuggagcccgaucgacauacaucaucucagcugcccaaacaauuugguuguggaggacgaaggaugcaccaaccugucaggguucucauacauggaacuuaaaguuggauacaucucagccauaaaagugaacggguucacuugcacgggcguugugacagaggcagaaaccuacacuaacuuuguugguuaugucaccaccacguucagaagaaagcauuuccguccaacaccagaugcauguagagcugcguacaacuggaagauggccggugaccccagauaugaggagucccuacacaauccguacccugacuaccauuggcuucgaacuguaaaaaccaccaaggagucucucguuaucauauccccaaguguggcagauuuggacccauaugacaaaucccuucacucgagggucuucccuaguggaaagugcucagggauaacagugucuucuaccuacugcucgacuaaccaugauuacaccauuuggaugcccgagaauccgagacuagggacaucuugugacauuuuuaccaauaguagaggaaagagagcauccaaagggaguaagaccugcggcuuuguagaugagagaggccuguauaagucucuaaaaggagcaugcaaacucaaguuauguggaguucuuggacuuagacuuauggauggaacauggaucgcgaugcaaacaucagaugagaccaaauggugcccuccugaucaguuggugaaucugcaugacuuucgcucggaugaaauugagcaucuuguuguagaggaguuggucaagaaaagagaggagugucuggaugcacuagaguccaucaugaccaccaagucagugaguuucagacgucucagucauuuaagaaaacuuguucccggguuuggaaaagcauauaccauauucaacaagaccuugauggaggcugaugcucacuacaagucaguccggacuuggaaugagaucauccccucaaaaggguguuuaagagucggagggaggugucauccucaugugaacgggguguuuuucaauggcauaauauuggggccugauggccauguucugaucccagagaugcaaucaucccuccuccagcaacauauggagcuguuggaauccucaguuauuccccugaugcacccccuggcagacccgucuacaguuuuuaaggacggugaugaggcugaggauuuuguugagguucaccuucccgaugugcacaaacaggucucagggguugaccugggccucccaaacugggggaaguauguauuacugagugcaggggcucugauugccuugauguugaugaucuuucuaaugacauguuguagaaaagucaaucgaccagaaucuacgcagcgcagucuuggagggacagggaggaaagugucgaucacuucccaaagcgggaagguuauaucuucgugggagucauauaagagugggggugagacuagacuguga

SEQ ID NO: 63467 - RNA, 1575 nt, Artificial Sequence
  derived and/or modified CDS sequence (wt) from glycoprotein__RABV__JX987730.1
augguuccucaagcucuuuuguuugugccccuucuggcuuuuccaauguguuucgggaaauuccccaucuacacaauaccagacaaacuuggucccuggagcccgauugacauacaucaucucagcuguccaaauaacuugguuguggaagacgaaggaugcaccaacuugucggguuucuccuacauggaacuuaaggugggauacauuucggccauaaaagugaacggguucacgugcacagguguggugacagaggcugagacuuacacuaacuuugucgguuauguuaccaccacguucaagagaaagcauuuccgcccaacaccagaugcauguagagcugcuuacaacuggaaaauggccggugaucccagauaugaagaaucucuucauaauccguacccugacuaccauuggcuucgaaccgugaaaaccacgaaggagucucucaucaucauauccccaaguguagcagaccuagacccauaugacaaaucccuucacucgagggucuuuccuagcgggaagugcuugggaauaacaauaucaucuaccuacugcucgacuaaccaugauuacaccaucuggaugcccgagaaucugagauuagggacaucuugugacaucuuuaccaauaguagagggaagagagcauccaaagggagcaagacuugcggauuuguugacgaaagaggcuuguauaagucuuugaagggggcaugcaagcucaaauuauguggaguucugggacuuagacuuauggacggaacgugggucgcgaugccaacaucggaugagaccaaguggugucccccugaucaguugguaaaucuacacgacuuucgcucggacgagaucgaacaucuugucguggaggaguuggucaagaaaagagaggagugucuggaugcccuagaguccaucaugacuaccaagucggugaguuuuagacgucucagccacuugagaaaacuugucccuggguucggaaaagcauacaccauauucaacaaaacccugauggaagcugaugcucacuacaagucaguccggaccuggaaugagaucauccccuccaaggggugucugagaguuggagggaggugucauccccauguaaacggaguguuuuuuaacggcauaauacugggcccugacggccauguucugaucccagagaugcaaucaucccuccuucagcaacauauggaguuguuggaaucaucaguuaucccucugaugcauccuuuagcagacccgucuacaguuuucaaggacggugaugaagcagaggauuuuguugagguucaccuucccgaugugcacaaacaaaucucagggguugaccugggucucccuaacuggggaaaguaugucuuaauaauugcagggguauugauugccaugauauugacaaucuucuuaaugacauguuguggaagagguaaucgacccaaguccacacaacacagucuuggagggauagggaggaaggugucauccacuucccaaagcgggaaggucauaucuucgugggagucauauaaaagcgggggugagaccagacuguga

SEQ ID NO: 63468 - RNA, 1575 nt, Artificial Sequence
  derived and/or modified CDS sequence (wt) from glycoprotein__RABV__JX987731.1
augguuccucaagcucuuuuguuugugccccuucuggcuuuuccaauguguuucgggaaauuccccaucuacacaauaccagacaaacuuggucccuggagcccgauugacauacaucaucucagcuguccaaauaacuugguuguggaagacgaaggaugcaccaacuugucggguuucuccuacauggaacuuaaggugggauacauuucggccauaaaagugaacggguucacgugcacagguguggugacagaggcugagacuuacacuaacuuugucgguuauguuaccaccacguucaagagaaagcauuuccgcccaacaccagaugcauguagagcugcuuacaacuggaaaauggccggugaucccagauaugaagaaucucuucauaauccguacccugacuaccauuggcuucgaaccgugaaaaccacgaaggagucucucaucaucauauccccaaguguagcagaccuagacccauaugacaaaucccuucacucgagggucuuuccuagcgggaagugcuugggaauaacaauaucaucuaccuacugcucgacuaaccaugauuacaccaucuggaugcccgagaaucugagauuagggacaucuugugacaucuuuaccaauaguagagggaagagagcauccaaagggagcaagacuugcggauuuguugacgaaagaggcuuguauaagucuuugaagggggcaugcaagcucaaauuauguggaguucugggacuuagacuuauggacggaacgugggucgcgaugccaacaucggaugagaccaaguggugucccccugaucaguugguaaaucuacacgacuuucgcucggacgagaucgaacaucuugucguggaggaguuggucaagaaaagagaggagugucuggaugcccuagaguccaucaugacuaccaagucggugaguuuuagacgucucagccacuugagaaaacuugucccuggguucggaaaagcauacaccauauucaacaaaacccugauggaagcugaugcucacuacaagucaguccggaccuggaaugagaucauccccuccaaggggugucugagaguuggagggaggugucauccccauguaaacggaguguuuuuuaacggcauaauacugggcccugacggccauguucugaucccagagaugcaaucaucccuccuucagcaacauauggaguuguuggaaucaucaguuaucccucugaugcauccuuuagcagacccgucuacaguuuucaaggacggugaugaagcagaggauuuuguugagguucaccuucccgaugugcacaagcaaaucucagggguugaccugggucucccuaacuggggaaaguaugucuuaauaauugcagggguauugauugccaugauauugacaaucuucuuaaugacauguuguggaagagguaaucgaccuaaguccacacaacacagucuuggagggauagggaggaaggugucauccacuucccaaagcgggaaggucauaucuucgugggagucauauaaaagcgggggugagaccagacuguga

SEQ ID NO: 63469 - RNA, 1575 nt, Artificial Sequence
  derived and/or modified CDS sequence (wt) from glycoprotein__RABV__JX987732.1
augguuccucaggcucuuuuguuuguaccccuucugguuuuuccauuguguuucgggaaauucccuauuuacacgauaccagacaaacuuggucccuggagcccgauugacauacaucaucucagcugcccaaauaauuugguuguggaggacgaaggaugcaccaaccugucgggguucuccuacauggaacuuaaaguuggguacaucucagccauaaaagugaacggguucacaugcacgggcguugugacagaggcagaaaccuacacuaacuuuguugguuaugucaccacuacguuuaaaagaaagcauuuccgcccaacaccagaugcauguagagccgcguacaauuggaagauggccggugaccccagauaugaggagucccuacacaacccguacccggacuaucauuggcuucgaacuguaaaaaccaccaaggagucucucguuaucauauccccaaguguggcagauuuggacccauaugacaagucccuucacucgagggucuucccuaguggaaagugcucaggaauaacggugucuucuaccuacuguucgacuaaccacgauuacacuauuuggaugccagagaauccgagacuagggacaucuugugacauuuuuaccaauaguagagggaagagagcauccaaagguaguaagaccugcggcuuuguagaugaaagaggccuguauaagucucuaaaaggagcaugcaaacucaaguuauguggaguucuuggacuuagacuuauggauggaacgugggucgcgaugcagacaucagaugagaccaaauggugcccucccgaucaguuggugaaucugcacgacuuccgcucggaugaaauugagcaucucguuguagaggaguuggucaagaaaagagaagagugccuggaugcacuagaguccaucaugaccaccaagucggugaguuucagacgucucagucauuuaagaaaacuugucccuggguucggaaaagcauacaccauauucaacaagaccuugauggaggcugaugcucacuacaaaucaguccggacuuggaaugagaucauccccucaaagggauguuugagagugggagggaggugucauccgcaugugaacggaguguuuuucaaugguauaauauuagggccugacggccauguucuaaucccagagaugcaaucaucccuucuccagcaacauauggaguuguuggaguccucaguuauaccccugaugcacccccuggcagacccguccacaguuuucaaggacggugaugaggcugaggauuuuguugaaguucaccuucccgaugugcacaaacaggucucagggguugaucuaggucucccaaacugggggaaauacguauuacugagugcaggggcuuugauugcuuugauguugauaauuuuccucaugacauguuguagaagagucaaucgaccggaaucuacgcaacgcagucuuggagggacagggaggaagguaucaguuaccucccaaagcgggaaggucauaucuucaugggagucauauaaaagugggggugagacuagacuguga

SEQ ID NO: 63470 - RNA, 1575 nt, Artificial Sequence
  derived and/or modified CDS sequence (wt) from glycoprotein__RABV__JX987733.1
augguuccucaggcucuuuuguuugugccccuucuggcuuuuccaauguguuucgggaaauuccccaucuacacaauaccagacaaacuuggucccuggagcccgauugacauacaucaucucagcuguccaaauaacuugguuguggaagacgagggaugcaccaacuugucggguuucuccuacauggaacuuaaagugggauacauuucggccauaaaagugaacggguucacgugcacaggugugguuacagaggcugagacuuacacuaacuuugucgguuauguuaccaccacguucaagagaaagcauuuccgcccaacaccagaugcaugucgagcugcuuacaacuggaaaauggccggugaccccagauaugaagaaucucuucauaauccguacccugacuaccauuggcuucgaaccgugaaaaccacgaaggagucucucaucaucauauccccaaguguagcagaccuagacccauaugacaaaucccuucacucgagggucuuuccuagcgggaagugcuugggaauaacaauaucaucuaccuacugcucgacuaaccaugauuacaccaucuggaugcccgagaaucugagauuagggacaucuugugacaucuuuaccaauaguagagggaagagagcauccaaagggagcaagacuugcggauuuguugacgaaagaggcuuguauaagucuuugaagggggcaugcaagcucaaauuaugugggguucugggacuuagacuuauggacggaacgugggucgcgaugcaaacaucggaugagaccaaguggugucccccugaucaguugguaaaucuacacgacuuucgcucggacgagaucgaacaucuugucguggaggaguuggucaagaaaagagaggagugucuggaugcccuagaguccaucaugacuaccaagucggugaguuuuagacgucucagccacuugagaaaacuugucccuggguuuggaaaagcauacaccauauucaacaaaacccugauggaagcugaugcucacuacaagucagucaggaccuggaacgagaucauccccuccaaggggugucugagaguuggagggaggugucauccccauguaaacggaguguuuuuuaacggcauaauacugggcccugacggccauguucugaucccagagaugcaaucaucccuccuucagcaacauauggaguuguuggaaucaucaguuaucccucugaugcauccuuuagcagacccgucuacaguuuucaaggacggugaugaagcagaggauuuuguugagguucaccuucccgaugugcacaaacaaaucucagggguugaccugggucucccuaacuggggaaaguaugucuuaauaauugcagggguauugauugccaugauauugacaaucuucuuaaugacauguuguggaagagguaaucgacccgaguccacacaacacagucuuggaggaauagggaggaaggugucagccacuucccaaagcgggaaggucauauccucgugggagucauauaaaagcgggggugagaccagacuguga

SEQ ID NO: 63471 - RNA, 1575 nt, Artificial Sequence
  derived and/or modified CDS sequence (wt) from glycoprotein__RABV__JX987734.1
augguuccucaggcucuuucguuuguaccccuuuuaguuuuuccauuguguuuugggaaauucccuauuuacacgauaccagacaagcuugguccuuggagcccgauugacauacaucaucugagcugcccaaacaaucugguuguggaggacgaaggauguaccaaccugucaggauucuccuacauggaacuuaaaguuggauacaucucagccaucaaagugaacggguucacuugcacgggcguugugacagaggcagaaaccuacacuaacuuuguugguuaugucaccaccacguucaaaagaaagcauuuccguccgacaccagaugcauguagagcugcguacaacuggaagauggccggugaccccagauaugaggagucucuacauaauccguauccugacuaccauuggcuucgaacuguaaaaaccaccaaggagucucucguuaucauauccccaaguguggcagauuuggacccguaugacaaaucccuucacucgagggucuuccccagcggaaaguguuuaggaauaacagugucuucuaccuacugcucaacuaaccacgauuacaccauuuggaugcccgagaauccuagacuagggacaucuugugacaucuuuaccaauaguagagggaagagagcauccaaagggaguaagaccugcggcuuuguagaugagagaggccuguauaagucucugaaaggagcauguaaacucaaguuauguggaguucuuggacucagacuuauggauggaacaugggucgcgaugcaaacaucggaugagaccaaauggugcccuccugaccaguuggugaauauucacgacuuucgcucggaugaaauugagcaucucguuguagaggaguuggucaagaaaagagaggagugucuggaugcacuagaguccaucaugaccaccaagucagugaguuucagacgucucagucauuuaagaaaacuuguuccuggguuuggaaaagcauauacuauauucaacaagaccuugauggaggcugaugcgcacuacaagucaguccggacuuggaaugagaucauccccucuaaaggguguuuaaggguuggagggaggugucauccucaugugaacgggguguuuuucaacgguauaauauuagggccugacggccauguucuaaucccagagaugcaaucaucccuccuccagcaacauauggaguuguuggaauccucagucauuccccugaugcacccccuggcagacccguccacaguauucaaggacggugaugaggcugaggauuuuguugaaguucaccuucccaaugugcacaaacaggucucagggguugaccugggccucccaaacugggguaaguauguauugcuaagugcaggggcccugauugccuugauguugauaauuuuccuaaugacguguuguaggagagucaaucgaucagagucuacgcagcgcagucucggaggggcagggaggaaggugucgaucacuucccaaggugggaaggucauaucuucaugggagucauauaagagugggggugagacuagacuguga

SEQ ID NO: 63472 - RNA, 1575 nt, Artificial Sequence
  derived and/or modified CDS sequence (wt) from glycoprotein__RABV__JX987749.1
augguuccucaggcucuuuuguuugugccccuucuggcuuuuccaauguguuucgggaaauuccccaucuacacaauaccagacaaacuuggucccuggagcccgauugacauacaucaucucagcugcccaaauaacuugguuguggaagacgaaggaugcaccaacuugucuggguucuccuacauggaacuuaaagugggauacauuucagccauaaaagugaacggguucacgugcacagguguggugacagaggcugagacuuacacuaacuuugucgguuaugucaccacuacguucaagagaaagcauuuccgcccaacaccagaugcaugucgugcugcuuacaacuggaaaauggccggugaccccagauaugaagaaucucuucauaauccguacccugacuaccauuggcuucgaaccguaaaaaccacgaaggagucccucaucaucauauccccuaguguagcggaccuagacccauaugacaaaucccuucauucgagggucuuuccuagcgggaagugcuugggaauaacaauaucaucuaccuacugcucgacuaaccaugauuacaccaucuggaugcccgagaaucugagauuagggacaucuugugacaucuuuaccaauaguagagggaagagagcauccaaagggagcaagacuugcggauuuguugacgaaagaggcuuguauaagucuuugaagggggcaugcaagcucaaauuaugugggguucugggacuuagacuuauggacggaacgugggucgcgaugcaaacaucggaugaaaccaaguggugucccccggaucaguuggugaaucuacacgacuuucgcucggacgaaaucgaacaucuugucguggaggaguuggucaagaaaagagaggaguguuuggaugcccuggaguccaucaugacuaccaagucggugaguuuuagacgucucagccacuugagaaaacuugucccuggguucggaaaagcauacacaauauucaacaaaacucugauggaagcugaugcucacuacaagucaguccggaccuggaaugagaucauccccucaaagggguguuugagaguuggagggaggugucauccccauguaaacggaguguuuuuuaacggcauaauacuaggcccugacggccauguucugaucccagagaugcaaucaucccuccuucagcagcauauggaguuguuggaaucaucaguuaucccucugaugcauccuuuagcagacccgucuacagucuucaaggacggugaugaagcagaggauuuuguugagguucaccuucccgaugugcacaaacaaaucucagggguugaccugggucucccuaacuggggaaaguaugucuuaauaauugcagggguccugauugccaugauauugacaaucuucuugaugacauguuguggaagagguaaucgacccaaguccacacaacacagucuuggagggauaggaaggaaggugucagccacuucccaaagcgggaaggucauaucuucgugggagucauauaaaagcgggggugagaccagacuguga

SEQ ID NO: 63473 - RNA, 1575 nt, Artificial Sequence
  derived and/or modified CDS sequence (wt) from glycoprotein__RABV__KC169986.1
augauuccucaaguucuuuuguuuguuccccuucuaguuuucucgucauguuucgggaaauuccccauuuacacgauaccagacaaacuugguccauggagucccaucgauauacaucaucucagcuguccgaacaaucuuguuguggaagaugaagggugcaccaaucugucuggauuuuccuacauggaacucaaagugggauauauuucagccauaaaagugaacggauucaccuguacagguguggugacagaagcagagaccuacacgaacuuuguugguuaugucaccaccacguuuaagagaaagcacuuucgcccuaugccgggugcguguagagccgcauacaacuggaagauggcuggugaccccagguaugaagagucucugcacaauccguacccugacuaccacuggcuccgaacugucaagaccaccaaggagucccuugucaucauaucucagagcguugcagauuuggacccguacgauaaaucccuucacucgagaguuuuuccuggcggaaaaugcucaggaauaaccguguccuccacuugcugcucuacuaaccacgacuacaccaucuggaugccugaaaauccuagacugggaacuucgugugacauuuucaccaauaguagagggaagagggcaucaaaagggggcaagacuuguggauuuguggaugagagaggcuuguacaagucucuaaaaggagcaugcaagcugaagcuaugugggguucuaggacuuagacuuauggacggaacaugggucgcaauucagacaucagaugagaucaaauggugcucuccugaucagcuaguaaaucuacacgacuuccacucggaugagauugaacaucuuguuguggaggaguuggucaaaaagagggaagagugucuggacgcacuggagacuauuaugaccacaaaauccgugaguuucagacgucuuagucauuugaggaagcuagucccuggguuuggaaaagcguauaccauauucaacaaaaccuugauggaggcugaugcucacuauaaaucaauccggacuugggaugaaaucauccccucuaaaggguguuuaagaguuggggggagaugucauccucaugugaacgggguguucuucaacggcauuauacuggguccugacggacauguucuaaucccagagaugcaaucgucccuccuccaccagcauauggaauuguuggaguccucagucaucccguugaugcaucccuuagcagacccaucagcagucuuuaaagacggcgacgaggcagaggacuuuguugagguucaccuuccggaugugcacaagcagaucucggggguugaucuuggucucccaaacugggggaaguacgugcugauaagugcaggugcucugacugcaucaauguugaugauuuucuuaaugacuuguugcagaaaggcuaauagagcagagucaauacaacacaauccuggagagacagggaggaaagugucgguaacuucucacaacggaagggucauaucuucaugggaaucauauaaaagcggaggugagaccaagcuguga

SEQ ID NO: 63474 - RNA, 1575 nt, Artificial Sequence
  derived and/or modified CDS sequence (wt) from glycoprotein__RABV__KC171643.1
augguuccucaagcucuuuuguucguaccucuucugguuuuuucaauguguuucgggaaauuccccaucuacacgauaccagacaaacuugguccuuggagcccaauugacauacaucaucucagcuguccaaacaacuugguuguagaggaugaaggaugcaccaacuugucagguuuuuccuacauggaacuuaaagugggauacauuucggccauaaaagugaacggguucacgugcacagguguggugacagaggcagaaacuuauacuaacuuuguugguuaugucaccacuacguucaaaagaaagcauuuccgcccgacaccggaugcaugucgagccgcuuacaacuggaaaauggccggugaccccagauaugaagaaucucugcacaauccuuacccugacuaccacuggcuucgaacugucaaaaccacgaaggaaucccuagucaucauauccccaaguguagcggaccuggacccauacgauaaaucccuucacucuagagucuuuccuaacggaaagugcucaggaauaacgauauccucuaccuacugcccuaccaaccaugauuacacuaucuggcucccugagaauccaagacuggggacaucuugugacaucuuuaccaauaguagagggaagagagcuuccaaagggagcaagacuugcggguuuguugaugaaagagguuuguauaagucauugaaaggggcaugcaaacuuaaguugugugggguccuuggacuuagacuuauggauggaacgugggucgcaaugcaagcgucggacgagaccaaauggugccccccagaucagcugguaaaucuacacgacuuucgcucggacgagaucgaacaucucguuguggaggaguuggucaagaagagagaagagugucuggaugcacuagaguccaucaugacuacuaagucagugaguuucagacgucucagccacuugagaaagcuugucccuggguucggaaaagcauacaccauauucaacaaaaccuugauggaagcugaugcucacuacaagucaguccgaaccuggaaugagaucauccccucaaaaggguguuugagagucggggggaggugucauccucauguaaacgggguguuuuucaacgguauaauccuggguccugauggccauguucuaaucccagagaugcaaucgucccuccuucagcaacauauggaguuguuagaauccucaguugucccccugaugcacccuuuagcagacccgucuacaguucucaaggauggugaugaagcagagaauuuuguggagguucaccuuccugauguacacaaacagaucucgggaguugaccugggucucccuaacugggggaaguauguuuugguaagugcagggguccugaucgccuugauguugauaauuuuucuaaugacauguugcggaagagucaaucgaccaaaguccacacaacacaaucuuggcgggacagggaggaaggugucaguaacuccccaaagcggaaagguuauaucuucaugggagucauacaaaagcggaggugggaccagacuguga

SEQ ID NO: 63475 - RNA, 1575 nt, Artificial Sequence
  derived and/or modified CDS sequence (wt) from glycoprotein__RABV__KC171644.1
augguuccucaagcucuuuuguucguaccucuucugguuuuuucaauguguuucgggaaauuccccaucuacacgauaccagacaaacuugguccuuggagcccaauugacauacaucaucucagcuguccaaacaacuugguuguagaggaugaaggaugcaccaacuugucagguuuuuccuacauggaacuuaaagugggauacauuucggccauaaaagugaacggguucacgugcacagguguggugacagaggcagaaacuuauacuaacuuuguugguuaugucaccacuacguucaaaagaaagcauuuccgcccgacaccggaugcaugucgagccgcuuacaacuggaaaauggccggugaccccagauaugaagaaucucugcacaauccuuacccugacuaccacuggcuucgaacugucaaaaccacgaaggagucccuagucaucauauccccaaguguagcggaccuggacccauacgauaaaucccuucacucuagagucuuuccuaacggaaagugcucaggaauaacgauauccucuaccuacugcccuaccaaccaugauuacacuaucuggcucccugagaauccaagacuggggacaucuugugacaucuuuaccaauaguagagggaagagagcauccaaagggagcaagacuugcggguuuguugaugaaagaggucuguauaagucauugaaaggggcaugcaaacuuaaguugugugggguccuuggacuuagacuuauggauggaacgugggucgcaaugcaagcgucggacgagaccaaauggugccccccagaucagcugguaaaucuacacgacuuucgcucggacgagaucgaacaucucguuguggaggaguuggucaagaagagagaagagugucuggaugcacuagaguccaucaugacuaccaagucagugaguuucagacgucucagccacuugagaaagcuugucccuggguucggaaaagcauacaccauauucaacaaaaccuugauggaagcugaugcucacuacaagucaguccgaaccuggaaugagaucauccccucaaaaggguguuugagagucggggggaggugucauccucauguaaacgggguguuuuucaacgguauaauccuggguccugacggccauguucuaaucccagagaugcaaucgucccuccuucagcaacauauggaguuguuggaauccucaguuaucccccugaugcacccuuuagcagacccgucuacaguuuucaaggauggugaugaagcagagaauuuuguggagguucaccuuccugauguacacaaacagaucucgggaguugaccugggucucccuaacugggggaaguauguuuugguaagugcagggguccugaucgcuuugauguuaauaauuuuucuaaugacauguugcggaagagucaaucgaccaaaguccacacaacacaaucuuggcgggacagggaggaaggugucaguaacuccccaaagcggaaagguuauaucuucaugggagucauacaaaagcggaggugggaccagacuguga

SEQ ID NO: 63476 - RNA, 1575 nt, Artificial Sequence
  derived and/or modified CDS sequence (wt) from glycoprotein__RABV__KC171645.1
augguuccucaagcucuuuuguucguaccucuucugguuuucucaauguguuucgggaaauuccccaucuacacgauaccagacaaacuugguccuuggagcccaauugacauacaucaucucagcuguccaaacaacuugguuguagaggaugaaggaugcaccaacuugucggguuuuuccuacauggaacuuaaagugggauacauuucggccauaaaagugaacggguucacgugcacagguguggugacagaggcagaaacuuauacuaacuuuguugguuaugucaccacuacguucaaaagaaagcauuuccgcccaacaccggaugcaugucgagccgcuuacaacuggaaaauggccggugaccccagauaugaagagucucugcacaauccuuacccugacuaccacuggcuucgaacuguaaagaccacaaaggaaucccuagucaucauauccccaaguguagcggaccuggacccauacgauaaaucccuucacucuagagucuuuccuaacggaaagugcucaggaauaacaauauccucuaccuacugcccuaccaaccaugauuacacuaucuggcucccugagaauccgagacuggggacaucuugugacaucuuuaccaauaguagagggaagagagcauccaaagggagcaagacuugcggguuuguugaugaaagagguuuguauaagucauugaaaggggcaugcaaacuuaaguugugugggguccuuggacuuaggcuuauggauggaacgugggucgcaaugcaaacgucggacgagaccaaauggugccccccagaucagcugguaaaucugcacgacuuucgcucggacgagaucgaacaucucguuguggaggaguuggucaagaagagagaagagugucuggaugcacuagaguccauuaugacuacuaagucagugaguuuuagacgucucagccacuugagaaagcuugucccuggguucggaaaagcauacaccauauucaacaaaaccuugauggaagcugaugcucacuacaagucaguccgaaccuggaaugagaucauccccucaaaaggguguuugagagucggggggaggugucauccucauguaaacgggguguuuuucaacgguauaauccuggguccugauggccauguucuaaucccagagaugcaaucgucccuccuucagcagcauauggaguuguuggaauccucaguuaucccccugaugcacccuuuagcagacccgucuacaguuuucaaggauggugaugaagcagaggauuuuguggagguucaccuuccugauguacacaaacagaucucgggaguugaccugggucucccuaacugggggaaguauguuuugguaagugcagggguccugaucgccuugauguugauaauuuuucuaaugacauguugcggaagagucaaucgaccaaaguccacacaacacaaucuuggagggacagggaggaaggugucgguaacuucccaaagcggaaagguuauaucuucaugggagucauacaaaagcggaggugagaccagacuguga

SEQ ID NO: 63477 - RNA, 1575 nt, Artificial Sequence
  derived and/or modified CDS sequence (wt) from glycoprotein__RABV__KC252633.1
augguuccucuaguucuuuuguuuguaccccuucugguuuuuccauuguguuccgggaaauucccuauuuacacgauaccagacaaacuugguccuuggagcccgauugacauacaucaucuuagcuguccaaacaauuugguuguggaggacgaaggaugcgccaaccugucaggguucucauacauggaacuuaaaguuggauauaucucagccauaaaagugaacggguuuacuugcacgggcguugugacagaggcagaaacuuacacgaacuuuguugguuaugucaccaccacguucagaagaaagcauuuccguccaacaccagaugcauguagagccgcguacaacuggaagauggccggugaccccagauaugaggagucccuacacaauccguacccugacuaccauuggcuucgaacuguaaaaaccaccaaggagucucucguuaucauauccccaaguguggcagauuuggacccauaugacaaaucccuucacucgagggucuuuccuaguggaaaguguucagggauaacagugucuucuaccuauugcucaacuaaccaugauuacacuauuuggaugcccgagaaucugagacuagggacaucuugugacauuuuuaccaauaguagaggaaagagagcauccaaggggaguaagaccugcggcuuuguagaugagagaggccuguauaagucucuaaaaggagcaugcaaacucaaguuauguggaguucuuggacuuagacuuauggauggaacaugggucgcgaugcaaacaucaggugagaccaaauggugcccuccugaucaguuggugaaucugcacgacuuucgcucugaugaaauugagcaucuuguuguagaggaguuggucaagaaaagagaggagugucuggaugcacuagaguccaucaugaccaccaagucagugaguuucagacgucucagucauuugagaaaacuuguucccggguuuggaaaagcauauaccauauucaacaagaccuugauggaggcugaugcucacuacaagucaguccggacuuggaaugagaucauccccucaaaagguuguuuaagagucggagggaggugucauccucaugugaacgggguguuuuucaauggcauaauauuagggccugauggccauguucuaaucccagagaugcaaucaucccuccuccagcaacauauggagcuguuggaauccucaguuauuccccugaugcacccccuggcagacccgucuacaguuuuuaaggacggugaugaggcugaggauuuuguugagguucaccuucccgaugugcacaaacaggucucaggaguugaccugggccucccaaacugggggaaguauauauuacugagugcaggggcccugauugccuugauguugaugaucuuucuaaugacguguuguagaaaauuuaaucgaccagaaucuacgcagcgcagucucggagggacagggaggaaggugucgaucacuucccaaggcgggaagguuauaucuucgugggagucauauaagagugggggugagacuagacuguga

SEQ ID NO: 63478 - RNA, 1575 nt, Artificial Sequence
  derived and/or modified CDS sequence (wt) from glycoprotein__RABV__KC737850.1
augguuccucaggcucuuuuguucguaccccuucuggcggucucauucuguuucgggaaauuccccauuuacacaauaccagacaagcuuggucccuggagcccgauugacauacaucaucuuagcuguccaaacaauuugguuguggaggacgaaggaugcacuaaccugucaggguucuccuacauggaacuuaaaguuggauacaucuccgccauaaaaguaaacggguucacuugcacaggcguugugacagaggcagaaaccuacaccaacuuugucgguuaugucacaaccacguucaagagaaagcauuuucgcccaacaccagaugcauguagaucugcguacaacuggaagauggccggcgacccuagauaugaggagucucuacacaauccguaccccgacuaucauuggcuucggacuguaaagaccaccaaagaaucucucguuaucauauccccuaguguggcagauuuggacccauacgacaaaucccuucacuccagggucuuccccagcgggaagugcucaggaauaacagugucuucuaccuacugcucgaccaaucaugauuacaccauuuggcugcccgagaauccgagacuagggacaucuugugacauauucaccaauaguagagggaagagagcauccaaagggagcaagaccugcggcuuuguugaugaaagaggccuguauaagucccuaaagggagcaugcaaacucaaauuauguggaguucuuggacuuagacuuauggauggaacauggguagcgaugcaaacaucagaugagacuaaauggugcccuccugaucaauugguaaaucugcacgacuuccgcucggacgagauugagcaucuuguuguggaggaguuggucaagaaaagagaggagugucuggaugcauuagaguccaucaugaccaccaagucagugaguuucagacgucucagucauuuaagaaaacucguccccggguucggaaaggcauauacuauauucaacaaaacuuugauggaggcugaugcucacuacaagucaguccggacuuggaacgagaucauccccucaaaagggugucuaagagugggagggaggugucauccucaugugaacgggguguucuucaaugguauaauacuggggccugauggccauguucuaaucccagagaugcaaucaucacuccuccagcaacacauggaguuguuggaauccucagucaucccccugaugcacccuuuggcagacccaucuacaguuuucaaggacggugaugaggcugaggacuuuguugaaguucaccuucccgaugugcacaaacaagucucugggguugaccugggucucccaaacugggggaaauauguauuaacgagugcagggguccugauugccuugauguugauaauuuuccuaaugacauguuguagaagagucaaucgaucagacucuacacaacgcagucuuggaaggacagggaggaaggugucgguuaccucccaaagcgggaaggucauaucuucaugggagucauauaaaaguggaggcgagacuaggcuguga

SEQ ID NO: 63479 - RNA, 1575 nt, Artificial Sequence
  derived and/or modified CDS sequence (wt) from glycoprotein__RABV__KC762941.1
augauucuucaaauucuuuuguuuguuccccuucuaguuuucucgucauguuucgggaaauuccccauuuacacuauaccagacaaacuugguccauggagucccaucgauauacaucaucucagcuguccgaacaaucugguuguggaagaugaaggaugcaccaaucugucuggauuuuccuacauggaacucaaagugggauauauuucagccauaaaagugaauggauucaccuguacagguguggugacagaagcagaaaccuacacuaacuuuguugguuaugucaccaccacauuuaagagaaagcacuuucacccuaugccggaugcgugcagagccgcauacaacuggaagauggcuggugaccccagguaugaagagucuuugcacaauccguacccugacuaccacuggcuccgaacugucaagaccaccaaggagucccuugucaucauaucuccgagcguugcggacuuggacccguacgacaaaucccuucacucgagaguuuucccuggcggaaaaugcucaggaauaaccguguccuccacuugcugcucuacuaaccacgacuacaccaucuggaugccugaaaauccuagacugggaacuucgugugacauuuucaccaauaguagagggaagagggcaucaaaagggggcaagacuuguggauuuguggaugaaagaggcuuguacaagucucuaaagggagcaugcaagaugaagcuaugugggguucuaggacuuagacuuauggacggaacaugggucgcaauucagacaucagaugaggucaaauggugcucuccugaucagcuaguaaaucuacacgacuuucacucggaugagauugaacaucucguuguggaggaguuggucaaaaagagagaagagugucuggaugcacuggagacuauuaugacaacaaaguccgugaguuucagacgucucagucauuugaggaagcuagucccuggguuuggaaaggcguauaccauauucaacaaaaccuugauggaagcugaugcucacuauaaaucaauccagacuuggaaugaaaucauccccuccaaaggguguuuaagaguuggggggagaugucauccucaugugaacggaguguucuucaauggcaucauacuggguccugacggacauguucuaaucccagagaugcaaucgucccuccuccaccaacauauggaauuguuggaauccucagucaucccuuugaugcaucccuuggcagacccgucaacagucuuuaaagacggcgacgaggcagaggacuuuguugagguucaccuuccggaggugcacaagcagaucucggggguugaucuuggucucccaaacugggggaaguaugugcugauaagugcaggugcucugacugcauuaauguugaugauuuucuuaaugacguguugcagaaagacuaauagaccagagucaauacaacacaguccuggagagacagagaggaaagugucggugacuucucauaacggaagggucauaucuucaugggaaucauauaaaagcggaggugagacuaagcuguga

SEQ ID NO: 63480 - RNA, 1575 nt, Artificial Sequence
  derived and/or modified CDS sequence (wt) from glycoprotein__RABV__KC792172.1
augguuccucaagcucuuuuguuugugccccuucuggcuuuuccaauguguuucggaaaauuccccaucuacacaauaccagacaaacuuggucccuggagcccgauugacauacaucaucucagcuguccaaauaacuugguuguggaagacgaaggaugcaccaacuugucggguuucucauacauggaacuuaaggugggauacauuucggccauaaaagugaacggguucacgugcacagguguggugacagaggcugagaccuacacuaacuuugucgguuauguuaccaccacguuuaagagaaagcauuuccgcccaacaccagaugcauguagagcugcuuacaacuggaaaauggccggugaucccagauaugaagaaucucuucauaauccguacccugacuaccauuggcuucgaaccgugaaaaccacgaaggagucucucaucaucauauccccaaguguagcagaucuagacccauaugacaaaucccuucacucgagggucuuuccuagcgggaagugcuugggaauaacaauaucaucuaccuacugcucgacuaaccaugauuacaccaucuggaugcccgagaaugugagauuagggacaucuugugacauuuuuaccaacaguagagggaagaaagcauccaaagggagcaagacuuguggauuuguugacgaaagaggcuuguauaagucuuugaagggggcaugcaagcucaaauuauguggaguucugggacuuagacuuauggacggaacgugggucgcgaugccaacaucggaugagaccaaguggugucccccugaucaguugguaaaucuacacgacuuucgcucugacgagaucgaacaucuugucguggaggaguuggucaggaaaagagaggagugucuggaugcccuagaguccaucaugacuaccaagucggugaguuuuagacgucuaagccacuugagaaaacuugucccuggauucggaaaagcauacaccauauucaacaaaacccugauggaagccgaugcucacuacaagucaguccggaccuggaaugagaucauccccuccaaggggugucugagaguuggagggaggugucauccccauguaaacggaguguuuuuuaacggcauaauacugggcccugacggccauguucuaaucccagagaugcaaucaucccuccuucagcaacauauggaguuguuggaaucaucaguuaucccucugaugcauccuuuagcagacccguccacaguuuucaaggacggugaugaagcagaggauuuuguugagguucaccuucccgaugugcacaaacagaucucagggguugaccugggucucccuaacuggggaaaguaugucuuaauaauugcagggguauugauugccaugauauugacaaucuucuuaaugacauguuguggaagagguaaucgacccaaguccacacaacacagucuuggagggauagggaggaaggugucauccacuucccaaagcgggaaggucauaucuucgugggagucauauaaaagcgggggugagaccagacuguga

SEQ ID NO: 63481 - RNA, 1575 nt, Artificial Sequence
  derived and/or modified CDS sequence (wt) from glycoprotein__RABV__KC792173.1
augguuccucaagcucuuuuguuugugccccuucuggcuuuuccaauguguuucgggaaauuccccaucuacacaauaccagacaaacuuggccccuggagcccgauugacauacaucaucucagcuguccaaauaacuugguuguggaagacgaaggaugcaccaacuugucggguuucuccuacauggaacuuaaagugggauacauuucggccauaaaagugaacggguucacgugcacaggugugguuacagaggcugagacuuacacuaacuucgucgguuauguuaccaccacguucaagagaaagcauuuccgcccaacaccagaugcaugucgagcugcuuacaacuggaaaauggccggugaccccagauaugaagaaucucuucauaauccguacccugacuaccauuggcuucgaacagugaaaacuacgaaggagucucucaucaucauauccccaaguguagcagaccuagauccauaugacaaaucccuucacucgagggucuuuccuagcgggaagugcuugggaauaacaauaucaucuaccuacugcucgacuaaccaugauuacaccaucuggaugcccgagaaucugagauuagggacaucuugugacaucuuuaccaauaguagagggaagagagcauccaaagggagcaagacuugcggauuuguugacgaaagaggcuuguauaagucuuugaaggggucaugcaagcucaaauuaugugggguucuaggacuuagacuuauggacggaacgugggucgcgaugcaaacaucggaugagaccaaguggugucccccugaucaguugguaaaucuacacgacuuucgcucggacgagaucgaacaucuugucguggaggaguuggucaagaaaagagaggagugucuggaugcccuagaguccaucaugacuaccaagucggugaguuuuagacgucucagccacuugagaaaacuugucccuggguuuggaaaagcauacaccauauucaacaaaacccugauggaagcugaugcucacuacaagucggucaggaccuggaacgagaucauccccuccaaggggugucugagaguuggagggaggugucauccucauguaaacggaguguuuuuuaacggcauaauacugggcccugacggccauguucugaucccagagaugcaaucaucccuccuucagcaacauauggaguuguuggaaucaucaguuaucccucugaugcauccuuuagcagacccgucuacaguuuucaaggacggugaugaagcagaggauuuuguugagguucaccuucccgaugugcacaaacaaaucucagggguugaccugggucucccuaacuggggaaaguacgucuuaauaauugcagggguauugauugccaugauauugacaauccucuuaaugacauguuguggaagagguaaucgacccaaguccacacaacacagucuuggaggaauagggaggaaggugucagccacuucccaaagcgggaaggucauauccucgugggagucauauaaaagcgggggugagaccagacuauga

SEQ ID NO: 63482 - RNA, 1575 nt, Artificial Sequence
  derived and/or modified CDS sequence (wt) from glycoprotein__RABV__KC792174.1
augguuccucaagcucuuuuguuugugccucuucuggcuuuuccaauguguuucgggaaauuccccaucuacacaauaccagacaaacuuggucccuggagcccgauugacauacaucaucucagcuguccaaauaacuugguuguggaagacgaaggaugcaccaacuugucggguuucuccuacauggaacuuaaagugggauacauuucggccauaaaagugaacggguucacgugcacaggugugguuacagaggcugagacuuacacuaacuucgucgguuauguuaccaccacguucaagagaaagcauuuccgcccaacaccagaugcaugucgagcugcuuacaacuggaaaauggccggugaccccagauaugaagaaucucuucauaauccguacccugacuaccauuggcuucgaaccgugaaaacuacgaaggagucucucaucaucauauccccaaguguagcagaccuagauccauaugacaaaucccuucacucgagggucuuuccuagcgggaagugcuugggaauaacaauaucaucuaccuacugcucgacuaaccaugauuacaccaucuggaugcccgagaaucugagauuagggacaucuugugacaucuuuaccaauaguagagggaagagagcauccaaagggagcaagacuugcggauuuguugacgaaagaggcuuguauaagucuuugaaggggucaugcaagcucaaauuaugugggguucuaggacuuagacuuauggacggaacgugggucgcgaugcaaacaucggaugagaccaaguggugucccccugaucaguugguaaaucuacacgacuuucgcucggacgagaucgaacaucuugucguggaggaguuggucaggaaaagagaggagugucuggaugcccuagaguccaucaugacuaccaagucggugaguuuuagacgucucagccacuugagaaaacuugucccuggguuuggaaaagcauacaccauauucaacaaaacccugauggaagcugaugcucacuacaagucggucaggaccuggaacgagaucauccccuccaaggggugucugagaguuggagggaggugucauccccauguaaacggaguguuuuuuaacggcauaauacugggcccugacggccauguucugaucccagagaugcaaucaucccuccuucagcaacauauggaguuguuggaaucaucaguuaucccucugaugcauccuuuagcagacccgucuacaguuuucaaggacggugaugaagcagaggauuuuguugagguucaccuucccgaugugcacaaacaaaucucagggguugaccugggucucccuaacuggggaaaguacgucuuaauaauugcagggguauugauugccaugauauugacaaucuucuuaaugacauguuguggaagagguaaucgacccaaguccacacaacacagucuuggaggaauagggaggaaggugucagccacuucccaaagcgggaaggucauauccucgugggagucauauaaaagcgggggugagaccagacuauga

SEQ ID NO: 63483 - RNA, 1575 nt, Artificial Sequence
  derived and/or modified CDS sequence (wt) from glycoprotein__RABV__KC792175.1
augguuccucaagcucuuuuguuugugccccuucuggcuuuuccaauguguuucgggaaauuccccaucuacacaauaccagacaaacuuggucccuggagcccgauugacauacaucaucucagcuguccaaauaacuugguuguggaagacgaaggauguaccaacuugucggguuucuccuacauggaacuuaaagugggauacauuucggccauaaaagugaacggguucacgugcacaggugugguuacagaggcugagacuuacacuaacuucgucgguuauguuaccaccacguucaagagaaagcauuuccgcccaacaccagaugcaugucgagcugcuuacaacuggaaaauggccggugaccccagauaugaagaaucucuucauaauccguacccugacuaccauuggcuucgaaccgugaaaaccacgaaggagucucucaucaucauauccccaaguguagcagaccuagauccauaugacaaaucccuucacucgagggucuuuccuagcgggaagugcuugggaauaacaauaucaucuaccuacugcucgacuaaccaugauuacaccaucuggaugcccgagaaucugagauuagggacaucuugugacaucuuuaccaauaguagagggaagagagcauccaaagggagcaagacuugcggauuuguugaugaaagaggcuuguauaagucuuugaaggggucaugcaagcucaaauuaugugggguucuaggacuuagacuuauggacggaacgugggucgcgaugcaaacgucggaugagaccaaguggugucccccugaucaguugguaaaucuacacgacuuucgcucggacgagaucgaacaucuugucguggaggaguuggucaagaaaagagaggagugucuggaugcccuagaguccaucaugacuaccaagucggugaguuuuagacgucucagccacuugagaaaacuugucccuggguuuggaaaagcauacaccauauucaacaaaacccugauggaagcugaugcucacuacaagucagucaggaccuggaacgagaucauccccuccaaggggugucuuagaguuggagggaggugucauccccauguaaacggaguguuuuuuaacggcauaauacugggcccugacggccauguucugaucccagagaugcaaucaucccuccuucagcaacauauggaguuguuggaaucaucaguuaucccucugaugcauccuuuagcagacccgucuacaguuuucaaggacggugaugaagcagaggauuuuguugagguucaccuucccgaugugcacaaacaaaucucagggguugaccugggucucccuaacuggggaaaguacgucuuaauaauugcagggguauugauugccaugauauugacaaucuucuuaaugacauguuguagaagaggcaaucgacccaaguccacacaacacagucuuggaggaauagggaggaaggugucagccacuucccaaagcgggaaggucauauccucgugggagucauauaaaagcgggggugagaccagacuauga

SEQ ID NO: 63484 - RNA, 1575 nt, Artificial Sequence
  derived and/or modified CDS sequence (wt) from glycoprotein__RABV__KC792176.1
augguuccucaagcucuuuuguuugugccccuucuggcuuuuccaauguguuucggaaaauuccccaucuacacaauaccagacaaacuuggucccuggagcccgauugacauacaucaucucagcuguccaaauaacuugguuguggaagacgaaggaugcaccaacuugucggguuucuccuacauggaacuuaaggugggauacauuucggccauaaaagugaacggguucacgugcacagguguggugacagaggcugagaccuacacuaacuuugucgguuauguuaccaccacguuuaagagaaagcauuuccgcccaacaccagaugcauguagagcugcuuacaacuggaaaauggccggugaucccagauaugaagaaucucuucauaauccguacccugacuaccauuggcuucgaaccgugaaaaccacgaaggagucucucaucaucauauccccaaguguagcagaccuagacccauaugacaaaucccuucacucgaaggucuuuccuagcgggaagugcuugggaauaacaauaucaucuaccuacugcucgacuaaccaugauuacaccaucuggaugcccgagaaugugagauuagggacaucuugugacaucuuuaccaacaguagagggaagagagcauccaaagggagcaagacuuguggauuuguugacgaaagaggcuuguauaagucuuugaagggggcaugcaagcucaaauuauguggaguucugggacuuagacuuauggacggaacgugggucgcgaugccaacaucggaugagaccaaguggugucccccugaucaguugguaaaucuacacgacuuucgcucggacgagaucgaacauauugucguggaggaguuggucaggaaaagagaggagugucuggaugcccuagaguccaucaugacuaccaagucggugaguuuuagacgucuaagccacuugagaaaacuugucccuggauucggaaaagcauacaccauauucaacaaaacccugauggaagccgaugcucacuacaagucaguccggaccuggaaugagaucauccccuccaaggggugucugagaguuggagggaggugucauccccauguaaacggaguguuuuuuaacggcauaauacugggcccugacggccauguucuaaucccagagaugcaaucaucccuccuucagcaacauauggaguuguuggaaucaucaguuaucccucugaugcauccuuuagcagacccgucuacaguuuucaaggacggugaugaagcagaggauuuuguugagguucaccuucccgaugugcacaaacagaucucagggguugaccugggucucccuaacuggggaaaguaugucuuaauaauugcagggguauugauugccaugauauugacaaucuucuuaaugacauguuguggaagagguaaucgacccaaguccacacaacacagucuuggagggauagggaggaaggugucauccacuucccaaagcgggaaggucauaucuucgugggagucauauaaaagcgggggugagaccagacuguga

SEQ ID NO: 63485 - RNA, 1575 nt, Artificial Sequence
  derived and/or modified CDS sequence (wt) from glycoprotein__RABV__KC792177.1
augguuccucaagcucuuuuguuugugccccuucuggcuuuuccaauguguuucgggaaauuccccaucuacacaauaccagacaaacuuggucccuggagcccgauugacauacaucaucucagcuguccaaauaacuugguuguggaagacgaaggaugcaccaacuugucggguuucuccuacauggaacuuaaggugggauacauuucggccauaaaagugaacggguucacgugcacggguguggugacagaggcugagacuuacacuaacuuugucgguuauguuaccaccacguuuaagagaaagcauuuccgcccaaccccagaugcauguagagcugcuuacaacuggaaaauggccggugaucccagauacgaagaaucucuucauaauccguacccugacuaccauuggcuucgaaccgugaaaaccacgaaggagucucucaucaucauauccccaaguguagcagaccuagacccauaugacaaaucccuucacucgagggucuuuccuagcgggaagugcuugggaauaacaauaucaucuaccuacugcucgacuaaccaugauuacaccaucuggaugcccgagaaugugagauuagggacaucuugugacaucuuuaccaacaguagagggaagagagcauccaaagggagcaagacuugcggauuuguugacgaaagaggcuuguauaagucuuugaagggggcaugcaagcucaaauuauguggaguucugggacuuagacuuauggacggaacgugggucgcgaugccgacaucggaugagaccaaguggugucccccugaucaguugguaaaucuacacgacuuucgcucggacgagaucgaacaucuugucguggaggaguugguuaggaaaagagaggagugucuggaugcccucgaguccaucaugacuaccaagucggugaguuuuagacgucucagccacuugagaaaacuugucccuggauucggaaaggcauacaccauauucaacaaaacccugauggaggcugaugcucacuacaagucaguccggaccuggaaugagaucauccccuccaaggggugucugagaguuggagggaggugucauccccauguaaacggaguguuuuuuaacggcauaauacugggcccugacggucauguucugaucccagagaugcaaucaucccuccuucaacaacauauggaguuguuggaaucaucaguuaucccucugaugcauccuuuagcagacccgucuacaguuuucaaggacggugaugaagcagaggauuuuguugagguucaccuucccgaugugcacaaacagaucucagggguugaccugggucucccuaauuggggaaaguaugucuuaauaauugcagggguauugauugccaugauauugacaaucuucuuaaugacauguuguggaagagguaaucaacccagguccacacaacacagucuuggagggauagggaggaaggugucauccacuucccaaagcgggaaggucauaucuucgugggagucauauaaaagcgggggugagaccagacuguga

SEQ ID NO: 63486 - RNA, 1575 nt, Artificial Sequence
  derived and/or modified CDS sequence (wt) from glycoprotein__RABV__KC792178.1
augguuccucaagcucuuuuguuugugccccuucuggcuuuuccaauguguuucgggaaauuccccaucuacacaauaccagacaaacuuggucccuggagcccgauugacauacaucaucucagcuguccaaauaacuugguuguggaagacgaaggaugcaccaacuugucggguuucuccuacauggaacuuaaggugggauacauuucggccauaaaagugaacggguucacgugcacagguguggugacagaggcugagacuuacacuaacuuugucgguuauguuaccaccacguuuaagagaaagcauuuccgcccaacaccagaugcauguagagcugcuuacaacuggaaaauggccggugaucccagauaugaagaaucucuucauaauccguacccugacuaccauuggcuucgaaccgugaaaaccacgaaggagucucucaucaucauauccccaaguguagcggaccuagacccauaugacaaaucccuucacucgagggucuuuccuagcgggaagugcuugggaauaacaauaucaucuaccuacugcucgacuaaccaugauuacaccaucuggaugcccgagaaugugagauuagggacaucuugugacaucuuuaccaacaguagagggaagagagcauccaaagggagcaagacuugcggauuuguugacgaaagaggcuuguauaagucuuugaagggggcaugcaagcucaaauuauguggaguucugggacuuagacuuauggacggaacgugggucgcgaugccaacaucagaugagaccaaguggugucccccugaucaguugguaaaucuacacgacuuucgcucggacgagaucgaacaucuugucguggaggaguuggucaggaaaagagaggagugucuggaugcccuagaguccaucaugacuaccaagucggugaguuuuagacgucucagccacuugagaaaacuugucccuggauucggaaaagcauacaccauauucaacaaaacccugauggaggcugaugcucacuacaagucaguccggaccuggaaugagaucauccccuccaaggggugucugagaguuggagggaggugucauccccauguaaacggaguguuuuuuaacggcauaauacugggcccugacggucauguucugaucccagagaugcaaucaucccuccuucagcaacauauggaguuguuggaaucaucaguuaucccucugaugcauccuuuagcagacccgucuacaguuuucaaggacggugaugaagcagaggauuuuguugagguucaccuucccgaugugcacaaacagaucucagggguugaccugggucucccuaauuggggaaaguaugucuuaauaauugcagggguauugaucgccaugauauugacaaucuucuuaaugacauguuguggaagagguaaucggcccaaguccacacaacacagucuuggagggauagggaggaaggugucauccacuucccaaagcgggaaggucauaucuucgugggagucauauaaaagcgggggugagaccagacuguga

SEQ ID NO: 63487 - RNA, 1575 nt, Artificial Sequence
  derived and/or modified CDS sequence (wt) from glycoprotein__RABV__KC792179.1
auggucccucaagcucuuuuguuugugccccuucuggcuuuuccaauguguuucgggaaauuccccaucuacacaauaccagacaaacuuggucccuggaguccgauugacauacaucaucucagcuguccaaauaacuugguuguggaggacgaaggaugcacaaacuugucggguuucuccuacauggaacuuaaagugggauacauuucggccauaaaagugaacggguucacgugcacagguguggugacagaggcugagacuuacacuaauuuugucgguuauguuaccaccacguucaggagaaagcauuuccgcccaacaccagaugcgugucgagcugcuuacaacuggaaaauagccggugaccccagauaugaagaaucucuucauaauccguacccugacuaccauuggcuucgaaccgugaaaacaacgaaggagucucucaucaucauauccccaaguguagcagaccuagacccauaugacaaaucccuucacucgagggucuuuccuagcgggaagugcuugggaauaacaauaucaucuaccuacugcucgacuaaccaugauuacaccaucuggaugcccgagaaucugagauuagggacaucuugugacaucuuuaccaauaguagagggaagagagcauccaaagggagcaggacuugcggauuuguugacgaaagaggcuuguauaagucuuugaagggggcaugcaagcuuaaauuaugugggguucugggacuuagacuuauggacggaacaugggucgcgaugcaaacaucggaugagaccaaguggugucccccugaucaguugguaaaucugcacgacuuucgcucagacgagaucgaacaucuugucguggaggaguuggucaagaaaagagaggagugucuggaugcccuagaguccaucaugacuaccaagucggugaguuuuagacgucucagccacuugagaaaacuugucccuggguucggaaaagcauacaccauauucaacaaaacccugauggaagcugaugcucacuacaagucaguccggaccuggaaugagauuauccccuccaaggggugucugagaguuggggggagaugucauccccaugucaacggaguguuuuuuaacggcauaauauuaggcccugacggccauguucugaucccagagaugcaaucaucccuccuucagcaacauauggaguuguuggaaucgucaguuaucccucugaugcauccuuuggcagacccgucuacaguuuucaaggacggugaugaagcagaggauuuuguugagguucaccuucccgaugugcacaaacaaaucucagggguugaccugggucucccuaacuggggaaaguaugucuuaauaauugcagggguauugauugccaugauauugacaaucuucuuaaugacauguuguggaagagguaaucgacccaaguccacacaacacagucuuggagggauagggaggaaggugucagccacuucccaaagcgggaaggucauaucuucgugggagucauauaaaaacgggggugagacuagacuguga

SEQ ID NO: 63488 - RNA, 1575 nt, Artificial Sequence
  derived and/or modified CDS sequence (wt) from glycoprotein__RABV__KC792180.1
augguuccucaagcucuuuuguuugugccccuucuggcuuuuccaauguguuucggaaaauuccccaucuacacaauaccagacaaacuuggucccuggagcccgauugacauacaucaucucagcuguccaaauaacuugguuguggaagacgaaggaugcaccaacuugucggguuucuccuacauggaacuuaaggugggauacauuucggccauaaaagugaacggguucacgugcacagguguggugacagaggcugagaccuacacuaacuuugucgguuauguuaccaccacguuuaagagaaagcauuuccgcccaacaccagaugcauguagagcugcuuacaacuggaaaauggccggugaucccagauaugaagaaucucuucauaauccguacccugacuaccauuggcuucgaaccgugaaaaccacgaaggagucucucaucaucauauccccaaguguagcagaccuagacccauaugacaaaucccuucacucgaaggucuuuccuagcgggaagugcuugggaauaacaauaucaucuaccuacugcucgacuaaccaugauuacaccaucuggaugcccgagaaugugagauuagggacaucuugugacaucuuuaccaacaguagagggaagagagcauccaaagggagcaagacuuguggauuuguugacgaaagaggcuuguauaagucuuugaagggggcaugcaagcucaaauuauguggaguucugggacuuagacuuauggacggaacgugggucgcgaugccaacaucggaugagaccaaguggugucccccugaucaguugguaaaucuacacgacuuucgcucggacgagaucgaacauauugucguggaggaguuggucaggaaaagagaggagugucuggaugcccuagaguccaucaugacuaccaagucggugaguuuuagacgucuaagccacuugagaaaacuugucccuggauucggaaaagcauacaccauauucaacaaaacccugauggaagccgaugcucacuacaagucaguccggaccuggaacgagaucauccccuccaaggggugucugagaguuggagggaggugucauccccauguaaacggaguguuuuuuaacggcauaauacugggcccugacggccauguucuaaucccagagaugcaaucaucccuccuucagcaacauauggaguuguuggaaucaucaguuaucccucugaugcauccuuuagcagacccgucuacaguuuucaaggacggugaugaagcagaggauuuuguugagguucaccuucccgaugugcacaaacagaucucagggguugaccugggucucccuaacuggggaaaguaugucuuaauaauugcagggguauugauugccaugauauugacaaucuucuuaaugacauguuguggaagagguaaucgacccaaguccacacaacacagucuuggagggauagggaggaaggugucauccacuucccaaagcgggaaggucauaucuucgugggagucauauaaaagcgggggugagaccagacuguga

SEQ ID NO: 63489 - RNA, 1575 nt, Artificial Sequence
  derived and/or modified CDS sequence (wt) from glycoprotein__RABV__KC792181.1
augguuccucaagcucuuuuguuugugccccuucuggcuuuuccaauguguuucggaaaauuccccaucuacacaauaccagacaaacuuggucccuggagcccgauugacauacaucaucucagcuguccaaauaacuugguuguggaagacgaaggaugcaccaacuugucggguuucuccuacauggagcuuaaggugggauacauuucggccauaaaagugaacggguucacgugcacagguguggugacagaggcugagaccuacacuaacuuugucgguuauguuaccaccacguuuaagagaaagcauuuccgcccaacaccagaugcauguagagcugcuuacaacuggaaaauggccggugaucccagauaugaagaaucucuucauaauccguacccugacuaccauuggcuucgaaccgugaaaaccacgaaggagucucucaucaucauauccccaaguguagcagaccuagacccauaugacaaaucccuucacucgagggucuuuccuagcgggaagugcuugggaauaacaauaucaucuaccuacugcucgacuaaccaugauuacaccaucuggaugcccgagaaugugagauuagggacaucuugugacauuuuuaccaacaguagagggaagagagcauccaaagggagcaagacuuguggauuuguugacgaaagagguuuguauaagucuuugaagggggcaugcaagcucaaauuauguggaguucugggacuuagacuuauggacggaacgugggucgcgaugccaacaucggaugagaccaaguggugucccccugaucaguugguaaaucuacacgacuuucgcucggacgagaucgaacaucuugucguggaggaguuggucaggaaaagagaggagugucuggaugcccuagaguccaucaugacuaccaagucggugaguuuuagacgucuaagccacuugagaaaacuugucccuggauucggaaaagcauacaccauauucaacaaaacccugauggaagccgaugcucacuacaagucaguccggaccuggaaugagaucauccccuccaaggggugucugagaguuggagggaggugucauccccauguaaacggaguguuuuuuaacggcauaauacugggcccugacggccauguucuaaucccagagaugcaaucaucccuccuucagcaacauauggaguuguuggaaucaucaguuaucccucugaugcauccuuuagcagacccguccacaguuuucaaggacggugaugaagcagaggauuuuguugagguucaccuucccgaugugcacaaacagaucucagggguugaccugggucucccuaacuggggaaaguaugucuuaauaauugcagggguauugauugccaugauauugacaaucuucuuaaugacauguuguggaagagguaaucgacccaaguccacacaacacagucuuggagggauagggaggaaggugucauccacuucccaaagcgggaaggucauaucuucgugggagucauauaaaagcgggggugagaccagacuguga

SEQ ID NO: 63490 - RNA, 1575 nt, Artificial Sequence
  derived and/or modified CDS sequence (wt) from glycoprotein__RABV__KC792182.1
auggucccucaagcucuuuuguuugugccccuucuggcuuuuccaauguguuucgggaaauuccccaucuacacaauaccagacaaacuuggucccuggagcccgauugacauacaucaucucagcuguccaaauaacuugguuguggaggacgaaggaugcacaaacuugucggguuucuccuacauggaacuuaaagugggauacauuucggccauaaaagugaacggguucacgugcacagguguggugacagaggcugagacuuacacuaauuuugucgguuauguuaccaccacguucaggagaaagcauuuccgcccaacaccagaugcgugucgagcugcuuacaacuggaaaauagccggugaccccagauaugaagaaucucuucauaauccguacccugacuaccauuggcuucgaaccgugaaaacaacgaaggagucucucaucaucauauccccaaguguagcagaccuagacccauaugacaaaucccuucacucgagggucuuuccuagcgggaagugcuugggaauaacaauaucaucuaccuacugcucgacuaaccaugauuacaccaucuggaugcccgagaaucugagauuagggacaucuugugacaucuuuaccaauaguagagggaagagagcauccaaagggagcaggacuugcggauuuguugacgaaagaggcuuguauaagucuuugaagggggcaugcaagcuuaaauuaugugggguucugggacuuagacuuauggacggaacaugggucgcgaugcaaacaucggaugagaccaaguggugucccccugaucaguugguaaaucugcacgacuuucgcucagacgagaucgaacaucuugucguggaggaguuggucaagaaaagagaggagugucuggaugcccuagaguccaucaugacuaccaagucggugaguuuuagacgucucagccacuugagaaaacuugucccuggguucggaaaagcauacaccauauucaacaaaacccugauggaagcugaugcucacuacaagucaguccggaccuggaaugagauuauccccuccaaggggugucugagaguuggggggagaugucauccccaugucaacggaguguuuuuuaacggcauaauauuaggcccugacggccauguucugaucccagagaugcaaucaucccuccuucagcaacauauggaguuguuggaaucgucaguuaucccucugaugcauccuuuggcagacccgucuacaguuuucaaggacggugaugaagcagaggauuuuguugagguucaccuucccgaugugcacaaacaaaucucagggguugaccugggucucccuaacuggggaaaguaugucuuaauaauugcagggguauugauugccaugauauugacaaucuucuuaaugacauguuguggaagagguaaucgacccaaguccacacaacacagucuuggagggauagggaggaaggugucagccacuucccaaagcgggaaggucauaucuucgugggagucauauaaaaacgggggugagacuagacuguga

SEQ ID NO: 63491 - RNA, 1575 nt, Artificial Sequence
  derived and/or modified CDS sequence (wt) from glycoprotein__RABV__KC792183.1
augguuccucaagcucuuuuguuugugccccuucuggcuuuuccaauguguuucggaaaauuccccaucuacacaauaccagacaaacuuggucccuggagcccgauugacauacaucaucucagcuguccaaauaacuugguuguggaagacgaaggaugcaccaacuugucggguuucuccuacauggaacuuaaggugggauacauuucggccauaaaagugaacggguucacgugcacagguguggugacagaggcugagaccuacacuaacuuugucgguuauguuaccaccacguuuaagagaaagcauuuccgcccaacaccagaugcauguagagcugcuuacaacuggaaaauggccggugaucccagauaugaagaaucucuucauaauccguacccugacuaccauuggcuucgaaccgugaaaaccacgaaggagucucucaucaucauauccccaaguguagcagaccuagacccauaugacaaaucccuucacucgagggucuuuccuagcgggaagugcuugggaauaacaauaucaucuaccuacugcucgacuaaccaugauuacaccaucuggaugcccgagaaugugagauuagggacaucuugugacaucuuuaccaacaguagagggaagagagcauccaaagggagcaagacuuguggauuuguugacgaaagaggcuuguauaagucuuugaagggggcaugcaagcucaaauuauguggaguucugggacuuagacuuauggacggaacgugggucgcgaugccaacaucggaugagaccaaguggugucccccugaucaguugguaaaucuacacgacuuucgcucggacgagaucgaacaucuugucguggaggaguuggucaggaaaagagaggagugucuggaugcccuagaguccaucaugacuaccaagucggugaguuuuagacgucuaagccacuugagaaaacuugucccuggauucggaaaagcauacaccauauucaacaaaacccugauggaagccgaugcucacuacaagucaguccggaccuggaaugagaucauccccuccaaggggugucugagaguuggagggaggugucauccccauguaaacggaguguuuuuuaacggcauaauacugggcccugacggccauguucuaaucccagagaugcaaucaucccuccuucagcaacauauggaguuguuggaaucaucaguuaucccucugaugcauccuuuagcagacccgucuacaguuuucaaggacggugaugaagcagaggauuuuguugagguucaccuucccgaugugcacaaacagaucucagggguugaccugggucucccuaacuggggaaaguaugucuuaauaauugcagggguauugauugccaugauauugacaaucuucuuaaugacauguuguggaagagguaaucgacccaaguccacacaacacagucuuggagggauagggaggaaggugucauccacuucccaaagcgggaaggucauaucuucgugggagucauauaaaagcgggggugagaccagacuguga

SEQ ID NO: 63492 - RNA, 1575 nt, Artificial Sequence
  derived and/or modified CDS sequence (wt) from glycoprotein__RABV__KC792184.1
augguuccucaagcucuuuuguuugugccccuucuggcuuuuccaauguguuucgggaaauuccccaucuacacaauaccagacaaacuuggccccuggagcccgauugacauacaucaucucagcuguccaaauaacuugguuguggaagacgaaggaugcaccaacuugucggguuucuccuacauggaacuuaaagugggauacauuucggccauaaaagugaacggguucacgugcacaggugugguuacagaggcugagacuuacacuaacuucgucgguuauguuaccaccacguucaagagaaagcauuuccgcccaacaccagaugcaugucgagcugcuuacaacuggaaaauggccggugaccccagauaugaagaaucucuucauaauccguacccugacuaccauuggcuucgaacagugaaaacuacgaaggagucucucaucaucauauccccaaguguagcagaccuagauccauaugacaaaucccuucacucgagggucuuuccuagcgggaagugcuugggaauaacaauaucaucuaccuacugcucgacuaaccaugauuacaccaucuggaugcccgagaaucugagauuagggacaucuugugacaucuuuaccaauaguagagggaagagagcauccaaagggagcaagacuugcggauuuguugacgaaagaggcuuguauaagucuuugaaggggucaugcaagcucaaauuaugugggguucuaggacuuagacuuauggacggaacgugggucgcgaugcaaacaucggaugagaccaaguggugucccccugaucaguugguaaaucuacacgacuuucgcucagacgagaucgaacaucuugucguggaggaguuggucaagaaaagagaggagugucuggaugcccuagaguccaucaugacuaccaagucggugaguuuuagacgucucagccacuugagaaaacuugucccuggguuuggaaaagcauacaccauauucaacaaaacccugauggaagcugaugcucacuacaagucggucaggaccuggaacgagaucauccccuccaaggggugucugagaguuggagggaggugucauccucauguaaacggaguguuuuuuaacggcauaauacugggcccugacggccauguucugaucccagagaugcaaucaucccuccuucagcaacauauggaguuguuggaaucaucaguuaucccucugaugcauccuuuagcagacccgucuacaguuuucaaggacggugaugaagcagaggauuuuguugagguucaccuucccgaugugcacaaacaaaucucagggguugaccugggucucccuaacuggggaaaguacgucuuaauaauugcagggguauugauugccaugauauugacaauccucuuaaugacauguuguggaagagguaaucgacccaaguccacacaacacagucuuggaggaauagggaggaaggugucagccacuucccaaagcgggaaggucauauccucgugggagucauauaaaagcgggggugagaccagacuauga

SEQ ID NO: 63493 - RNA, 1575 nt, Artificial Sequence
  derived and/or modified CDS sequence (wt) from glycoprotein__RABV__KC792185.1
augguuccucaagcucuuuuguuugugccccuucuggcuuuuccaauguguuucgggaaauuccccaucuacacaauaccagacaaacuuggacccuggagcccgauugacauacaucaucucagcuguccaaauaacuugguuguggaagacgaaggaugcaccaacuugucggguuucuccuacauggaacuuaaagugggauacauuucggccauaaaagugaacggguucacgugcacaggugugguuacagaggcugagacuuacacuaacuucgucgguuauguuaccaccacguucaagagaaagcauuuccgcccaacaccagaugcaugucgagcugcuuacaacuggaagauggccggugaccccagauaugaagaaucucuucauaauccguacccugacuaccauuggcuucgaaccgugaaaacuacgaaggagucucucaucaucauauccccaaguguagcagaccuagauccauaugacaaaucccuucacucgagggucuuuccuagcgggaagugcuugggaauaacaauaucaucuaccuacugcucgacuaaccaugauuacaccaucuggaugcccgagaaucugagauuagggacaucuugugacaucuuuaccaauaguagagggaagagagcauccaaagggagcaagacuugcggauuuguugacgaaagaggcuuguauaagucuuugaaggggucaugcaagcucaaauuaugugggguucuaggacuuagacuuauggacggaacgugggucgcgaugcaaacaucggaugagaccaaguggugucccccugaucaguugguaaaucuacacgacuuucgcucggacgagaucgaacaucuugucguggaggaguuggucaagaaaagagaggagugucuggaugcccuagaguccaucaugacuaccaagucggugaguuuuagacgucucagccacuugagaaaacuugucccuggguuuggaaaagcauacaccauauucaacaaaacccugauggaagcugaugcucacuacaagucggucaggaccuggaacgagaucauccccuccaaggggugucugagaguuggagggaggugucauccucauguaaacggaguguuuuuuaacggcauaauacugggcccugacggccauguucugaucccagagaugcaaucaucccuccuucagcaacauauggaguuguuggaaucaucaguuaucccucugaugcauccuuuagcagacccgucuacaguuuucaaggacggugaugaagcagaggauuuuguugagguucaccuucccgaugugcacaaacaaaucucagggguugaccugggucucccuaacuggggaaaguacgucuuaauaauugcagggguauugauugccaugauauugacaaucuucuuaaugacauguuguggaagagguaaucgacccaaguccacacaacacagucuuggaggaauagggaggaaggugucagccacuucccaaagcgggaaggucauauccucgugggagucauauaaaagcgggggugagaccagacuauga

SEQ ID NO: 63494 - RNA, 1575 nt, Artificial Sequence
  derived and/or modified CDS sequence (wt) from glycoprotein__RABV__KC792186.1
augguuccucaagcucuuuuguuugugccccuucuggcuuuuccaauguguuucggaaaauuccccaucuacacaauaccagacaaacuuggucccuggagcccgauugacauacaucaucucagcuguccaaauaacuugguuguggaagacgaaggaugcaccaacuugucggguuucucauacauggaacuuaaggugggauacauuucggccauaaaagugaacggguucacgugcacagguguggugacagaggcugagaccuacacuaacuuugucgguuauguuaccaccacguuuaagagaaagcauuuccgcccaacaccagaugcauguagagcugcuuacaacuggaaaauggccggugaucccagauaugaagaaucucuucauaauccguacccugacuaccauuggcuucgaaccgugaaaaccacgaaggagucucucaucaucauauccccaaguguagcagaccuagacccauaugacaaaucccuucacucgagggucuuuccuagcgggaagugcuugggaauaacaauaucaucuaccuacugcucgacuaaccaugauuacaccaucuggaugcccgagaaugugagauuagggacaucuugugacauuuuuaccaacaguagagggaagagagcauccaaagggagcaagacuuguggauuuguugacgaaagaggcuuguauaagucuuugaagggggcaugcaagcucaaauuauguggaguucugggacuuagacuuauggacggaacgugggucgcgaugccaacaucggaugagaccaaguggugucccccugaucaguugguaaaucuacacgacuuucgcucugacgagaucgaacaucuugucguggaggaguuggucaggaaaagagaggagugucuggaugcccuagaguccaucaugacuaccaagucggugaguuuuagacgucuaagccacuugagaaaacuugucccuggauucggaaaagcauacaccauauucaacaaaacccugauggaagccgaugcucacuacaagucaguccggaccuggaaugagaucauccccuccaaggggugucugagaguuggagggaggugucauccccauguaaacggaguguuuuuuaacggcauaauacugggcccugacggccauguucuaaucccagagaugcaaucaucccuccuucagcaacauauggaguuguuggaaucaucaguuaucccucugaugcauccuuuagcagacccguccacaguuuucaaggacggugaugaagcagaggauuuuguugagguucaccuucccgaugugcacaaacagaucucagggguugaccugggucucccuaacuggggaaaguaugucuuaauaauugcagggguauugauugccaugauauugacaaucuucuuaaugacauguuguggaagagguaaucgacccaaguccacacaacacagucuuggagggauagggaggaaggugucauccacuucccaaagcgggaaggucauaucuucgugggagucauauaaaagcgggggugagaccagacuguga

SEQ ID NO: 63495 - RNA, 1575 nt, Artificial Sequence
  derived and/or modified CDS sequence (wt) from glycoprotein__RABV__KC792187.1
auggucccucaagcucuuuuguuugugccccuucuggcuuuuccaauguguuucgggaaauuccccaucuacacaauaccagacaaacuuggucccuggaguccgauugacauacaucaucucagcuguccaaauaacuugguuguggaggacgaaggaugcacaaacuugucggguuucuccuacauggaacuuaaagugggauacauuucggccauaaaagugaacggguucacgugcacagguguggugacagaggcugagacuuacacuaauuuugucgguuauguuaccaccacguucaggagaaagcauuuccgcccaacaccagaugcgugucgagcugcuuacaacuggaaaauagccggugaccccagauaugaagaaucucuucauaauccguacccugacuaccauuggcuucgaaccgugaaaacaacgaaggagucucucaucaucauauccccaaguguagcagaccuagacccauaugacaaaucccuucacucgagggucuuuccuagcgggaagugcuugggaauaacaauaucaucuaccuacugcucgacuaaccaugauuacaccaucuggaugcccgagaaucugagauuagggacaucuugugacaucuuuaccaauaguagagggaagagagcauccaaagggagcaggacuugcggauuuguugacgaaagaggcuuguauaagucuuugaagggggcaugcaagcuuaaauuaugugggguucugggacuuagacuuauggacggaacaugggucgcgaugcaaacaucggaugagaccaaguggugucccccugaucaguugguaaaucugcacgacuuucgcucagacgagaucgaacaucuugucguggaggaguuggucaagaaaagagaggagugucuggaugcccuagaguccaucaugacuaccaagucggugaguuuuagacgucucagccacuugagaaaacuugucccuggguucggaaaagcauacaccauauucaacaaaacccugauggaagcugaugcucacuacaagucaguccggaccuggaaugagauuauccccuccaaggggugucugagaguuggagggaggugucauccccaugucaacggaguguuuuuuaacggcauaauauuaggcccugacggccauguucugaucccagagaugcaaucaucccuccuucagcaacauauggaguuguuggaaucgucaguuaucccucugaugcauccuuuggcagacccgucuacaguuuucaaggacggugaugaagcagaggauuuuguugagguucaccuucccgaugugcacaaacaaaucucagggguugaccugggucucccuaacuggggaaaguaugucuuaauaauugcagggguauugauugccaugauauugacaaucuucuuaaugacauguuguggaagagguaaucgacccaaguccacacaacacagucuuggagggauagggaggaaggugucagccacuucccaaagcgggaaagucauaucuucgugggagucauauaaaaacgggggugagacuagacuguga

SEQ ID NO: 63496 - RNA, 1575 nt, Artificial Sequence
  derived and/or modified CDS sequence (wt) from glycoprotein__RABV__KC792188.1
augguuccucaagcucuuuuguuugugccccuucuggcuuuuccaauguguuucgggaaauuccccaucuacacaauaccagacaaacuuggucccuggagcccgauugacauacaucaucucagcuguccaaauaacuugguuguggaagacgaaggaugcaccaacuugucggguuucuccuacauggaacuuaaggugggauacauuucggccauaaaagugaacggguucacgugcacagguguggugacagaggcugagaccuacacuaacuuugucgguuauguuaccaccacguuuaagagaaagcauuuccgcccaacaccagaugcauguagagcugcuuacaacuggaaaauggccggugaucccagauaugaagaaucucuucauaauccguacccugacuaccauuggcuucgaaccgugaaaaccacgaaggagucucucaucaucauauccccaaguguagcagaccuagacccauaugacaaaucccuucacucgagggucuuuccuagcgggaagugcuugggaauaacaauaucaucuaccuacugcucgacuaaccaugauuacaccaucuggaugcccgagaaugugagauuagggacaucuugugacaucuuuaccaacaguagagggaagagagcauccaaagggagcaagacuuguggauuuguugacgaaagaggcuuguauaagucuuugaagggggcaugcaagcucaaauuauguggaguucugggacuuagacuuauggacggaacgugggucgcgaugccaacaucggaugagaccaaguggugucccccugaucaguugguaaaucuacacgacuuucgcucggacgagaucgaacaucuugucguggaggaguuggucaggaaaagagaggagugucuggaugcccuagaguccaucaugacuaccaagucggugaguuuuagacgucuaagccacuugagaaaacuugucccuggauucggaaaagcauacaccauauucaacaaaacccugauggaggccgaugcucacuacaagucaguccggaccuggagugagaucauccccuccaaggggugucugagaguuggagggaggugucauccccauguaaacggaguguuuuuuaacggcauaauacugggcccugacggccauguucuaaucccagagaugcaaucaucccuccuucagcaacauauggaguuguuggaaucaucaguuaucccucugaugcauccuuuagcagacccgucuacaguuuucaaggacggugaugaagcagaggauuuuguugagguucaccuucccgaugugcacaaacagaucucagggguugaccugggucucccuaacuggggaaaguaugucuuaauaauugcagggguauugauugccaugauauugacaaucuucuuaaugacauguuguggaagagguaaucgacccaaguccacacaacacagucuuggagggauagggaggaaggugucauccacuucccaaagcgggaaggucauaucuucgugggagucauauaaaagcgggggugagaccagacuguga

SEQ ID NO: 63497 - RNA, 1575 nt, Artificial Sequence
  derived and/or modified CDS sequence (wt) from glycoprotein__RABV__KC977995.1
augauuccucaaguucuuuuguuuguuccccuucuaguuuucucgucguguuucgggaaauuccccauuuacacaauaccagacaaacuugguccauggagucccaucgauauacaucaucucagcuguccgaacaaucugguuguggaagaugaaggaugcaccaaucugucuggauuuuccuacauggaacucaaaguaggauauauuucagccauaaaagugaacggauucaccuguacagguguagugaccgaagcagaaaccuacacuaacuuuguugguuaugucaccaccacguuuaagagaaagcacuuucgcccuaugccggaugcgugcagagccgcauacaacuggaagauggcuggugaccccagguaugaagagucucugcacaauccguaccccgacuaccacuggcuccgaacugucaagaccaccaaggagucccuugucaucauaucuccgagcguugcagauuuggacccguacgauaaaucccuucacucgagaguuuucccuggcggaaaaugcucaggaauaaccguguccuccacuugcugcucuacuaaccacgacuacaccaucuggaugccugaaaauccuagacugggaacuucaugugacauuuucaccaauaguagagggaagagggccucaaaagggggcaagacuuguggauuuguggaugaaagaggcuuguacaagucucuaaggggagcaugcaagcugaagcuaugugggguucuaggacuuagacuuauggacggaacaugggucgcaauucagacaucagaugagaucaaauggugcucuccugaucagcuaguaaaucuacacgacuuucacucggaugagaucgaacaucuuguuguggaggaguuggucaaaaagagggaagagugucuggacgcacuggagacuauuaugaccacaaaguccgugaguuucagacgucuuagucauuugaggaagcuagucccuggguuuggaaaggcguauaccauauucaacaagaccuugauggaggcugaugcucacuacaaaucaauccggacuuggaaugaaaucauccccuccaaaggguguuuaagaguuggggggagaugucauccucaugugaacgggguguucuucaacggcauuauacuggguccugacggacauguucucaucccagagaugcagucgucccuccuccaccagcauauggaauuguuggaguccucagucaucccuuugaugcaucccuuagcagacccgucaacagucuuuaaagacggcgacgaggcagaggacuuuguugagguucaccuuccggaugugcacaagcagaucucggggguugaucuuggucucccaaacugggggaaguaugugcugauaagugcaggugcucugacugcauuaauguugaugauuuucuuaaugacguguugcagaaagacuaauagagcagagucaauacaacacaguccuggagagacagggaggaaagugucggugacuucucacaacggaagggucacaucuucaugggaaucauauaaaagcggaagugagaccaagcuguga

SEQ ID NO: 63498 - RNA, 1575 nt, Artificial Sequence
  derived and/or modified CDS sequence (wt) from glycoprotein__RABV__KF154996.1
augguuccucagguucuuuuguuuguaccccuucugguuuucucaauguguuucgggaaauuuccuaucuauacgauaccagacaaacuuggucccuggagcccgauugacauacaucaucucagcuguccaaacaaccugguuguggaagaugaaggaugcacuaacuugucggguuucuccuacauggaacuuaaggugggauacaccucggccauaaaaguaaacggguucacgugcacaggugugguaacagaggcagagacuuacacuaacuuugucgguuauguuaccaccacguucaaaagaaagcauuuccgcccaacaccagaugcaugucgagcugcuuacaacuggaagauggcaggugaccccagauaugaagaaucgcugcacaauccguacccugacuaccacuggcuucgaaccguuaaaaccacaaaggagucccucgucaucauauccccaaguguagcggaccuggacccauacgacaaaucccuucauucgagggucuuuccuagcgggaagugcucgggaauaacaauaucaucuacuuacugcucuacuaaccaugauuacacaaucuggaugccugagaauccgagacuggggacaucuugugacaucuuuaccaacaguagagggaagagagcauccaaagggggcaaaacuugcggauuuguugaugaaagaggcuuguauaagucuuugaaaggggcaugcaaacucaaguuguguggaguucucggccuuagacuuauggauggaacguggguugcgaugcaaacaucggacgaaaccaagugguguccuccugaucaguugguaaaucuacacgacuuucgcucggacgagaucgaacaucuuguuguagaggaguuggucaagaaaagagaggagugucuggaugcacuagaguccaucaugacuaccaagucggugaguuucagacgucucagccacuugaggaaacuugucccuggguucggaaaagcauacaccauauucaacaaaaccuugauggaagcagaugcccauuacaagucaguccgaaccuggaaugaaaucauccccuccaaaggguguuugagaguuggagggaggugucauccucacgugaaggggguguuuuuuaacgguauaauacuggguccugacggccauguucuaaucccagaaaugcaaucgucccuccuucagcagcauauggaguuguuggaauccucaguuauuccccugaugcacccuuuggcagacccgucuacaguuuucaaggacggugaugaagcagaggauuuuguugagguucaccuucccgacgugcacaaacaaauuucagguguugaccugggucuccccagcuggggaagguauguuuuggugagugcaggggucuugguuguccugauguugacaauucucauaauaacauguugcggaagaguccaucgacccaaaucuacacaacacggucucggggggacagggaggaaggugucggucacuucccaaagcgggaaggucauaucuucaugggagucauauaagagugggggugagaccagacuguga

SEQ ID NO: 63499 - RNA, 1575 nt, Artificial Sequence
  derived and/or modified CDS sequence (wt) from glycoprotein__RABV__KF154997.1
augguuccucaggcgcuuuuguugguaccccuucuggguuuuucauuguguuucgggaaauucccuauuuacacgauaccagacaaacuugguccuuggagcccgauugauauacaucaucucagcugcccgaacaauuugguuguggaggacgaaggaugcaccaaccugucaggguucuccuacauggagcucaaaguuggauacaucucauccauaaaagugaacggguuuacuugcacgggcguugugacagaggcagaaaccuacacuaacuuuguugguuaugucaccaccacguucagaagaaagcauuuccguccaacaccagaugcauguagagccgcauacaacuggaagauggcaggugacccucgauaugaggagucucuacacaacccguacccugacuaccauuggcuucgaacugugaaaaccaccaaggagucucucguuaucauauccccaaguguggcagauuuggacccauaugacaaaucccuucacucgagggucuucccuaguggaaagugcucaggaauaacggugucuucuaccuacugcucaacuaaccacgauuacaccauuuggaugcccgaaaaucugagacugggaacgucuugugacauuuuuaccaauaguagagggaagagggcauccaaggggaguaagacuugcggcuuuguagaugagagaggccuguauaagucgcuaaaaggagcaugcaaacucaaguuauguggaguucuuggacuucgacuuauggauggaacauggguugcgaugcaaacaucagaugagaccaaauggugccccccugaucaguuggugaauuugcacgacuuucgcucggaugaaauugagcaucuuguuguagaagaguuagucaagaaaagagaggagugucuggaugcacuagaguccaucaugaccaccaagucagugaguuucagacgucucagucauuuaagaaagcuuguuccuggauuuggaaaagcauauaccauauucaauaagaccuugauggaggcugaugcucacuacaagucgguccggaccuggaaugaggucauccccucaagaggguguuuaagaguuggggggaggugucauccucaugugaacgggguguuuuucaaugguauaauauuagggccugacggccauguucuaaucccagagaugcaaucaucccuccuccagcaacauauagaguuguuggaauccucgguuauuccccugaugcacccccuggcagacccauccacaguuuucaaagacggugaugaagcugaggauuuuguugaaguucaucuucccgaugugcauaaacaggucucuggggucgaccugggccucccaaacugggggaaguauguauuacugagugcaggggcccugauugccuugauguugauaguuuuccuaauaacauguugcagaagagucaaucgaccagaaucuacgcagcgcagucucagaggggcagggaggaaggugucgaucacuucucagagcgggaagguuauaucuucaugggagucauauaagagugggggugagacuagacuguga

SEQ ID NO: 63500 - RNA, 1575 nt, Artificial Sequence
  derived and/or modified CDS sequence (wt) from glycoprotein__RABV__KF154998.1
augguuccucaagcucuuuuguuuguaccccuucuggcuuuuuccuuguguuucggaaaauuucccauuuacacgauaccggacaagcuuggucccuggagcccgauugacauacaucaucucagcuguccaaacaacuugguuguagaggacgaaggaugcaccaaccugucggaguucuccuacauggaacuuaaaaugggauacaucucagccauaaaagugaacggguucacuugcacaggcguugugacagaggcagaaaccuacaccaauuuuguggguuauguuacaaccacauucaaaagaaagcauuuccgcccgacccccgaugcauguagagccgcguacaacuggaagauggcaggugacccaagauaugaggaaucucuacacaauccguacccugauuaccauuggcuccggacugugaaaaccacaaaagagucucucauuaucauauccccgaguguggcagauuuggacccauacgacaaaucccuucacucgagggucuucccuagcggaaagugcucgggaauaacggugucuucuaccuacugcucaacuaaccaugauuacaccauuuggaugcccgagaauccgagaccagggacgucuugugacauuuuugccaguagcagagggaagagagcauccaaagggggcaagacuugcggcuuuguagaugaaagaggcuuauauaagucucucaaaggagcaugcaaacucaaguuauguggaguucuugggcucagacuuauggauggaacaugggucgcaaugcaaacaucagaugagaccaaauggugccccccugaucaguuggugaaucugcacgacuuucgcucggacgagauugagcaucucgucguggaggaacuggucaagaaaagagaggagugucuggaugcgcuagaguccaucaugaccaccaagucagugaguuucagacgccucagucacuugagaaaacuugucccuggguuuggaaaagcauauacuauauucaacaaaacccugauggaagcugaugcucacuacaagucaguccagacuuggaaugaaauuauccccucaaaaggguguuuaagaguuggagagaggugucauccucaugugaacgggguguuuuuuaaugguauaauacuagggccugacggccauguucuaaucccggaaaugcaaucaucccuccuccagcaacauauggaguuguuggaauccucaguuaucccccuuaugcaucccuuggcagacccgucuacaguuuucaaggacggugaugaggcugaggauuuuguugaaguucaccucccugaugugcauaaacaggucucagggguugaccugggccucccgaacugggggaaguauguauuagugagugcaggggccuugauugccuugauguugauaauuuuccuaauuacauguugcagaagagucaaucgaccagaauauacgcaacgcagucuuggagggacagggaggaaggugucggucaccucccaaagcgggaaggucauaucuucgugggagucauauaaaaguggaggugagaccagacuguga

SEQ ID NO: 63501 - RNA, 1575 nt, Artificial Sequence
  derived and/or modified CDS sequence (wt) from glycoprotein__RABV__KF154999.1
auggucccgcaggcccuuuuguuugugccucuucugguguucucauuguguuucgggaaguuccccauuuacacgauaccagacaagcuugguccauggagucccauugauauacaucaucucagcuguccaaacaaucugguuguagaggaugaaggaugcaccaaccugucaggauucuccuacauggaacucaaaguaggauacaucucagccauaaaagugaacggcuucacuuguacaggugugguuacagaggcagagacuuauacuaacuuuguugguuaugucacuaccacguucagaagaaagcacuuccgcccaacacccgaugcguguagggccgcauacaacuggaaaauggcuggcgaccccagauaugaagagucccugcacaauccauaccccgacuaccauuggcuucggacuguuaaaaccaccaaggagucucuuguuauaauauccccgagcguggcagauuuggacccauaugacaaaucccuucacucgagaguuuuucccggcggaaagugcucaggaauaacaguaucuucuacuuacugcucaacuaaccaugauuacaccaucuggaugccugagaauccaagacucgggacaucuugugacaucuucgucaacagcagagggaagagggcguccaaggggggcaagacuuguggguuuguagaugagagagguuuguauaagucacuaaaaggggcuugcaaacucaaauuguguggggugccuggacuuagacuuauggacggaacgugggucgcgauucagacgucagaugagaccaaauggugccccccugaucaguuaguaaaucuacaugacuuucgcucagaugaaaucgaacaucuugucguggaagagcuggucaagaaaagagaagagugccuagacgcgcuggaguccaucaugaccaccaagucuguaaguuucagacgucucagucaccugaggaaacucgucccuggguuugggaaagcauauacuauauucaacaaaaccuugauggaggcugaugcucacuauaagucgguccggacuuggaaugagaucaucccuucaaaaggguguuugagaguaggaggaagaugucauccucaugugaaugggguauuuuuuaaugguauaauauugggcccugauggccauguucugaucccagagaugcaaucgucccuccuccaacaacacauggaauuguuggaauccucagucauccccuuaaugcauccauuggcagacccgucaacaguuuucaaggauggugaugaggcggaagacuuuguugagguucaccuuccggaugugcacaaacugaucucaggggucgaccuuggucuucccagcugggggaaguauguguugaugagugcagguauucugacaacacugauguugaugaucuucuugaugacuuguugcaggaggguuaaucaagcaggaucaaaacaacaugggcucgaaggggcagggaggaaaguaucugucaccucccagaacgggagggucauauccuccugggagucauauaaaagcggaggugaaaccaggcuguga

SEQ ID NO: 63502 - RNA, 1575 nt, Artificial Sequence
  derived and/or modified CDS sequence (wt) from glycoprotein__RABV__KF155000.1
augguuccucaggcucuuuuguuugugccccuucugguuuuuucauuguguuucgggaaauucccuauuuacacgauaccagacaaacuuggucccuggagcccgauugacauccaucaucucaccuguccaaacaaucugguuguggaggacgaaggaugcaccaaccugucaggguucuccuacauggaacuuaaagucggguacaucucagccauaaaagugaacggguucacaugcacgggcguugugacagaggcagaaaccuacacuaacuuuguugguuaugucaccaccacauuuaaaagaaagcauuuccgcccaacaccagaugcauguagagccgcguacaauuggaaaauggccggugaccccagguaugaggagucucuacacaacccguacccagacuaucauuggcuucgaaccgugaaaaccaccaaggagucucucguuaucauauccccaaguguggcaaauuuggacccauaugacaagucccuucacucgagggucuucccgagcggaaagugcucaggaauaacggugucuucuacauacuguucgacuaaccacgauuacaccauuuggaugccagagaauccgagacuagggacaucuugugacaucuuuaccaauaguagagggaagagagcauccaaagggaguaagaccugcggcuuuguagaugaaagaggccuguauaagucucuaaaaggagcaugcaaacucaaguuauguggaguucuuggacuuagacucauggauggaacguggguugcgaugcagacaucggaugagaccaaauggugcccucccgaucagcuggugaauuugcacgacuuccgcucggaugaaauugagcaucucgucguagaggagcuggucaagaagagagaggagugucuggaugcacuagaguccaucaugaccaccaagucggugaguuucagacgucucagucauuuaagaaagcuugucccuggguuuggaaaagcauacacuauauuuaacaagaccuugauggaggcugaugcucauuacaaaucaguccggacuuggaaugagaucauccccucaaagggguguuugagaguaggagggaggugucauccgcaugugaacgggguguuuuucaaugguauaauauuagggccugacggccauguucuaaucccagagaugcaaucaucccuccuccagcaacauauggaguuauuggaguccucaguuauaccccugaugcacccccuggcagacccguccacaguuuucaaggacggugaugaggcugaggauuuuguugaaguucaccuucccgaugugcacaaacaggucuccgggguugaccugggucucccaaacugggggaaauacguauuacugagugcaggggcucugauugcucugauguugauaauuuuccucaugaccuguuguagaagagucaaucgaccagaaucuacacaacgcagucuuggagggacagggagaaaggugucaguuacuucccaaagcgggaaagucauaucuucaugggagucauauaaaagugggggugagacuagacuguga

SEQ ID NO: 63503 - RNA, 1575 nt, Artificial Sequence
  derived and/or modified CDS sequence (wt) from glycoprotein__RABV__KF155001.1
augguuccucaggcucuuuuguuuguaccccuucugguuuucucauuguguuuugggaaguucccuauuuacacgauaccagacaaacuuggucccuggaguccgauugauauacaucaucucagcugcccaaacaauuugguuguggaggacgaaggaugcaccaaccugucaggguucuccuacauggaacuuaaaguuggauacaucucagccauaaaagugaacggguucacuugcacaggcguugugacagaggcagaaaccuacaccaacuuuguugguuaugucaccaccacguucaagagaaagcauuuccgcccaacaccagacgcauguagagccgcguacaacuggaagauggccggugaucccagauaugaagagucucuacacaauccguacccugacuaccauuggcuucgaacuguaaaaaccacaaaggagucucucguuaucauauccccaaguguggcagauuuggacccauaugacaaaucccuucacucaagggucuucccuagcggaaaaugcucaggaauaacgguaucuucuaccuacugcucaacuaaccacgauuacaccauuuggaugccugagaauccgagacuagggacaucuugugacauuuuuaccaauaguagaggaaagagagcauccaaagggaguaagaccugcggcuuuguagaugaaagaggccuguauaagucucuaaaaggagccugcaagcucaaguuauguggaguucuuggacuuagacuuauggauggaacaugggucgcuaugcaaacaucagaugagaccaaaugguguccucccgaucaguuggugaaucugcacgacuuucgcucggaugaaaucgagcaucuuguuguagaggaguuggucaagaaaagagaggagugucuggaugcacuagaguccaucaugaccaccaagucagugaguuucagacgucucagucauuuaagaaaacuuguuccuggguucggaaaagccuauacuauauucaacaagaccuugauggaggcugaugcucacuacaagucuguucggacuuggaaugagaucauccccuccaaaggguguuuaagaguuggagggaggugucauccucaugugaacgggguguuuuucaaugguauaauauugggaccugacggccauguucuaaucccagagaugcaaucaucccuccuucagcaacauauggaauuauuggaauccucaguuauuccccugaugcacccccuugcagacccguccacaguuuucaaggacggugacgaggcugaggauuuuguagaaguucaccuucccgacgugcacaagcaggucucagggguugaucugggucucccaaacugggggaaguauguauuacugagugcaggaacccugauugccuugauguugauaauuuuucuaaugacauguuguagaagagucaaucgaccaaaaucuaugcagcgcagucucggagagacggggaggaaggugucggucaccucccaaagcgggaaggucauaucuucaugggagucguauaaaagugggggugagacuaggcuguga

SEQ ID NO: 63504 - RNA, 1575 nt, Artificial Sequence
  derived and/or modified CDS sequence (wt) from glycoprotein__RABV__KF155002.1
augguuccucaagcucguuuguuuguaccccuuuugguuuuuccauuguguuucgggaaauucccuaucuacacgauaccagacaaacucggacccuggagcccgauugacauacaucaucucagcugcccaaacaauuugguuguggaggacgaaggaugcaccaaccugucaggguucuccuacauggaacuuaaaguuggauacaucucagccauaaaggugaacggguucacuugcacaggcguugugacagaagcugaaaccuacacuaacuuuguagguuaugucaccaccacguucaaaagaaagcauuuccgcccaauaccagaugcauguagagcugcauacaauuggaagauggccggugaccccagauaugaagagucucuacacaauccauacccugacuaucauuggcuucgaacuguaaaaaccaccaaggagucucucguuaucauauccccgaguguggcggauuuagacccauaugacagaucccuucacucgagggucuucacuggcgggaaaugcucgggaauaacggugucuuccaccuacugcucaacuaaccaugauuacaccauuuggaugccugagaauccgagacuagggacguccugcaacauuuuugccaauaguaaggggaagagagcauccaaaggggguaaaaccugcggcuuuguagaugaaagaggccuguauaagucucuaaagggagcaugcaaacucaaguuauguggaguucuuggacuuagacucauggauggaacauggguugcgaugcaaacaucagaugagaccaaaugguguccuccugaucaguuggugaauaugcacgacuuucgcucggaugaaauugagcaucuugucguagaggaauuggucaagaaaagagaggagugucuggaugcacuagaguccaucaugacuacuaagucagugaguuucagacgucucagucauuuaagaaaacuugucccuggguucggaaaagcauacaccauauucaauaagaccuugauggaggcugaugcucacuacaagucaguccggacuuggaaugagaucauccccucaaaaggguguuuaagaguuggagggaggugucacccucaugugaacgggguguuuuucaaugguauaauauuagggccugacggccauguucuaauccccgagaugcaauccucccuccuucagcaacauauggaguuguuggagucuucaguuauuccccugaugcacccccuggcagacccguccacaguuuucaaggauggugaugaagcugaggauuuuguagagguucaccuuccugaugugcacaaacaggucucggggguugaccugggucucccgaacugggggaaauauguauugcugagugcaggaacccugauugcuuugauguugauaauuuuucuaaugacauguuguagaagagucagucgaccagaaucuacgcaacgcagucucggaaggacagggaggaaggugucggucacuucccaaagcgggaaggucauaucuucaugggagucauauaaaagugggggugagacuagacuguaa

SEQ ID NO: 63505 - RNA, 1575 nt, Artificial Sequence
  derived and/or modified CDS sequence (wt) from glycoprotein__RABV__KF437644.1
augguuccucaggcucuuuuguucguaccucuucugguuuuuucaauguguuucgggaaauuccccaucuacacgauaccagacaaacuugguccuuggagcccaauugacauacaucaucucagcuguccaaacaacuugguuguagaggaugaaggaugcaccaacuugucagguuuuuccuacauggaacuuaaagugggauacauuucggccauaaaagugaacggguucacgugcacagguguggugacagaggcagaaacuuauacuaacuuuguugguuaugucaccacuacguucaaaagaaagcauuuccgcccgacaccggaugcaugucgggccgcuuacaacuggaaaauggccggugaccccagauaugaagaaucucugcacaauccuuacccugacuaccacuggcuucgaacugucaaaaccacgaaggaaucccuagucaucauauccccaaguguagcggaccuggacccauacgauaaaucccuucacucuagagucuuuccuaacggaaagugcucaggaauaacgauauccucuaccuacugcccuaccaaccaugauuacacuaucuggcucccugagaauccaagacuggggacaucuugugacaucuuuaccaauaguagagggaagagagcauccaaagggagcaagacuugcggguuuguugaugaaagagguuuguauaagucauugaaaggggcaugcaaacuuaaguugugugggguccuuggacuuagacuuauggauggaacgugggucgcaaugcaagcgucggacgagaccaaauggugccccccagaucagcugguaaaucuacacgacuuucgcucggacgagaucgaacaucucguuguggaggaguuggucaagaagagagaagagugucuggaugcacuagaguccaucaugacuacuaagucagugaguuucagacgucucagccacuugagaaagcuugucccuggguucggaaaagcauacaccauauucaacaaaaccuugauggaggcugaugcucacuacaagucaguccgaaccuggaaugagaucauccccucaaaaggguguuugagagucggggggaggugucauccucauguaaacgggguguuuuucaacgguauaauccuggguccugauggccauguucuaaucccagagaugcaaucgucccuccuucagcaacauauggaguuguuggaauccucaguuaucccccugaugcacccuuuagcagacccgucuacaguuuucaaggauggugaugaagcagagaauuuuguggagguucaccuuccugauguacacaaacagaucucgggaguugaccugggucucccuaacugggggaaguauguuuuaguaagugcagggguccugaucgccuugauguugauaauuuuucuaaugacauguugcggaagagucaaucgaccagaguccacacaacacaaucuuggcgggacagggagggaggugucaguaacuccccaaagcggaaaggugauaucuucaugggagucauacaaaagcggaggugggaccagacuguga

SEQ ID NO: 63506 - RNA, 1575 nt, Artificial Sequence
  derived and/or modified CDS sequence (wt) from glycoprotein__RABV__KF437645.1
augguuccucaggcucuuuuguucguaccucuucugguuuuuucaauguguuucgggaaauuccccaucuacacgauaccagacaaacuugguccuuggagcccaauugacauacaucaucucagcuguccaaacaacuugguuguagaggaugaaggaugcaccaacuugucagguuuuuccuacauggaacuuaaagugggauacauuucggccauaaaagugaacggguucacgugcacagguguggugacagaggcagaaacuuauacuaacuuuguugguuaugucaccacuacguucaaaagaaagcauuuccgcccgacaccggaugcaugucgggccgcuuacaacuggaaaauggccggugaccccagauaugaagaaucucugcacaauccuuacccugacuaccacuggcuucgaacugucaaaaccacgaaggaaucccuagucaucauauccccaaguguagcggaccuggacccauacgauaaaucccuucacucuagagucuuuccuaacggaaagugcucaggaauaacgauauccucuaccuacugcccuaccaaccaugauuacacuaucuggcucccugagaauccaagacuggggacaucuugugacaucuuuaccaauaguagagggaagagagcauccaaagggagcaagacuugcggguuuguugaugaaagagguuuguauaagucauugaaaggggcaugcaaacuuaaguugugugggguccuuggacuuagacuuauggauggaacgugggucgcaaugcaagcgucggacgagaccaaauggugccccccagaucagcugguaaaucuacacgacuuucgcucggacgagaucgaacaucucguuguggaggaguuggucaagaagagagaagagugucuggaugcacuagaguccaucaugacuacuaagucagugaguuucagacgucucagccacuugagaaagcuugucccuggguucggaaaagcauacaccauauucaacaaaaccuugauggaagcugaugcucacuacaagucaguccgaaccuggaaugagaucauccccucaaaaggguguuugagagucggggggaggugucauccucauguaaacgggguguuuuucaacgguauaauccuggguccugauggccauguucuaaucccagagaugcaaucgucccuccuucagcaacauauggaguuguuggaauccucaguuaucccccugaugcacccuuuagcagacccgucuacaguuuucaaggauggugaugaagcagagaauuuuguggagguucaccuuccugauguacacaaacagaucucgggaguugaccugggucucccuaacugggggaaguauguuuuaguaagugcagggguccugaucgccuugauguugauaauuuuucuaaugacauguugcggaagagucaaucgaccagaguccacacaacacaaucuuggcgggacagggagggaggugucaguaacuccccaaagcggaaaggugauaucuucaugggagucauacaaaagcggaggugggaccagacuguga

SEQ ID NO: 63507 - RNA, 1575 nt, Artificial Sequence
  derived and/or modified CDS sequence (wt) from glycoprotein__RABV__KF437646.1
augguuccucaagcucuuuuguuuguaccucuucugguuuuuucaauguguuucgggaaauuccccaucuacacgauaccagacaaacuugguccuuggagcccaauugacauacaucaucucagcuguccaaacaacuugguuguagaggaugaaggaugcaccaacuugucagguuuuuccuacauggaacuuaaagugggauacauuucggccauaaaagugaacggguucacgugcacagguguggugacagaggcagaaacuuauacuaacuuuguugguuaugucaccacuacguucaaaagaaagcauuuccgcccgacaccggaugcaugucgagccgcuuacaacuggaaaauggccggugaccccagauaugaagaaucucugcacaauccuuacccugacuaccacuggcuucgaacugucaaaaccacgaaggaaucccuagucaucauauccccaaguguagcggaccuggacccauacgauaaaucccuucacucuagagucuuuccuaacggaaagugcucaggaauaacgauauccucuaccuacugcccuaccaaccaugauuacacuaucuggcucccugagaauccaagacuggggacaucuugugacaucuuuaccaauaguagagggaagagagcauccaaagggagcaagacuugcggguuuguugaugaaagagguuuguauaagucauugaaaggggcaugcaaacuuaaguugugugggguccuuggacuuagacuuauggauggaacgugggucgcaaugcaagcgucggacgagaccaaauggugccccccagaucagcugguaaaucuacacgacuuucgcucggacgagaucgaacaucucguuguggaggaguuggucaagaagagagaagagugucuggaugcacuagaguccaucaugacuacuaagucagugaguuucagacgucucagccacuugagaaagcuugucccuggguucggaaaagcauacaccauauucaacaaaaccuugauggaagcugaugcucacuacaagucaguccgaaccuggaaugagaucauccccucaaaaggguguuugagagucggggggaggugucauccucauguaaacgggguguuuuucaacgguauaauccuggguccugauggccauguucuaaucccagagaugcaaucgucccuccuucagcaacauauggaguuguuggaauccucaguuaucccccugaugcacccuuuagcagacccgucuacaguuuucaaggauggugaugaagcagagaauuuuguggagguucaccuuccugauguacacaaacagaucucgggaguugaccugggucucccuaacugggggaaguauguuuuaguaagugcagggguccugaucgccuugauguugauaauuuuucuaaugacauguugcggaagagucaaucgaccagaguccacacaacacaaucuuggcgggacagggagggaggugucaguaacuccccaaagcggaaaggugauaucuucaugggagucauacaaaagcggaggugggaccagacuguga

SEQ ID NO: 63508 - RNA, 1575 nt, Artificial Sequence
  derived and/or modified CDS sequence (wt) from glycoprotein__RABV__KF437648.1
augguuccucaagcucuuuuguuuguaccucuucugguuuuuucaauguguuucgggaaauuccccaucuacacgauaccagacaaacuugguccuuggagcccaauugacauacaucaucucagcuguccaaacaacuugguuguagaggaugaaggaugcaccaacuugucagguuuuuccuacauggaacuuaaagugggauacauuucggccauaaaagugaacggguucacgugcacagguguggugacagaggcagaaacuuauacuaacuuuguugguuaugucaccacuacguucaaaagaaagcauuuccgcccgacaccggaugcaugucgagccgcuuacaacuggaaaauggccggugaccccagauaugaagaaucucugcacaauccuuacccugacuaccacuggcuucgaacugucaaaaccacgaaggaaucccuagucaucauauccccaaguguagcggaccuggacccauacgauaaaucccuucacucuagaguccuuccuaacggaaagugcucaggaacaacgacauccucuaccuacugcccuaccaaccaugauuacacuaucuggcucccugagaauccaagacuggggacaucuugugacaucuuuaccaauaguagagggaagagagcauccaaagggggcaagacuugcggguuuguugaugaaagagguuuguauaagucauugaaaggggcaugcaaacuuaaguugugugggguccuuggacuuagacuuauggauggaacgugggucgcaaugcaagcgucggacgagaccaaauggugccccccagaucagcugguaaaucuacacgacuuucgcucggacgagaucgaacaucucgugguggaggaguuggucaagaagagagaagagugucuggaugcacuagaguccaucaugacuacuaagucagugaguuucagacgucucagccacuugagaaagcuugucccuggguucggaaaagcauacaccauauucaacaaaaccuugauggaagcugaugcucacuacaagucaguccgaaccuggaaugagaucauccccucaaaaggguguuugagagucggggggaggugucauccucauguaaacgggguguuuuucaacgguauaauccuggguccugauggccauguucuaaucccagagaugcaaucgucccuccuucagcaacauauggaguuguuggaauccucaguuaucccccugaugcacccuuuagcagacccgucuacaguuuucaaggauggugaugaagcagagaauuuuguggagguucaccuuccugauguacacaaacagaucucgggaguugaccugggucucccuaacugggggaaguauguuuuaguaagugcagggguccugaucgccuugauguugauaauuuuucuaaugacauguugcggaagagucaaucgaccagaguccacacaacacaaucuuggcgggacagggagggaggugucaguaacuccccaaagcggaaaggugauaucuucaugggagucauacaaaaguggaggugagaccagacuguga

SEQ ID NO: 63509 - RNA, 1575 nt, Artificial Sequence
  derived and/or modified CDS sequence (wt) from glycoprotein__RABV__KF437649.1
augguuccucaagcucuuuuguuuguaccucuucugguuuuuucaauguguuucgggaaauuccccaucuacacgauaccagacaaacuugguccuuggagcccaauugacauacaucaucucagcuguccaaacaacuugguuguagaggaugaaggaugcaccaacuugucagguuuuuccuacauggaacuuaaagugggauacauuucggccauaaaagugaacggguucacgugcacagguguggugacagaggcagaaacuuauacuaacuuuguugguuaugucaccacuacguucaaaagaaagcauuuccgcccgacaccggaugcaugucgagccgcuuacaacuggaaaauggccggugaccccagauaugaagaaucucugcacaauccuuacccugacuaccacuggcuucgaacugucaaaaccacgaaggaaucccuagucaucauauccccaaguguagcggaccuggacccauacgauaaaucccuucacucuagagucuuuccuaacggaaagugcucaggaauaacgauauccucuaccuacugcccuaccaaccaugauuacacuaucuggcucccugagaauccaagacuggggacaucuugugacaucuuuaccaauaguagagggaagagagcauccaaagggagcaagacuugcggguuuguugaugaaagagguuuguauaagucauugaaaggggcaugcaaacuuaaguugugugggguccuuggacuuagacuuauggauggaacgugggucgcaaugcaagcgucggacgagaccaaauggugccccccagaucagcugguaaaucuacacgacuuucgcucggacgagaucgaacaucucguuguggaggaguuggucaagaagagagaagagugucuggaugcacuagaguccaucaugacuacuaagucagugaguuucagacgucucagccacuugagaaagcuugucccuggguucggaaaagcauacaccauauucaacaaaaccuugauggaagcugaugcucacuacaagucaguccgaaccuggaaugagaucauccccucaaaaggguguuugagagucggggggaggugucauccucauguaaacgggguguuuuucaacgguauaauccuggguccugauggccauguucuaaucccagagaugcaaucgucccuccuucagcaacauauggaguuguuggaauccucaguuaucccccugaugcacccuuuagcagacccgucuacaguuuucaaggauggugaugaagcagagaauuuuguggagguucaccuuccugauguacacaaacagaucucgggaguugaccugggucucccuaacugggggaaguauguuuuaguaagugcagggguccugaucgccuugauguugauaauuuuucuaaugacauguugcggaagagucaaucgaccagaguccacacaacacaaucuuggcgggacagggagggaggugucaguaacuccccaaagcggaaaggugauaucuucaugggagucaugcaaaagcggaggugggaccagacuguga

SEQ ID NO: 63510 - RNA, 1575 nt, Artificial Sequence
  derived and/or modified CDS sequence (wt) from glycoprotein__RABV__KF437650.1
augguuccucaagcucuuuuguuuguaccucuucugguuuuuucaauguguuucgggaaauuccccaucuacacgauaccagacaaacuugguccuuggagcccaauugacauacaucaucucagcuguccaaacaacuugguuguagaggaugaaggaugcaccaacuugucagguuuuuccuacauggaacuuaaagugggauacauuucggccauaaaagugaacggguucacgugcacagguguggugacagaggcagaaacuuauacuaacuuuguugguuaugucaccacuacguucaaaagaaagcauuuccgcccgacaccggaugcaugucgagccgcuuacaacuggaaaauggccggugaccccagauaugaagaaucucugcacaauccuuacccugacuaccacuggcuucgaacugucaaaaccacgaaggaaucccuagucaucauauccccaaguguagcggaccuggacccauacgauaaaucccuucacucuagagucuuuccuaacggaaagugcucaggaauaacgauauccucuaccuacugcccuaccaaccaugauuacacuaucuggcucccugagaauccaagacuggggacaucuugugacaucuuuaccaauaguagagggaagagagcauccaaagggagcaagacuugcggguuuguugaugaaagagguuuguauaagucauugaaaggggcaugcaaacuuaaguugugugggguccuuggacuuagacuuauggauggaacgugggucgcaaugcaagcgucggacgagaccaaauggugccccccagaucagcugguaaaucuacacgacuuucgcucggacgagaucgaacaucucguuguggaggaguuggucaagaagagagaagagugucuggaugcacuagaguccaucaugacuacuaagucagugaguuucagacgucucagccacuugagaaagcuugucccuggguucggaaaagcauacaccauauucaacaaaaccuugauggaagcugaugcucacuacaagucaguccgaaccuggaaugagaucauccccucaaaaggguguuugagagucggggggaggugucauccucauguaaacgggguguuuuucaacgguauaauccuggguccugauggccauguucuaaucccagagaugcaaucgucccuccuucagcaacauauggaguuguuggaauccucaguuaucccccugaugcacccuuuagcagacccgucuacaguuuucaaggauggugaugaagcagagaauuuuguggagguucaccuuccugauguacacaaacagaucucgggaguugaccugggucucccuaacugggggaaguauguuuuaguaagugcagggguccugaucgccuugauguugauaauuuuucuaaugacauguugcggaagagucaaucgaccagaguccacacaacacaaucuuggcgggaccgggagggaggugucaguaacuccccaaagcggaaaggugauaucuucaugggagucauacaaaagcggaggugggaccagacuguga

SEQ ID NO: 63511 - RNA, 1575 nt, Artificial Sequence
  derived and/or modified CDS sequence (wt) from glycoprotein__RABV__KF437652.1
augguuccucaagcucuuuuguuuguaccucuucugguuuuuucaauguguuucgggaaauuccccaucuacacgauaccagacaaacuugguccuuggagcccaauugacauacaucaucucagcuguccaaacaacuugguuguagaggaugaaggaugcaccaacuugucagguuuuuccuacauggaacuuaaagugggauacauuucggccauaaaagugaacggguucacgugcacagguguggugacagaggcagaaacuuauacuaacuuuguugguuaugucaccacuacguucaaaagaaagcauuuccgcccgacaccggaugcaugucgagccgcuuacaacuggaaaauggccggugaccccagauaugaagaaucucugcacaauccuuacccugacuaccacuggcuucgaacugucaaaaccacgaaggaaucccuagucaucauauccccaaguguagcggaccuggacccauacgauaaaucccuucacucuagagucuuuccuaacggaaagugcucaggaauaacgauauccucuaccuacugcccuaccaaccaugauuacacuaucuggcucccugagaauccaagacuggggacaucuugugacaucuuuaccaauaguagagggaagagagcauccaaagggagcaagacuugcggguuuguugaugaaagagguuuguauaagucauugaaaggggcaugcaaacuuaaguugugugggguccuuggacuuagacuuauggauggaacgugggucgcaaugcaagcgucggacgagaccaaauggugccccccagaucagcugguaaaucuacacgacuuucgcucggacgagaucgaacaucucguuguggaggaguuggucaagaagagagaaaagugucuggaugcacuagaguccaucaugacuacuaagucagugaguuucagacgucucagccacuugagaaagcuugucccuggguucggaaaagcauacaccauauucaacaaaaccuugauggaagcugaugcucacuacaagucaguccgaaccuggaaugagaucauccccucaaaaggguguuugagagucggggggaggugucauccucauguaaacgggguguuuuucaacgguauaauccuggguccugauggccauguucuaaucccagagaugcaaucgucccuccuucagcaacauauggaguuguuggaauccucaguuaucccccugaugcacccuuuagcagacccgucuacaguuuucaaggauggugaugaagcagagaauuuuguggagguucaccuuccugauguacacaaacagaucucgggaguugaccugggucucccuaacugggggaaguauguuuuaguaagugcagggguccugaucgccuugauguugauaauuuuucuaaugacauguugcggaagagucaaucgaccagaguccacacaacacaaucuuggcgggacagggagggaggugucaguaacuccccaaagcggaaaggugauaucuucaugggagucauacaaaagcggaggugggaccagacuguga

SEQ ID NO: 63512 - RNA, 1575 nt, Artificial Sequence
  derived and/or modified CDS sequence (wt) from glycoprotein__RABV__KF437653.1
augguuccucaagcucuuuuguuuguaccucuucugguuuuuucaauguguuucgggaaauuccccaucuacacgauaccagacaaacuugguccuuggagcccaauugacauacaucaucucagcuguccaaacaacuugguuguagaggaugaaggaugcaccaacuugucagguuuuuccuacauggaacuuaaagugggauacauuucggccauaaaagugaacggguucacgugcacagguguggugacagaggcagaaacuuauacuaacuuuguugguuaugucaccacuacguucaaaggaaagcauuuccgcccgacaccggaugcaugucgagccgcuuacaacuggaaaauggccggugaccccagauaugaagaaucucugcacaauccuuacccugacuaccacuggcuucgaacugucaaaaccacgaaggaaucccuagucaucauauccccaaguguagcggaccuggacccauacgauaaaucccuucacucuagagucuuuccuaacggaaagugcucaggaauaacgauauccucuaccuacugcccuaccaaccaugauuacacuaucuggcucccugagaauccaagacuggggacaucuugugacaucuuuaccaauaguagagggaagagagcauccaaagggagcaagacuugcggguuuguugaugaaagagguuuguauaagucauugaaaggggcaugcaaacuuaaguugugugggguccuuggacuuagacuuacggauggaacgugggucgcaaugcaagcgucggacgagaccaaauggugccccccagaucagcugguaaaucuacacgacuuucgcucggacgagaucgaacaucucguuguggaggaguuggucaagaagagagaagagugucuggaugcacuagaguccaucaugacuacuaagucagugaguuucagacgucucagccacuugagaaagcuugucccuggguucggaaaagcauacaccauauucaacaaaaccuugauggaagcugaugcucacuacaagucaguccgaaccuggaaugagaucauccccucaaaaggguguuugagagucggggggaggugucauccucauguaaacgggguguuuuucaacgguauaauccuggguccugauggccauguucuaaucccagagaugcaaucgucccuccuucagcaacauauggaguuguuggaauccucaguuaucccccugaugcacccuuuagcagacccgucuacaguuuucaaggauggugaugaagcagagaauuuuguggagguucaccuuccugauguacacaaacagaucucgggaguugaccugggucucccuaacugggggaaguaugucuuaguaagugcagggguccugaucgccuugauguugauaauuuuucuaaugacauguugcggaagagucaaucgaccagaguccacacaacacaaucuuggcgggacagggagggaggugucaguaacuccccaaagcggaaaggugauaucuucaugggagucauacaaaagcggaggugggaccagacuguga

SEQ ID NO: 63513 - RNA, 1575 nt, Artificial Sequence
  derived and/or modified CDS sequence (wt) from glycoprotein__RABV__KF437654.1
augguuccucaagcucuuuuguuuguaccucuucugguuuuuucaauguguuccgggaaauuccccaucuacacgauaccagacaaacuugguccuuggagcccaauugacauacaucaucucagcuguccaaacaacuugguuguagaggaugaaggaugcaccaacuugucagguuuuuccuacauggaacuuaaagugggauacauuucggccauaaaagugaacggguucacgugcacagguguggugacagaggcagaaacuuauacuaacuuuguugguuaugucaccacuacguucaaaagaaagcauuuccgcccgacaccggaugcaugucgagccgcuuacaacuggaaaauggccggugaccccagauaugaagaaucucugcacaauccuuacccugacuaccacuggcuucgaacugucaaagccacgaaggaaucccuagucaucauauccccaaguguagcggaccuggacccauacgauaaaucccuucacucuagagucuuuccuaacggaaagugcucaggaauaacgauauccucuaccugcugcccuaccaaccaugauuacacuaucuggcucccugagaauccaagacuggggacaucuugugacaucuuuaccaauaguagagggaagagagcauccaaagggagcaagacuugcggguuuguugaugaaagagguuuguauaagucauugaaaggggcaugcaaacuuaaguugugugggguccuuggacuuagacuuauggauggagcgugggucgcaaugcaagcgucggacgagaccaaauggugccccccagaucagcugguaaaucuacacgacuuucgcucggacgagaucgaacaucucguuguggaggaguuggucaagaagagagaagagugucuggaugcacuagaguccaucaugacuacuaagucagugaguuucagacgucucagccacuugagaaagcuugucccuggguucggaaaagcauacaccauauucaacaaaaccuugauggaagcugaugcucacuacaagucaguccgaaccuggaaugagaucauccccucaaaaggguguuugagagucggggggaggugucauccucauguaaacgggguguuuuucaacgguauaauccuggguccugauggccauguucuaaucccagagaugcaaucgucccuccuucagcaacauauggaguuguuggaauccucaguuaucccccugaugcacccuuuagcagacccgucuacaguuuucaaggauggugaugaggcagagaauuuuguggagguucaccuuccugauguacacaaacagaucucgggaguugaccugggucucccuaacugggggaaguauguuuuaguaagugcagggguccugaucgccuugauguugauaauuuuucuaaugacauguugcggaagagucaaucgaccagaguccacacaacacaaucuuggcgggacagggagggaggugucaguaacuccccaaagcggaaaggugauauccucaugggagucauacaaaagcggaggugggaccagacuguga

SEQ ID NO: 63514 - RNA, 1575 nt, Artificial Sequence
  derived and/or modified CDS sequence (wt) from glycoprotein__RABV__KF484518.1
augguucuucaagcccuucuguucgcaccuuuucugauuucaucguuguguuuugggaaguuccccauuuacacaauaccagacaagcuagguccuuggagcccuaucgauauacaucaucucagcugucccaacaaucuaguuguagaagacgaggggugcaacaguuuaucaggauucucuuacauggaacugaaagugggauauaucucugccauaaaagugaacggguucacauguacuggugucgugaccgaagcagagacuuacaccaacuuugucgguuaugucaccaccacauucaagagaaaacacuuucgcccgaugccugacgcgugcaggucugcauacaacuggaaaguagcgggcgauccuagguaugaagagucucuucacaacccguaucccgauuaccacuggcugcggacuguaaaaaccaccaaagagucucuuaucaucauaucgccuaguguggccgaccuggauccauaugacaaaucccuccacucaaggauuuuuccuggugggaaaugcucaggaaugacaaucucuucuaccuacugcucaacuaaccaugacuacacuauauggaugccugagaagacgggucucgggacauccugugacaucuuuaucaccaguaaggggaagagagcuucaaaaggaggcaggaccuguggguuuguggaugaaagaggccuauacaagucccugaagggagcauguaagcucaagcugugcgggguuuccgggcucagacuaauggaugggacuugggcggcaauucagacgucagaugagaccaagugguguucuccugaucaguuggugaaucuucaugaccuucacucagaugaaauagagcaucucguuguggaggaguuggucagaagaagggaagaaugcuuagaugcauuagagucuaucaugaccaccaaaucagugagcuucagacgucucagccaccugagaaaacucguaccagguuucgggaaagcauauacgauauucaacaaaaccuuaauggaagcugacgcccacuacaagucaguccgaacuuggaaugagauaauccccucaaaaggguguuugagagucgggggaaagugucauccucaugugaaugggguauucuucaacggcauaauacuggguccagaugggcauguccugauuccagagaugcagucaucucuucuccaacaacauauggaacuucuggagucuucugugauaccccugaugcaucccuuggcagaccucucaaccgucuuuaaggacggugaugaagcggaagacuucguugaaguucaccuuccggauguucacaaacauguuucagggguggaccuuggccucccaagcugggggaaguacaugcugaugagugcaggugcucuggcaacccuaaugcuggugauccccuuaaugaagugcugcaggagggucaacagaacaaaaucaauacaacagggucccagagaaucagaucgaaagguaucaguuacuccucagaacgggaaaguuauaucuucuugggagucuuauaagaguggaggagggacuggacuguaa

SEQ ID NO: 63515 - RNA, 1575 nt, Artificial Sequence
  derived and/or modified CDS sequence (wt) from glycoprotein__RABV__KF484519.1
augguucuucaagcccuucuguucgcaccuuuucugauuucaucguugugucucgggaaguucccuaucuauacgauaccagacaagcuuggcccuuggagcccuaucgauauacaucaucucagcugucccaacaaucuagucauagaagacgaggggugcaacagucugucaggauuuuccuacauggaacugaaagugggauauaucuccgccauaaaggugaacggguucaccuguacuggugucgugacugaagcugagacuuacaccaacuuuguugguuaugucaccaccacauucaagagaaaacauuuucgcccgaugccggaugcguguagaucugcauacaacuggaaacuggcaggcgauccuagguaugaagagucccuucacaacccauaucccgaguaccauuggcugcggaccguaaaaacaaccaaggagucucuuaucgucauaucgccuaguguggcugaccuggauccauaugauaaaucccuccacucaagaaucuuuccuagugggaagugcucagggaugacagucucuucuaccuacugcucaacuaaccaugaauacaccauauggaugcccgaaaaaguaggucucgggacguccugugacauuuuuaucaccagcaagggaaagagagcauccaaaggaggcaaaaccugcggguuuguggaugaaagaggcuuauacaaguccuugaagggagcauguaagcucaagcugugugggguuuccgggcucagauuaauggaugggaccuggguugcaauucagacgucagaugaaaccaagugguguucuccugaucaguuggugaaucuccaugaccuucacucugaugagauagagcaccuuguuguggaggaguuggucagaaaaagggaggagugcuuagaugcauuagaaucuaucaugaccacuaaaucaguaagcuucagacgucucagccacuugagaaagcucguuccaggcuuugggaaagcauauacgauauucaacaaaaccuuaauggaagcugacgcucauuacaagucgguccgaacuuggaaugagauaauccccucaaaaggguguuugagagucggggggaagugucauccucacgugaaugggguguucuucaauggcauaauacuggguccagacgggcauguccugaucccugagaugcagucaucucuucuccaacaacauauagaacuguuggagucuucugugauuccccugaugcaucccuuggcagaccucucaacagucuuuaaggauggugacgaggcggaagacuucguugaaguucaccuuccggauguucacaaacagaucucagggguggaccuuggccuuccaagcuggggaaaguacgugcugaugagugcaggugcguuggcaacccuaauacuggugacuucuuuaaugaaauguugcaggugggucaacagaacaaaaucaauacaacaggguccuagagaaucagaacgaaagguaucaguuacuccccaaagcgggaaaguuauaucuucuugggagucuuacaagauuggaggagagacugggcuguaa

SEQ ID NO: 63516 - RNA, 1575 nt, Artificial Sequence
  derived and/or modified CDS sequence (wt) from glycoprotein__RABV__KF484520.1
augguucuucaggcccuucuguucgcaccuuuucugauuucaucguugugccuuggaaaguucccuaucuauacgauaccagacaagcucggcccuuggagcccuaucgauauacaucaucucagcugucccaacaaucuaguuguagaagacgaggggugcaacagucuaucaggaauuucuuacauggaacugaaagugggauauaucuccgccauaaaggugaacggguucaccuguacuggugucgugacugaagcugagacuuacaccaacuuuguugguuaugucaccaccacauucaagagaaaacacuuucauccgaugccggaugcguguagaucugcauacaacuggaaacuggcaggcgauccucguuaugaagagucccuucacaacccauaucccgauuaccacuggcugcggaccguaaaaaccaccaaggagucccuuaucaucauaucgcccaguguggcugaccuggauccauaugacaaaucucuccacucaaggauuuuuccuagugggaaaugcucagggaugaccauuucuucuaccuacugcucaacuaaccaugaauacacuauauggaugcccgaaaaggcaggucucgggacgucuugugacauauuuaccaccagcaagggaaagagagcguccaaaggaggaaagaccuguggguuuguggaugaaagaggcuuauacaaguccuugaagggggcauguaagcucaagcuauguggggucuccgggcucagacuaauggaugggacuuggguugcaauccagacaucagaagagaccaagugguguccuccugaucaguuggugaaucugcaugaccuucacucagaugagauagagcaucuuguugucgaggaguuggucaagaaaagggaggagugcuuagaugcauuagaaucuaucaugaccacuaaaucaguaaguuucagacgucucagccacuugagaaaacuuguuccaggcuuugggaaagcauauacgauauucaacaaaaccuuaauggaagcggacgcccacuacaagucaaucagaacuuggaaugagauaauccccucaaaaggguguuugagagucggggggaagugucauccucaugugaaugggguguucuucaacggcauaauacuggguccggacgggcauguccugaucccagagaugcagucgucucuucuccaacagcauauggaacuguuggagucuucugugaucccccugaugcauccccuggcagaccucucaacaguauuuaaggauggugaugaagcagaagacuucguugaaguucaucuuccggauguucacaaacagaucucagggguggaucuuggccucccgagcuggggaaaguaugugcuaaugagugcaggugccuuggcaauccuaauguuggugaucucuuuaaugaaauguuucuggggugucaacagaacaaaaccaauacaacaggguccuagagaaucagaacgaaagguaucaauugcuccccagagcaggaaaguuauaucuucuugggagucuuauaagaguggaggggagacugaacuguaa

SEQ ID NO: 63517 - RNA, 1575 nt, Artificial Sequence
  derived and/or modified CDS sequence (wt) from glycoprotein__RABV__KF484521.1
augguucuucaagcccuuuuguucgcacccuuucugauuucaucguugugucuugggaaguucccuauuuauacgaucccagacaagcucggccccuggagcccuaucgauauacaucaucucagcugucccaacaaucuaguuguagaagaugaggggugcaacagucuaucgggauuuucuuacauggaacugaaagugggauauaucuccgccauaaaggugaauggguucaccuguacugguguugugacugaagcugagacuuacaccaacuuuguuggcuaugucaccaccacauucaagagaaaacacuuucgcccgaugccggaugcguguagaucugcguacaacuggaaacuggcaggcgauccuagguaugaagagucucuucacaacccuuauccugauuaccacuggcugcggaccguaaaaaccaccaaggagucucuuauugucauaucgccuaguguggcugaccuggauccauaugacaaaucccuccauucaaggaucuuuccuggugggaaaugcucagggaugacaguuucuucuaccuacugcucaacuaaccaugaauacacuauauggaugccugaaaaggcaggucucgggacgucuugugacaucuuuaccaccagcaagggaaagagggcgaccaaagguggcaagaccuguggguuuguugaugagagagguuuauacaaguccuugaagggagcaugcaagcucaagcugugcggaguuucaggacuuagacuaauggauggaacuuggguugcaauucagacgucagaugagaccaagugguguucuccugaucaguuggugaauuugcaugaccuucacucagaugagauagagcaucuuguuguagaggaguuggucagaaaaagggaggagugcuuagaugcauuagaaucuaucaugaccacuaaaucaguaagcuucagacgccucagccacuugagaaagcucguuccaggcuuugggaaagcauauacgauauucaacaaaaccuuaauggaagcugacgcccacuacaagucgguccgaaccuggaaugagauaauccccucaaaagggugcuugagagucgggggaaagugucauccucaugugaaugggguguucuucaacggcauaauacuggguccagacgggcacguccugaucccagagaugcaaucgucucuucuccaacaacauauggaacuguuggagucuucugugaucccccugaugcaucccuuggcagacccuucaacagucuuuaaggacgaugacgaagcagaagacuuuguugaaguucaccuuccggauguucacaaacaggucucaggaguugaccucggccucccaagcuggggaagguaugugcugaugagugcaggugcucuggcaacccuuaugcuggugaucuccuuaaugaaauguugcaagggggucaacagaacaaaaucaauaaaacaagguucuagagaaucagaacgaaagguaucaauuacuccccagagcgggaaaguuauaucuucuugggagucuuauaagaguggaggagagacuggacuguaa

SEQ ID NO: 63518 - RNA, 1575 nt, Artificial Sequence
  derived and/or modified CDS sequence (wt) from glycoprotein__RABV__KF484522.1
augguucuucaagcccuucuguucgcaccuuuucugauuucaucguugugucucgggaaguucccuaucuauacgauaccagacaagcuuggcccuuggagcccuaucgauauacaucaucucagcugucccaacaaucuagucauagaagacgaggggugcaacagucugucaggauuuuccuacauggaacugaaagugggauauaucuccgccauaaaggugaacggguucaccuguacuggugucgugacugaagcugagacuuacaccaacuuuguugguuaugucaccaccacauucaagagaaaacacuuucgcccgaugccggaugcguguagaucugcauacaacuggaaacuggcaggcgauccuagguaugaagagucccuucacaacccauaucccgaguaccacuggcugcggaccguaaaaacaaccaaggagucucuuaucgucauaucgccuaguguggcugaccuggauccauaugauaaaucccuccacucaagaaucuuuccuagugggaagugcucagggaugacagucucuucuaccuacugcucaacuaaccaugaauacaccauauggaugcccgaaaaaguaggucucgggacguccugugacauuuuuaucaccagcaagggaaagagagcauccaaaggaggcaaaaccugcggguuuguggaugaaagaggcuuauacaaguccuugaagggagcauguaagcucaagcugugcgggguuuccgggcucagauuaauggaugggaccuggguugcaauucagacgucagaugaaaccaagugguguucuccugaucaguuggugaaucugcaugaccuucacucugaugagauagagcaccuuguuguggaggaguuggucagaaaaagggaggagugcuuagaugcauuagaaucuaucaugaccacuaagucaguaagcuucagacgucucagccacuugagaaagcucgucccaggcuuugggaaagcauauacgauauucaacaaaaccuuaauggaagcugacgcucauuacaagucgguccgaacuuggaaugagauaauccccucaaaaggguguuugagagucggggggaagugucauccucacgugaaugggguguucuucaauggcauaauacuggguccagacgggcauguccugauccccgagaugcagucaucucuucuccaacaacauauagaacuguuggagucuucugugauuccccugaugcaucccuuggcagaccucucaacagucuuuaaggauggugacgaggcggaagacuucguugaaguucaccuuccggauguucacaaacagaucucagggguggaccuuggccuuccaagcuggggaaaguacgugcugaugagugcaggugcuuuggcaacccuaauacuggugauuucuuuaaugaaauguugcaggugggucaacagaacaaaaucaauacaacaggguccuagagaaucagaacgaaagguaucaguuacuccccaaagcgggaaaguuauaucuucuugggagucuuacaagauuggaggagagacugggcuguaa

SEQ ID NO: 63519 - RNA, 1575 nt, Artificial Sequence
  derived and/or modified CDS sequence (wt) from glycoprotein__RABV__KF484523.1
augauucuucacgcccuucuguucgcaccuuuucugauuucaccguugugucuugggaaguucccuaucuacacgauaccagacaagcucgguccuuggagcccuaucgauauacaucaucucagcugucccaacaaucuaguuguagaagacgaggggugcaacagucugucaggauuuuccuauauggaacugaaagugggauacaucuccgccauaaaggugaacggguucaccuguacuggugucgugaccgaagcugagacuuacaccaacuuuguugguuaugucaccaccacauucaaaaggaaacacuuucgcccaaugccggaugcguguagaucugcauacaauuggaaacuggcaggcgauccuagguaugaagagucucuucacaacccauaucccgaguaccacuggcugcggaccguaaaaacaaccaaggagucucuuaucgucauaucgccuaguguggcugaccuggauccauaugauaaaucccuccacucaaggauuuuuccuagugggaaaugcucagggaugacagucucuucuaccuacugcucaacuaaccaugaauacaccauauggaugcccgaaaagguaggucucgggacgucuugugacauuuuuaccaccagcaagggaaagagagcguccaaaggaggcaggauuuguggguuuguggaugaaagaggcuuauacaaguccuugaagggagcauguaagcucaagcugugcgggguuuccgggcucagauugauggaugggaccggguuugcaauucagacgucagaugagaccaagugguguucuccugaucaguuggugaaucugcaugaccuucacucagaugagauagagcaucuuguuguggaggaguuggucagaaaaagggaggagugcuuagaugcauuagaaucuaucaugaccacuaagucaguaagcuucagacgucucagccacuugagaaagcucguuccaggcuuugggaaagcauauacgauauucaacaaaaccuuaauggaagcugacgcccauuacaagucgguccgaacauggaaugagauaauccccucaaaaggguguuugagaguuggggggaagugucauccucaugugaaugggguguucuucaacggcauaauauuggguccagacgggcauguccugaucccagagaugcagucgucucuucuccaacaacauauggaacuguuggagucuucuguaauuccccugaugcaucccuuggcagaccucucaacagucuucaaggaugauggcgaagcggaagacuucguugaaguucaccuuccggauguucacaaacagaucucagggguggaccuuggccucccaagcuggggaaaguaugcacugaugagugcaggugcuuuggcaacccuaauacugaugaucuuuuuaaugaaauguugcaggugggucaacagaacggaaucaauacaacaggguccuagagaaucagaacgaaaggugucaguuacuccccaaaacgggaaagucaucucaucuugggagucuuacaagauuggaggagagacuggacuguaa

SEQ ID NO: 63520 - RNA, 1575 nt, Artificial Sequence
  derived and/or modified CDS sequence (wt) from glycoprotein__RABV__KF484524.1
augguucuucaagcccuucuguucgcaccuuuucugauuucaucguugugucucgggaaguucccuaucuauacgauaccagacaagcuuggcccuuggagcccuaucgauauacaucaucucagcugucccaacaaucuagucauagaagacgaggggugcaacagucugucaggauuuuccuacauggaacuaaaagugggauauaucuccgccauaaaggugaacggguucaccuguacuggugucgugacugaagcugagacuuacaccaacuuuguugguuaugucaccaccacauucaagagaaaacauuuucgcccgaugccggaugcguguagaucugcauacaacuggaaacuggcaggcgauccuagguaugaagagucccuucacaacccauaucccgaguaccacuggcugcggaccguaaaaacaaccaaggagucucuuaucgucauaucgccuaguguggcugaccuggauccauaugauaaaucccuccacucaagaaucuuuccuagugggaagugcucagggaugacagucucuucuaccuacugcucaacuaaccaugaauacaccauauggaugcccgaaaaaguaggucucgggacguccugugacauuuuuaucaccagcaagggaaagagagcauccaaaggaggcaaaaccugcggguuuguggaugaaagaggcuuauacaaguccuugaagggagcauguaagcucaagcugugcgggguuuccgggcucagauuaauggaugggaccuggguugcaauucagacgucagaugaaaccaagugguguucuccugaucaguuggugaaucugcaugaccuucacucugaugagauagagcaccuuguuguggaggaguuggucagaaaaagggaggagugcuuagaugcauuagaaucuaucaugaccacuaaaucaguaagcuucagacgucucagccacuugagaaagcucguuccaggcuuugggaaagcauauacgauauucaacaaaaccuuaauggaagcugacgcucauuacaagucgguccgaacuuggaaugagauaauccccucaaaaggguguuugagagucgggggaaagugucauccucacgugaaugggguguucuucaauggcauaauacuggguccagacgggcauguccugauccccgagaugcagucaucucuucuccaacaacauauggaacuguuggagucuucugugauuccccugaugcaucccuuggcagaccucucaacagucuuuaaggaaggugacgaggcggaagacuucguugaaguucaccuuccggauguucacaaacagaucucagggguggaccuuggccuuccaagcuggggaaaguacgugcugaugagugcaggugcguuggcaacccuaauacuggugauuucucuaaugaaauguugcaggugggucaacagaacaaaaucaauacaacaggguccuagagaaucagaacgaaagguaucaguuacuccccaaagcgggaaaguuauaucuucuugggagccuuacaagauuggaggagagacugggcuguaa

SEQ ID NO: 63521 - RNA, 1575 nt, Artificial Sequence
  derived and/or modified CDS sequence (wt) from glycoprotein__RABV__KF484525.1
augguucuucaggcccuucuguucgcaccuuuucugauuucaucguugugccuuggaaaguucccuaucuauacgauaccagacaagcucggcccuuggagcccuaucgauauacaucaucucagcugucccaacaaucuaguuguagaagacgaggggugcaacagucuaucaggaauuucuuacauggaacugaaagugggauauaucuccgccauaaaggugaacggguucaccuguacuggugucgugacugaagcugagacuuacaccaacuuuguugguuaugucaccaccacauucaagagaaaacacuuucauccgaugccggaugcguguagaucugcauacaacuggaaacuggcaggcgauccucguuaugaagagucccuucacaacccauaucccgauuaccacuggcugcggaccguaaaaaccaccaaggagucucuuaucaucauaucacccaguguggcugaccuagauccauaugacaaaucucuccacucaaggauuuuuccuagugggaaaugcucagggaugaccauuucuucuaccuacugcucaacuaaccaugaauacacuauauggaugcccgaaaaggcaggucucgggacgucuugugacauauuuaccaccagcaagggaaagagagcguccaaaggaggaaagaccuguggguuuguggaugaaagaggcuuauacaaguccuugaagggggcauguaagcucaagcuauguggggucuccgggcucagacuaauggaugggacuuggguugcaauccagacaucagaagagaccaagugguguccuccugaucaguuggugaaucugcaugaccuucacucggaugagauagagcaucuuguugucgaggaguuggucaagaaaagggaggagugcuuagaugcauuagaaucuaucaugaccacuaaaucaguaaguuucagacgucucagccacuugagaaaacuuguuccaggcuuugggaaagcauauacgauauucaacaaaaccuuaauggaagcggacgcccacuacaagucaaucagaacuuggaaugagauaauccccucaaaaggguguuugagagucggagggaagugucauccucauguggaugggguguucuucaacggcauaauacuggguccggacgggcauguccugaucccagagaugcagucgucucuucuccaacagcauauggaacuguuggagucuucugugaucccccugaugcauccccuggcagaccucucaacagucuuuaaggauggugaugaagcagaagacuucguugaaguucaucuuccggauguucacaaacagaucucagggguggaucuuggccucccgagcuggggaaaguaugugcuaaugagugcaggugccuuggcaauccuaauguuggugaucucuuuaaugaaauguuucugggggguuaacagaacaaaaccaauacaacaagguccuagagaaucagaaagaaagguaucaauugcuccccagagcaggaaaguuauaucuucuugggagucuuauaagaauggaggggagacugaacuguag

SEQ ID NO: 63522 - RNA, 1575 nt, Artificial Sequence
  derived and/or modified CDS sequence (wt) from glycoprotein__RABV__KF484526.1
augguucuucaagcccuucuguucgcaccuuuuuugauuucaucguugugucuugggaaguucccuaucuauacgauaccggacaagcucggcccuuggagcccuauagauauacaucaucucagcugucccaacaaucuagucguagaggacgaggggugcaacagucugucaggauuuucauacauggaacugaaagugggauauaucucagccauaaaggugaacggguucaccuguacuggugucgugaccgaagcugagacuuacaccaacuuuguugguuaugucaccaccacauucaagagaaaacacuuucgcccaaugccggaugcguguagaucugcauacaacuggaaacuggcaggcgauccuagguaugaagagucucuucacaacccauaucccgaauaccacuggcugcggaccguaaaaacaaccaaagagucucuuaucaucauaucgccuaguguggcugaccuggauccauaugacaaaucccuucacucaaggauuuuuccuggugggaaaugcucagggaugacagucucuucuaccuacugcucaacuaaccacgaauacaccauauggaugcccgaaaagguaggucucgggacaucuugugacauuuuuaccaccagcaagggaaagagagcguccaaaggaggcaagaccuguggguuuguggaugaaagaggcuuauacaaguccuugaagggagcaugcaagcucaagcuaugcgggguuuccgggcucagauuaauggaugggaccuggguugcaaugcagacgucagaugagaccaagugguguucuccugaucaguuggugaaucugcaugaccuucacucagaugagauagagcaucuuguuguggaggaguuggucagaaaaagggaggagugcuuggaugcauuagaaucuaucaugaccacuaagucaguaagcuucagacgucucagccacuugagaaagcucguuccaggcuuugggaaagcauauacgauauucaacaaaaccuuaauggaagcugacgcccauuacaagucgguccgaacuuggaacgagauaaucccuucaaaaggguguuugagagucggggggaagugucauccucaugugaaugggguguucuucaacggcauaauauuggguccagacgggcauguccugaucccagagaugcagucgucucuucuccaacaacauauggaacuguuggagucuucugugaucccccugaugcaucccuuggcagaccucucagcagucuuuaaggaaggugacgaagcugaggacuucgucgaaguucaucuuccggauguucacaaacagaucucagagguggaccuuggccucccaaguuggggaaaguaugugcugaugagugcaggagcuuuggcaacccuaauacuggugaucuccuuaaugaaauguugcaggugggucaacagaacaaaaucaauacaacaggguccuagagaaucagaacgaaaggugucagucacuccccaaaacgggaaaguuaucucuucuugggagucuuacaagauuagaggagagacugggcuguaa

SEQ ID NO: 63523 - RNA, 1575 nt, Artificial Sequence
  derived and/or modified CDS sequence (wt) from glycoprotein__RABV__KF484527.1
augguucuucaagcccuucuguucgcaccuuuucugauuucaucguugugucuugggaaguucccuaucuauacaauaccagacaagcucggcccuuggagcccuauagauauacaucaucucagcugucccaacaaucuagucguagaagacgaggggugcaacagucugucaggauuuucauacauggaacugaaagugggauauaucuccgccauaaaggugaacggguucaccuguacuggugucgugaccgaagcugagacuuacaccaacuuuguugguuaugucaccaccacauucaagagaaaacacuuucgcccgaugccggaugcguguagaucugcauacaacuggaagcuggcaggcgauccuagguaugaagagucucuucacaacccauaucccgaauaccacuggcugcggaccguaaaaacaaccaaagagucucuuaucgucauaucgccuaguguggcugaccuggauccauaugacaaaucccuccacucaaggauuuuuccuggugggaaaugcucagggaugacagucucuucuaccuacugcucaacuaaccaugaauacaccauauggaugccugaaaagguaggucuugggacaucuugugacauuuuuaccaccagcaagggaaagagagcguccaaaggaggcaggaccuguggguuuguggaugaaagaggcuuauacaaguccuugaagggagcaugcaagcucaagcuaugcgggguuuccgggcucagauuaauggaugggaccuggguugcaaugcagacgucagaugagaccaagugguguucuccugaucaguuggugaaucugcaugaccuucacucagaugagauagagcaucuuguuguggaggaguuggucagaaaaagggaggaaugcuuagaugcauuagaaucuaucaugaccacuaagucaguaagcuucagacgucucagccacuugagaaagcucguuccaggcuuugggaaagcauauacgauauucaacaaaaccuuaauggaagcugacgcccauuacaagucgguccgaacuuggaaugagauaauccccucaaaaggguguuugagagucggggggaagugucauccucaugugaaugggguguucuucaauggcauaauauuggguccagacgggcaugucuuaaucccagagaugcagucgucucuucuccaacaacauauggaacuguuggagucuucuguaauuccccugaugcaucccuuggcagaccucucaacagucuuuaaggagggugacgaagcggaagacuucguugaaguucaccuuccggauguucacaaacagaucucagggguggaccuuggccucccaagcuggggaaaguaugugcugaugggugcaggagcuuuggcaacccuaauacuggugaucuccuuaaugaaauguugcaggugggucaacagaacaaaaucaauacaacaggguccuagaggaucagaacgaaagguaucaguuacuccccaaaaugggaaaguuaucucuucuugggagucuuacaagauuggaggagagacuggacuguaa

SEQ ID NO: 63524 - RNA, 1575 nt, Artificial Sequence
  derived and/or modified CDS sequence (wt) from glycoprotein__RABV__KF484528.1
augguucuucaagcccuucuguucgcaccuuuuuugauuucaucguugugucuugggaaguucccuaucuauacgauaccggacaagcucggcccuuggagcccuauagauauacaucaucucagcugucccaacaaucuagucguagaagacgaggggugcaacagucugucaggauuuucauacauggaacugaaagugggauauaucucagccauaaaggugaacggguucaccuguacuggugucgugaccgaagcugagacuuacaccaacuuuguugguuaugucaccaccacauucaagagaaaacacuuucgcccaaugccggaugcgugcagaucugcauacaacuggaaacuggcaggcgauccuagguaugaagagucucuucacaacccauaucccgaauaccacuggcugcggaccguaaaaacaaccaaagagucucuuaucaucauaucgccuaguguggcugaccuggauccauaugacaaaucccuucacucaaggauuuuuccuggugggaaaugcucagggaugacagucucuucuaccuacugcucaacuaaccacgaauacaccauauggaugcccgaaaagguaggucucgggacaucuugugacauuuuuaccaccagcaagggaaagagagcguccaaaggaggcaagaccuguggguuuguggaugaaagaggcuuauacaaguccuugaagggagcaugcaagcucaagcuaugcgggguuuccgggcucagauuaauggaugggaccuggguugcaaugcagacgucagaugagaccaagugguguucuccugaucaguuggugaaucugcaugaccuucacucagaugagauagagcaucuuguuguggaggaguuggucagaaaaagggaggagugcuuggaugcauuagaaucuaucaugaccacuaagucuguaagcuucagacgucucagccacuugagaaagcucguuccaggcuuugggaaagcauauacgauauucaacaaaaccuuaauggaagcugacgcccauuacaagucgguccgaacuuggaacgagauaaucccuucaaaaggguguuugagagucggggggaagugucauccucaugugaaugggguguucuucaacggcauaauauuggguccagacgggcauguucugaucccagagaugcagucgucucuucuccaacaacauauggaacuguuggagucuucugugaucccccugaugcaucccuuggcagaccucucaacagucuuuaaggaaggugacgaagcugaggacuucguugaaguucaucuuccggauguucacaaacagaucucagagguggaccuuggccucccaagcuggggaaaguaugugcugaugagugcaggagcuuuggcaacccuaauacuggugaucuccuuaaugaaauguugcaggugggucaacagaacaaaaucaauacaacaggguccuagagaaucagaacgaaaggugucaguuacuccccaaaacgggaaaguuaucucuucuugggagucuuacaagauuggaggagagacugggcuguaa

SEQ ID NO: 63525 - RNA, 1575 nt, Artificial Sequence
  derived and/or modified CDS sequence (wt) from glycoprotein__RABV__KF484529.1
augguucuucaagcccuucuguucgcacccuuucugauuucaucguugugucuugggaaauucccuaucuauacaauaccagacaagcucggcccuuggagcccuauagauauacaucaucucagcugucccaacaaucuagucguagaggacgaggggugcaacagucugucaggauuuucauacauggaacugaaagugggauauaucuccgccauaaaggugaacggguucaccuguacuggugucgugaccgaagcugagacuuacaccaacuuuguugguuaugucaccaccacauucaagagaaaacacuuucgcccgaugccggaugcguguagaucugcauacaacuggaaacuggcaggcgauccuagguaugaagagucucuucacaacccauaucccgaauaccacuggcugcggaccguaaaaacaaccaaagagucucuuaucgucauaucgccuaguguggcugaccuggauccauaugacaaaucccuccacucaaggauuuuuccuggugggaaauguucagggaugacagucucuucuaccuacugcucaacuaaccaugaauacaccauauggaugccugaaaagguaggucucgggacaucuugugacauuuuuaccaccagcaagggaaagagagcguccaaaggaggcaggaccuguggguuuguggaugaaagaggcuuauacaaguccuugaagggagcaugcaagcucaagcuaugcgggguuuccgggcucagauuaauggaugggaccuggguugcaaugcagacgucagaugagaccaagugguguucuccugaucaguuggugaaucugcaugaccuucacucagaugagauagagcaucuuguuguggaggaguuggucagaaaaagggaggagugcuuagaugcauuagaauccaucaugaccacuaagucaguaagcuucagacgucucagccacuugagaaagcucguuccaggcuucgggaaagcauauacgauauucaacaaaaccuuaauggaagcugacgcccauuacaagucgguccgaacuuggaaugagauaauccccucaaaaggguguuugagagucggggggaagugucauccucaugugaaugggguguucuucaacggcauaauauuggguccagacgggcaugucuugaucccagagaugcagucgucucuucuccaacaacauauggaacuguuggagucuucugugauuccccugaugcaucccuuagcagaccucucaacagucuuuaaggaggaugacgaagcggaagacuucguugaaguucaccuuccggauguucacaaacagaucucagggguggaccuuggccucccaagcuggggaaaguaugugcugaugggugcaggagcuuuggcaacccugacacuggugaucuccuuaauuaaauguugcaggugggucaacagaacaaaaucaauacaacaggguccuagagaaucagaacgaaaaguaucaguuacuccccaaaaugggaaaguuaucucuucuugggagucuuacaagauuggaggagagacgggacuguaa

SEQ ID NO: 63526 - RNA, 1575 nt, Artificial Sequence
  derived and/or modified CDS sequence (wt) from glycoprotein__RABV__KF484530.1
augguucuucaagcccuucuguucgcaccuuuucugauuucaucguuguguuuugggaaguuccccauuuacacaauaccagacaagcuagguccuuggagcccuaucgauguacaucaucucagcugucccaacaaucuaguuauagaagacgaggggugcaacaguuuaucaggauucucuuacauggaacugaaagugggauauaucucugccauaaaagugaacggguucacauguacuggugucgugaccgaagcagagacuuacaccaacuuugucgguuaugucaccaccacauucaagagaaaacacuuucgcccgaugccugacgcgugcaggucugcauacaacuggaaaguagcgggcgauccuagguaugaagagucucuucacaacccguaucccgauuaccacuggcugcggacuguaaaaaccaccaaagagucucuuaucaucauaucgccuaguguggccgaccuggauccauaugacaaaucccuccacucaaggauuuuuccuggugggaaaugcucaggaaugacaaucucuuccaccuacugcucaacuaaccaugacuacacuauauggaugccugagaagacgggucucgggacauccugugacaucuuuaccaccaguaaggggaagagagcuucaaaaggaggcaggaccuguggguuuguggaugaaagaggcuuauacaagucccugaagggagcauguaagcucaagcugugcgggguuuccgggcucagacuaauggacgggacuugggcggcaauucagacgucagaugagaccaagugguguucuccugaucaguuggugaaucuucaugaccuucacucagaugagauagagcaucucguuguggaggaguuggucagaagaagggaagaaugcuuagaugcauuagagucuaucaugaccaccaaaucagugagcuucagacgucucagccaccugagaaaacucguaccagguuucgggaaagcauauacgauauucaacaaaaccuuaauggaagcugacgcccacuacaagucaguccgaacuuggaaugagauaauccccucaaaaggguguuugagagucgggggaaagugucauccucaugugaaugggguauucuucaacgguauaauacuggguccagauggccauguccugauuccagagaugcagucaucucuucuccaacaacauauggaacuucuggagucuucugugauaccccugaugcaucccuuggcagaccucucaaccgucuuuaaggacggugaugaagcggaagacuucguugaaguucaccuuccggauguucacaaacagguuucagggguggaccuuggccucccaagcugggggaaguacaugcugaugagugcaggugcuuuggcaacccuaaugcuggugauccccuuaaugaagugcugcaggaggguuaacagaacaaaaucaacacaacagggucccagagaaucagaucgaaagguaucaguuacuccucagaacgggaaaguuauaucuucuugggagucuuauaagaguggaggagggacuggacuguaa

SEQ ID NO: 63527 - RNA, 1575 nt, Artificial Sequence
  derived and/or modified CDS sequence (wt) from glycoprotein__RABV__KF484531.1
augguucuucaagcccuucuguucgcacccuuucugauuucaucguugugucuugggaaguucccuaucuauacaauaccagacaagcucggcccuuggagcccuauagauauacaucaucucagcugucccaacaaucuagucguagaggacgaggggugcaacagucugucaggauuuucauacauggaacugaaagugggauauaucuccgccauaaaggugaacggguucaccuguacuggugucgugaccgaagcugagacuuacaccaacuuuguugguuaugucaccaccacauucaagagaaaacacuuucgcccgaugccggacgcguguagaucugcauacaacuggaaacuggcaggcgaucccagguaugaagagucucuucacaacccauaucccgaauaccacuggcugcggaccguaaaaacaaccaaagagucucuuaucgucauaucgccuaguguggcugaccuggauccauaugacaaaucccuccacucaaggauuuuuccuggugggaaaugcucagggaugacagucucuucuaccuacugcucaacuaaccaugaauacaccauauggaugccugaaaagguaggucucgggacaucuugugacauuuuuaccaccagcaagggaaagagagcguccaaaggagguaggaccuguggguuuguggaugaaagaggcuuauacaaguccuugaagggagcauguaagcucaagcuaugcgggguuuccgggcucagauuaauggaugggaccuggguugcaaugcagacgucagaugagaccaagugguguucuccugaucaguuggugaaucugcaugaccuucacucagaugagauagagcaucuuguuguggaggaguuggucagaaaaagggaggagugcuuagaugcauuagaauccaucaugaccaccaagucaguaagcuucagacgucucagccacuugagaaagcucguuccaggcuucgggaaagcauauacgauauucaacaaaaccuuaauggaagcugacgcccauuacaagucgguccgaacuuggaaugagauaauccccucaaaaggguguuugagagucggggggaagugucauccucaugugaaugggguguucuucaacgguauaauauuggguccagacgggcaugucuugaucccagagaugcagucgucucuucuccaacaacauauggaacuguuggagucuuccgugauuccccugaugcaucccuuggcagaccucucaacagucuuuaaggaggaugacgaagcggaagacuucguugaaguucaccuuccggauguucacaaacagaucucagggguggaccuuggccucccaagcuggggaaaguaugugcugaugggugcaggagcuuuggcaacccuaauacuggugaucuccuuaauuaaauguugcaggugggucaacagaacaaaaucaauacaacaggguccuagagaaucagaacgaaagguaucagcuacuccccaaaaugggaaaguuaucucuucuugggagucuuacaagauuggaggagagacuggacuguaa

SEQ ID NO: 63528 - RNA, 1575 nt, Artificial Sequence
  derived and/or modified CDS sequence (wt) from glycoprotein__RABV__KF484532.1
augauucuucacgcccuucuguucgcaccuuuucugauuucaucguugugucuugggaaguucccuaucuauacgauaccagacaagcucgguccuuggagcccuaucgauauacaucaucucagcugucccaacaaucuagucguagaagacgaggggugcaacagucugucaggauuuuccuauauggaacugaaagugggauauaucuccgccauaaaggugaacggguucaccuguacuggcgucgugacugaagcugagacuuacaccaacuuuguugguuaugucaccaccacauucaagagaaaacacuuucgcccaaugccggaugcguguagaucugcauacaauuggaaacuggcaggcgauccuagguaugaagagucucuucacaacccauaucccgaguaccacuggcugcggaccguaaaaacaaccaaggagucucuuaucgucauaucgccuaguguggcugaccuggauccauaugauaaaucccuccacucaaggauuuuuccuagugggaaaugcucagggaugacagucucuucuaccuacugcucaacuaaccaugaauacaccauauggaugcccgaaaagguaggucucgggacgucuugugacauuuuuaccaccagcaagggaaagagagcguccaaaggaggcaggauuuguggguuuguggaugaaagaggcuuauacaaguccuugaagggagcauguaagcucaagcugugcgggguuuccgggcucagauuaauggaugggaccuggguugcaauucagacgucagaugagaccaagugguguucuccugaucaauuggugaaucugcaugaccuucacucagaugagauagagcaucuuguaguggaggaguuggucagaaaaagggaggagugcuuagaugcauuagaaucuaucaugaccacuaagucaguaagcuucagacgucucagccacuugagaaagcucguuccaggcuuugggaaagcauauacgauauucaacaaaaccuuaauggaagcugacgcccauuacaagucgguccgaacauggaaugagauaauccccucaaaaggguguuugagaguuggggggaagugucauccucaugugaaugggguguucugcaacggcauaauauuggguccagacgggcauguccugaucccagagaugcagucaucucuucuccaacaacauauggaacuguuggagucuucuguaauuccccugaugcaucccuuggcagaccucucaacagucuucaaggaugauggcgaagcggaagacuucguugaaguucaccuuccggauguucacaaacagaucucagggguggaccuuggccucccaagcuggggaaaguaugcgcugaugagugcaggugcuuuggcaacccuaauacugaugaucucuuuaaugaaauguugcaggugggucaacagaacagaaucaauacgacaggguccuagagaaucagaacgaaaggugucaguuacuccccaaaacgggaaagucaucucaucuugggagucuuacaagauuggaggagagacuggacuguaa

SEQ ID NO: 63529 - RNA, 1575 nt, Artificial Sequence
  derived and/or modified CDS sequence (wt) from glycoprotein__RABV__KF484533.1
augguucuuaaagcccuuuuguucgcaccuuuucugauuucaucuuugugucuugggaaguucccuauuuauacgauaccagacaagcucgguccuuggagcccuaucgauauacaucaucucagcugucccaacaaucuagucguagaagaugaggggugcaacagucuaucgggauuuucuuacauggaacugaaagugggauauaucuccgccauaaaggugaauggauucaccugcacuggcguugugacugaagcugagacuuacaccaacuuuguugguuaugucaccaccacauucaagagaaaacacuuucgcccgaugccggaugcguguagaucugcguacaacuggaaacuggcaggcgauccuagguaugaagagucucuucacaacccguaucccgauuaccacuggcugcggaccguaagaaccaccaaggagucucuuauugucauaucgccuaguguggcugaccuggauccauaugacaagucccuccacucaaggauauuuccuggugggaaaugcucagggaugacaguuucuucuaccuacugcucaacuaaccaugaauacacuauuuggaugccugaaaaggcaggucucgggacgucuugugacaucuuuaccaccagcaagggaaagagggcguccaaaggaggcaggacuuguggguuuguggaugaaagagguuuauauaaguccuugaagggagcaugcaagcucaagcugugcgggguuucagggcucagacuaauggauggaacuuggguugcaauucagacgucagaugagaccaagugguguucuccugaucaguuggugaauuugcaugaccuucacucagaugagauagagcaccuuguuguggaggaguuaguuagaaaaagggaggagugcuuagaugcauuagaaucuaucaugaccaccaaaucaguaaguuucagacgucucagccacuugagaaagcucguuccaggcuuugggaaagcauauacaauauucaauaaaaccuuaauggaagcugacgcccacuacaagucaguccgaacuuggaaugagauaauccccucaaaagggugccugagagucgggggaaagugucauccucaugugagugggguguucuucaacggcauaauacuggguccagacgggcaugucuugaucccagagaugcagucgucucuucuucaacagcauauggaacuguuggaaucuucugugaucccccugaugcaucccuuggcagaccccucaacagucuuuaaggacgaugaugaagcggaagacuucguugagguccaccuuccggauguucacaaacaggucucaggaguugaccucggccucccaagcugggguaaguaugugcugaugagugcaggugcuuuggcaacccugaugcuggugaucuccuuaaugaaauguugcaggggauucaacagaacaaaaucaauaagacaagguucuagagaaucagaacaaaaaguaucaguuacuccccaaaacgggaaaguuauaucuucuugggagucuuauaagaguggaggagagacuggacuauaa

SEQ ID NO: 63530 - RNA, 1575 nt, Artificial Sequence
  derived and/or modified CDS sequence (wt) from glycoprotein__RABV__KF484534.1
augguucuucaagcccuucuguucgcaccuuuucugauuucaucguugugucuuggaaaguucccuaucuauacgauaccagacaagcucgguccuuggagcccuaucgauauacaucaucucagcugucccaacaaucuaguuguagaagacgaggggugcaacagucuaucaggaauuucuuacauggaacugaaagugggauauaucuccgccauaaaggugaacggguucaccuguacuggugucgugacugaagcugagacuuacaccaacuuuguugguuaugucaccaccacauucaagagaaaacacuuucgcccgauggcggaugcguguagaucugcauacaacuggaaacugacaggcgauccucguuaugaagagucccuucacaacccauaucccgauuaccacugguugcggaccguaaaaaccaccaaggagucucuuaucgucauaucgcccaguguggcugaccuggauccauaugacaaaucccuccacucaaggauuuuuccuagugggaaaugcucagggaugaccauuucuucuaccuacugcucaacuaaccaugaauacacuauauggaugcccgaaaaggcaggucucgggacgucuugugacauauuuaccaccagcaagggaaagagagcguccaaaggaggaaagaccuguggguuuguggaugaaagaggcuuauacaaguccuugaaaggagcauguaagcucaagcuauguggggucuccgggcucagacuaauggaugggacuuggguugcaauucagacaucagaugagaccaagugguguucuccugaucaguuggugaaucugcaugaccuucacucagaugagauagagcaucuuguugucgaggaguuggucaagaaaagggaggagugcuuagaugcauuagaaucuaucaugaccacuaaaucuguaaguuucagacgucucagccacuugagaaagcuuguuccaggcuuugggaaagcauauacgauauucaacaaaaccuuaauggaagcggacgcccacuacaagucaaucagaacuuggaaugagauaauccccucaaaaggauguuugagagucggggggaagugucauccucaugugaaugggguguucuucaacggcauaauacuggguccagacgggcauguccugaucccagagaugcagucgucucuucuccaacaacauauggagcuguuggagucuucugugaucccccugaugcaucccuuggcagaccucucaacagucuuuaaggauggugacgaagcagaagacuucguugaaguucaucuuccggauauucacaaacagaucucagggguggaucuuggccucccgagcuggggaaaguaugugcuaaugagugcaggugccuuggcaauccuaauguugguguucucuuuaaugaaauguuucuggggggucaacagaacaaaaccaauacaacggaguccuagagaaucagaacgaaagguaucaguugcuccccagagcgggaaaguuauaucuucuugggagucuuacaagaguggaggggagacuggacuguaa

SEQ ID NO: 63531 - RNA, 1575 nt, Artificial Sequence
  derived and/or modified CDS sequence (wt) from glycoprotein__RABV__KF484535.1
augguucuucaagcccuucuguucgcaccuuuucugauuucaucguugugccuuggaaaguucccuaucuauacgauaccagacaagcucgguccuuggagcccuaucgauauacaucaucucagcugucccaacaaucuaguuguagaagacgaggggugcaacagucuaucaggaauuucuuacauggaacugaaagugggauauaucuccgccauaaagguuaacggguucaccuguacuggugucgugacugaagcugagacuuacaccaacuuuguugguuaugucaccaccacauucaagagaaaacacuuucauccgaugccugaugcguguagaucugcauacaacuggaaacuggcaggcgauccccguuaugaagagucccuucacaacccauaucccgauuaccacuggcugcggaccguaaaaaccaccaaggagucucuuaucaucauaucgcccaguguggcugaccuggauccauaugacaaaucccuccacucaaggauuuuuccuagugggaaaugcucagggaugaccauuucuucuaccuacugcucaacuaaccaugaauacacuauauggaugccagaaaaggcaggucucgggacgucuugugacauauuuaccaccagcaagggaaagagagcguccaaaggaggaaagaccuguggguuuguggaugaaagaggcuuauacaaguccuugaagggggcauguaagcucaagcuauguggggucuccgggcucagacuaauggaugggacuuggguugcaauccagacaucagaugagaccaagugguguccuccugaucaguuggugaaucugcaugaccuucacucagaugagauagagcaucuuguugucgaggaguuggucaagaaaagggaggagugcuuagaugcauuagaaucuaucaugaccacuaaaucaguaaguuucagacgucucagccacuugagaaaacuuguuccaggcuuugggaaagcauauacgauauucaacaaaaccuuaauggaagcggacgcccacuacaagucaaucagaacuuggaaugagauaauccccucaaaaggguguuugagagucggggggaagugucauccucaugugaaugggguguucuucaacggcauaauacuggguccggacgggcauguccugaucccagagaugcagucgucucuucuccaacagcauauggaacuguuggagucuucugugaucccccugaugcaucccuuggcagaccucucaacagucuuuaaggauggugacgaagcagaagacuucguugaaguucaucuuccggauguucacaaacagaucucagggguggaucuuggccucccgagcuggggaaaguaugugcuaaugagugcaggugccuuggcaauccuaauguuggugaucucuuuaaugaaauguuucuggggggucaacagaacaaaaccaauacaacaggguccuagagaaucagaacgaaagguaucaauugcuccccagagcaggaaaguuauaucuucuugggagucuuauaagaguggaggggagacugaacuguaa

SEQ ID NO: 63532 - RNA, 1575 nt, Artificial Sequence
  derived and/or modified CDS sequence (wt) from glycoprotein__RABV__KF484536.1
augguucuucaagcccuucuguucgcaccuuuucugauuucaucacugugucuugggaaguucccuauuuauacaauaccagacaagcucgguccuuggagcccuaucgauauacaucaucucagcugucccaacaaucuaguuguagaagacgaggggugcaacagucuaucgggguuuucuuacauggaacugaaagugggauauaucuccgccauaagggugaauggguucaccuguacuggugucgugacugaagcugagacuuacaccaacuuuguugguuaugucaccaccacauucaagagaaaacacuuucgcccaaugccggaugcguguagaucugcguacaacuggaaacuggcaggugauccuagguaugaagagucucuucacaauccauaucccgauuaccacuggcugcggaccguaaaaaccaccaaggagucucuuaucgucauaucgccuaguguggcugacuuagauccauaugacaaaucccuucacucaaggauauuuccuggugggaaaugcucagggauaacagucucuucuaccuacugcucaacuaaccaugaauacacuauauggaugcccgaaaaggcaggucucgggacgucuugugacaucuuuaccaccagcaaggggaagagggcguccaaaggaggcagaaccuguggguuuguggaugaaagaggcuuauacaaguccuugaagggcgcauguaagcucaagcugugcgggguuucagggcucagacuaauggaugggacuuggguugcaauucagacgccagaugagaccaagugguguucuccugaucaauuggugaauuugcaugaccuucacucugaugagauagagcaucuuguugcagaggaguuggucagaaaaagggaggagugcuuggaugcauuagagucuaucaugaccaccaaaucaguaagcuucagacgucucagccacuugagaaagcucguuccaggcuuugggaaagcauauacaauauucaacaagaccuuaauggaagcugacgcccacuacaagucgguccgaacuuggaaugagauaauccccucaaaaggguguuugagagucggaggaaagugucauccucaugugaaugggguauucuucaacggcauaauauuggguccagacgggcauguccugaucccagagaugcagucgucucuucuccaacaacauauggaacuguuggagucuucuuugaucccccugaugcaucccuuggcagaccuuucaacagucuuuaaggacggugacgaagcggaagacuucguugagguucaccuuccggauguucacaaacaagucucagggguugaccuuggccucccaagcuggggaaaguaugugcugaugagugcaggugcuuuggcaacccugaugcuggugaucuccuugauaaaauguugcaggggggucaacagaacaagaucaauacaacgggguccuagagaaucagaacgaaagguuucuguuacuccccagaacgggaaaguuauaucuucuugggagucuuauaagaguggaggagagacuagacuguaa

SEQ ID NO: 63533 - RNA, 1575 nt, Artificial Sequence
  derived and/or modified CDS sequence (wt) from glycoprotein__RABV__KF484537.1
augguucuucaagcccuucuguucgcaccuuuucugauuucaucauugugucuugggaaguucccuauuuauacaauaccagacaagcucgguccuuggagcccuaucgauauacaucaucucagcugucccaacaaucuaguuguagaagacgaggggugcaacagucuaucgggguuuucuuacauggaacugaaagugggauauaucuccgccauaagggugaauggguucaccuguacuggugucgugacugaagcugagacuuacaccaacuuuguugguuaugucaccaccacauucaagagaaaacacuuucgcccaaugccggaugcguguagaucugcguacaacuggaaacuggcaggugauccuagguaugaagagucucuucacaauccauaucccgauuaccacuggcugcggaccguaaaaaccaccaaggagucucuuaucgucauaucgccuaguguggcugacuuagauccauaugacaaaucccuucacucaaggauauuuccuggugggaaaugcucagggauaacagucucuucuaccuacugcucaacuaaccaugaauacacuauauggaugcccgaaaaggcaggucucgggacgucuugugacaucuuuaccaccagcaagggaaagagggcguccaaaggaggcagaaccuguggguuuguggaugaaagagguuuauacaaguccuugaagggcgcauguaagcucaagcugugcgggguuucagggcucagacuaauggaugggacuuggguugcaauucagacgccagaugagaccaagugguguucuccugaucgauuggugaauuugcaugaccuucacucugaugagauagagcaucuuguugcagaggaguuggucagaaaaagggaggagugcuuggaugcauuagagucuaucaugaccaccaaaucaguaagcuucagacgucucagccacuugagaaagcucguuccaggcuuugggaaagcauauacaauauucaacaagaccuuaauggaagcugacgcccacuacaagucgguccgaacuuggaaugagauaauccccucaaaaggguguuugagagucggaggaaagugucauccucaugugaaugggguauucuucaacggcauaauauuggguccagacgggcauguccugaucccagagaugcagucgucucuucuccaacaacauauggaacuguuggagucuucugugaucccccugaugcaucccuuggcagaccuuucaacagucuuuaaggacggugacgaagcggaagacuucguugagguucaccuuccggauguucacaaacaagucucagggguugaccuuggccucccaagcuggggaaaguaugugcugaugagugcaggugcuuuggcaacccugaugcuggugaucuccuugauaaaauguugcaggggggucaacagaacaagaucaauacaacgggguccuagagaaucagaacgaaagguuucuguuacuccccagaacgggaaaguuauaucuucuugggagucuuauaagaguggaggagagacuagacuguaa

SEQ ID NO: 63534 - RNA, 1575 nt, Artificial Sequence
  derived and/or modified CDS sequence (wt) from glycoprotein__RABV__KF484538.1
augguucuucaagcccuucuguucgcaccuuuucugauuucaucguuguguuucgggaaguucccuaucuauacgauaccagacaagcucggcccuuggagcccuaucgauauacaucaucucagcugucccaacaaucuagucguagaagacgaggggugcaacagucugucaggauuuuccuacauggaacugaaagugggauauaucuccgccaucaagguaaacggguucaccuguacuggugucgugacugaagcugagacuuacaccaacuuuguugguuaugucaccaccacauuuaagagaaaacacuuucgcccgaugccggaugcguguagaucugcauacaacuggaaacuggcaggcgauccuagguaugaagagucucuucacaacccauaucccgaguaccacuggcugcggaccguaaaaacaaccaaggagucucuuauagucauaucgccuaguguggcugaccuggauccauaugauaaaucccuccacucaagaauuuuuccuaaugggaaaugcucagggaugacagucucuucuaccuacugcucaacuaaccaugaauacaccauauggaugcccgaaaagguaggucucgggacgucuugugacauuuuuaccaccagcaagggaaagagagcguccaaaggaggcagaaccuguggguuuguggaugaaagaggcuuauacaaauccuugaagggagcauguaagcucaagcugugcgggguuuccgggcucagauuaauggaugggaccuggguugcaauucagacgucagaugagaccaagugguguucuccugaucaguuggugaaucugcaugaccuucacucagaugagauagagcaucuuguuguggaggaguuggucagaaaaagggaggagugcuuagaugcauuagaaucuaucaugaccacuaagucaguaagcuucagacgucucagccacuugagaaagcucguuccaggcuuugggaaagcauauacgauauucaacaaaaccuuaauggaagcugacgcccauuacaagucgguccgaacuuggaaugagauaauccccucaaaaggguguuugagagucggggggaagugucauccucacgugaaugggguguucuucaacggcauaauacuggguccagacgggcauguccugaucccagagaugcagucgucucuucuccaacaacauauagaacuguuggagucuucugugauuccccugaugcacccccuggcagaccucucaacagucuuuaaggauggugacgaagcggaagacuucguugaaguucaccuuccggauguucacaaacagaucucaggaguggaccuuggccuuccaagcuggggaaaguaugugcugaugagugcaggugcuuuggcaacccuaauacuggugaucucuuuaaugaaauguugcaggugggucaacagaacaaaaucaauacaacaggguccuagagaaucagaacgaaagguaucaguuacuccccaaaacgggagaguuauaucuucuugggagucuuacaagauuggaggagagacuggacuguaa

SEQ ID NO: 63535 - RNA, 1575 nt, Artificial Sequence
  derived and/or modified CDS sequence (wt) from glycoprotein__RABV__KF484539.1
augguucuucaagcccuuuuguucgcacccuuucugauuucaucgcugugucuugggaaguucccuauuuauacgauaccagacaagcucggccccuggagcccuaucgauauacaucaucucagcugucccaacaaucuaguuguagaagaugaggggugcaacagucuaucgggauuuucuuacauggaacugaaagugggauauaucuccgccauaaaggugaauggguucaccuguacugguguugugacugaagcugagacuuacaccaacuuuguugguuaugucaccaccacauucaagagaaaacacuuucgcccgaugccggaugcguguagaucugcguacaacuggaaacuggcaggcgauccuagguaugaagagucucuucacaacccuuauccugauuaccacuggcugcggaccguaaaaaccaccaaggagucucuuauugucauaucgccuaguguggcugaccuggauccauaugacaaaucccuccacucaaggauauuuccuggugggaaaugcucagggaugacaguuucuucuaccuacugcucaacuaaccaugaauacacuauauggaugccugaaaaggcaggucuugggacgucuugugacaucuuuaccaccagcaagggaaagagggcgaccaaagguggcaagaccuguggguuuguugaugagagagguuuauacaaguccuugaagggagcaugcaagcucaagcugugcggaguuucaggacuuagacuaauggauggaacuuggguugcaauucagacgucagaugagaccaagugguguucuccugaucaguuggugaauuugcaugaccuucacucagacgagauagagcaucuuguuguagaggaguuggucagaaaaagggaggagugcuuagaugcauuagaaucuaucaugaccacuaaaucaguaagcuucagacgccucagccacuugagaaagcucguuccaggcuuugggaaagcauauacgauauucaacaaaaccuuaauggaagcugacgcccacuacaagucgguccgaacuuggaaugagauaauccccucaaaagggugcuugagagucgggggaaagugucauccucaugugaaugggguguucuucaacggcauaauacuggguccagacgggcacguccugaucccagagaugcaaucgucucuucuccaacaacauauggaacuguuggagucuucugugaucccccugaugcaucccuuggcagacccuucaacagucuuuaaggaugaugacgaagcagaagacuucguugaaguucaccuuccggauguucacaaacaagucucaggaguugaccucggccucccaagcuggggaagguaugugcugaugagugcaggugcucuggcaauccuuaugcuggugaucuccuuaaugaaauguugcacgggggucaacagaacaaaaucaauaaaacaagguucuagagaaucagaacgaaagguaucaauuacuccccagaacgggaaaguuauaucuucuugggagucuuauaagaguggaggagagacuggacuguaa

SEQ ID NO: 63536 - RNA, 1575 nt, Artificial Sequence
  derived and/or modified CDS sequence (wt) from glycoprotein__RABV__KF484540.1
augguucuucaggcccuucuguucgcaccuuuucugauuucaucguugugucuugggaaguucccuauuuauacgauaccagacaagcucgguccuuggagcccuaucgauauacaucaucucagcugucccaacaaucuaguuguagaagacgaggggugcaacagucuaucgggguuuucuuacauggaacugaaagugggauauaucuccgccauaaggguaaauggguucaccuguacuggugucgugacugaagcugagacuuacaccaacuuuguugguuaugucaccaccacauucaagagaaaacacuuucgcccaaugccggaugcguguagaucugcguacaacuggaaacuggcuggugauccuagguaugaagagucucuucacaauccauaucccgauuaccacuggcugcggaccguaaaaaccaccaaggagucucuuaucgucauaucgccuaguguggcugacuuagauccauaugacaaaucccuccacucaaggauauuuccuggugggaaaugcucagggauaacagucucuucuaccuacugcucaacuaaccaugaauacacuauauggaugcccgaaaaggcaggucucgggacgucuugugacaucuuuaccaccagcaagggaaagagggcguccaaaggagguaggaccuguggguuuguggaugaaagaggcuuauacaaguccuugaagggcgcauguaagcucaagcugugugggguuucagggcucagacuaauggaugggacuuggguugcaauucagacgccagaugagaucaagugguguucuccugaucaauuggugaauuugcaugaccuucacucagaugagauagagcaucuuguugcagaggaguuggucagaaaaagagaggagugcuuagaugcacuagaaucuaucaugaccacuaaaucaguaagcuucagacgucucagccacuugagaaagcucguuccaggcuuugggaaagcauauacaauauucaacaagaccuuaauggaggcugacgcccacuacaagucgguccgaacuuggaaugagauaauccccucaaaaggguguuugagagucgggggaaagugucauccucaugugaaugggguauucuucaacggcauaauauuggguccagacgggcauguccugaucccagagaugcagucgucucuucuccaacaacauauggaacuguuggagucgucugugaucccccugaugcaucccuuggcagaccucucaacagucuuuaaggacggugacgaagcggaagacuucauugagguucaccuuccggauguucacaaacaagucucuggggucgaccuuggccucccaagcuggggcaaguaugugcugaugagugcaggugcuuuggcaacccugaugcuggugaucuccuuaauaaaguguugcaagggggucaacagaacaaagucaauacaaugggguccuagagaaucagaaagaaaaguuuccguuacuccccagaacgggaaaguuauaucuucuugggagucuuacaagaguggaggagagacuagacuguaa

SEQ ID NO: 63537 - RNA, 1575 nt, Artificial Sequence
  derived and/or modified CDS sequence (wt) from glycoprotein__RABV__KF484541.1
augauucuuaaagcccuuuuguucgcaccuuuucugauuucaucuuugugucuugggaaguucccuauuuauacgauaccagacaagcucgguccuuggagcccuaucgauauacaucaucucagcugucccaacaaucuagucguagaagaugaggggugcaacagucuaucgggauuuucuuacauggaacugaaagugggauauaucuccgccauaaaggugaauggauucaccuguacugguguugugacugaagcugagacuuacaccaacuuuguugguuaugucaccaccacguucaagagaaaacacuuccgcccgaugccggaugcguguagaucugcguacaacuggaaacuggcaggcgacccuagguaugaagagucucuucacaauccauaucccgauuaccacuggcugcggaccguaaaaaccaccaaggagucucuuauuaucauaucgccuaguguggcugaccuggauccauaugacaaaucccuccacucaaggauauuuccuggugggaaaugcucagggaugacaguuucuucuaccuacugcccaacuaaccaugaauacacuauauggaugccugaaaaggcaagucucgggacaucuugugacaucuucaccaccagcaagggaaagagggcguccagaggaggcaggacuuguggguuuguggaugaaagagguuuauauaaguccuugaagggagcaugcaagcucaaguugugcgggguuucagggcucagacuaauggauggaacuuggguugcaauucagacgucagaugagaccaagugguguucuccugaucaguuggugaaucugcaugaccuucacucagaugagauagagcaucuuguuguagaggaguugguuagaaaaagggaggagugcuuagaugcauuagaaucuaucaugaccacuaaaucagugagcuucagacgucucagccacuugagaaagcucguuccaggcuuugggaaagcauauacgauauucaacaaaaccuuaauggaagccgaugcccacuacaagucaguccgaacuuggaaugagauaauccccucaaaagggugccugagagucgggggaaagugucauccucaugugaaugggguguucuucaacggcauaauacugggcccagacgggcaugucuugaucccagagaugcagucgucucuucuccaacaacauauggaacuguuggagucuucugugaucccccugaugcauccguuggcagacccuucaacagucuuuaaggacgaugacgaagcggaagacuucguugagguucaccuuccggauguucacaaacaggucucaggaguugaccucggccucccaagcuggggaaaguauguucugaugagugcagguacuuuggcaacccugaugcuggugaucuccuuaaugaaauguugcaggggauucaacagaacaaaaucaauaagacaagauucuggagaaucaggacgaaaaguaucaguuacuccccagaacgggaaaguuauaucuucuugggaaucuuauaagaguggaggagagacugggcucuaa

SEQ ID NO: 63538 - RNA, 1575 nt, Artificial Sequence
  derived and/or modified CDS sequence (wt) from glycoprotein__RABV__KF484542.1
augguucuucaaguccuucuguucgcacuuuuuuugauuucaucguugugucuagggaaguucccuaucuauacgauaccagacaagcucggcccuuggagcccuaucgauauacaucaucucagcugucccaacaaucuagucguagaagacgaggggugcaacagucugucaggauuuuccuacauggaacugaaagugggauauaucuccgccauaaaggugaacggguucaccuguacaggugucgugacugaagcugagacuuacaccaacuuuguugguuaugucaccaccacauucaagagaaaacacuuucgcccgaugcccgaugcguguagaucugcauacaacuggaaacuggcaggcgauccuagguaugaagagucucuucacaacccauaucccgaguaccacuggcugcgaaccguaaaaacaaccaaggagucucuuaucgucauaucgccuaguguggcugaccuggauccauaugauaaaucccuccacucaagaauuuuuccuagugggaaaugcucagggaugacagucucuucuaccuacugcucaacuaaccaugaauacaccauauggaugcccgaaaagguaagucucgggacgucuugugacauuuucaccaccagcaagggaaagagagcauccaaaggaggcaggaccuguggguuuguggaugaaagaggcuuauacaaguccuugaagggagccuguaagcucaagcugugcgggguuuccgggcucagauuaauggaugggaccuggguugcaauucagacgucagaugaggccaagugguguucuccugaucaguuggugaaucugcaugaccuucacucggaugagauagagcaucuuguuguggaggaguuggucagaaaaagggaggagugcuuagaugcauuagaaucuaucaugaccaccaagucaguaagcuucagacgucucagccacuugagaaagcucguuccaggcuuugggaaggcauauacgauauucaacaaaaccuuaauggaagcugacgcccauuacaagucgguccgaacuuggaaugagauaauccccucaaaaggguguuugagagucggggggaagugucauccucacgugaaugggguguucuucaacggcauaauacuggguccagacgggcauguccugaucccagagaugcagucgucucuucuccaacaacauauagaacuguuggagucuucugugauuccccugaugcaucccuuggcagaccucucaacagucuuuaaggauggugacgaagcggaagacuucguugaaguucaccuuccggauguucacaaacagaucuccgggguggaccuuggccuuccaagcugggggaaauacguguugaugagugcaggugcuuuggcaacccuaguacuggugaucucuuuaaugaaauguugcaggugggucaacagaacaaaaucaauacaacaggguccuagagaaucagaacgaaggguaucaguuacuccccaaaacgggaaaguuauaucuucuugggagucuuacaagauuggaggagagacugggcuguaa

SEQ ID NO: 63539 - RNA, 1575 nt, Artificial Sequence
  derived and/or modified CDS sequence (wt) from glycoprotein__RABV__KF484543.1
augguucuucaagcccuucuguucgcaccuuuucugauuucaucguugugucuugggaaguucccuaucuauacgauaccagacaagcucggcccuuggagcccuaucgauauacaucaucucagcugucccaacaauuuagucguagaagacgaggggugcaacagucugucaggauuuucauacauggagcugaaagugggauauaucuccgccauaaaggugaacggguucaccuguacuggugucgugacugaagcugagacuuacaccaacuuuguugguuacgucaccaccacauucaagagaaaacacuuucgcccgaugccggaugcguguagaucugcauacaacuggaaacuggcaggcgauccuagguaugaagagucucuucacaacccauaucccgaauaccacuggcugcggaccguaaaaacaaccaaggagucucuuaucgucauaucgccuaguguggcugaccuggauccauaugauaaaucccuccacucaaggauuuuuccuagugggaaaugcucagggaugacagucucuucuaccuacugcucaacuaaccaugaauacaccauauggaugcccgaaaagguaggucucgggacgucuugugacauuuuuaccaccagcaagggaaagagagcguccaaaggaggcaggaccuguggguuuguggaugaaagaggcuuauacaaguccuugaagggagcaugcaagcucaagcugugcgggguuuccgggcucagauuaauggaugggaccuggguugcaaugcagacgucagaugagaccaagugguguucuccugaucaguuggugaaucugcaugaccuucacucagaugagauagagcaucuuguuguggaggaguuggucagaaaaagggaggagugcuuagaugcauuagaaucuaucaugaccacuaagucaguaagcuucagacgucucagccacuugagaaagcucguuccaggcuuugggaaagcauauacgauauucaacaaaaccuuaauggaagcugacgcccauuacaagucgguccgaacuuggagugagauaauccccucaaaaggguguuugagagucggggggaagugucauccucaugugaaugggguguucuucaacggcauaauauuggggccagacgggcauguccugaucccagagaugcagucgucucuucuccaacaacauauggaacuguuggagucuucugugauuccccugaugcaucccuuggcagaccucucaacagucuuuaaggauggugacgaagcggaagacuucguugaaguucaccuuccggauguucacaaacagaucucagggguggaccuuggccucccaagcugggggaaguaugugcugaugagugcaggagcuuuggcaacccuaauacuggugaucucuuuaaugaaauguugcaggugggucaacaaaacaaaaucaauacaacaggguccuagagaaucagaacgaaagguaucaguuacuccccaaaacgggaaaguuaucucuucuugggagucuuacaagauuggaggagagacuggacuguaa

SEQ ID NO: 63540 - RNA, 1575 nt, Artificial Sequence
  derived and/or modified CDS sequence (wt) from glycoprotein__RABV__KF484544.1
augguucuucaagcccuucuguucgcaccuuuucugauuucaucguugugucuugggaaguucccuaucuauacgauaccagacaagcucggcccuuggagcccuaucgauauacaucaucucagcugucccaacaauuuagucguagaagacgaggggugcaacagucugucaggauuuucuuacauggagcugaaagugggauauaucuccgccauaaagguaaacggguucaccuguacuggugucgugacugaagcugagacuuacaccaacuuuguugguuaugucaccaccacauucaagagaaaacacuuucgcccgaugccugaugcguguagaucugcauacaacuggaaacuggcaggcgauccuagguaugaagagucucuucacaacccauaucccgaauaccacuggcugcggaccguaaaaacaaccaaggagucucuuaucgucauaucgccuaguguggcugaccuggauccauaugauaaaucccuccacucaaggauuuuuccuagugggaaaugcucagggaugacagucucuucuaccuacugcucaacuaaccaugaauacaccauauggaugcccgaaaagguaggucucgggacgucuugugacauuuuuaccaccagcaagggaaagaaagcguccaaaggaggcaggaccuguggguuuguggaugaaagaggcuuauacaaguccuugaagggagcaugcaagcucaagcugugcgggguuuccgggcucagauuaauggaugggaccuggguugcaaugcagacgucagaugagaccaagugguguucuccugaucaguugguaaaucugcaugaccuucacucagaugagauagagcaucuuguuguggaggaguuggucagaaaaagggaggagugcuuagaugcauuagaaucuaucaugaccacuaagucaguaagcuucagacgucucagccacuugagaaagcucguuccaggcuuugggaaagcauauacgauauucaacaaaaccuuaauggaagcugacgcacauuacaagucgguccgaacuuggaaugagauaauccccucaaaaggguguuugagagucggggggaagugucauccucaugugaaugggguguucuucaacggcauaauauuggguccagacgggcauguccugaucccagagaugcagucguuucuucuccaacaacauauggaacuguuggagucuucugugauuccccugaugcaucccuuggcagaccucucaacagucuuuaaggauggugacgaagcggaagacuucguugaaguucaccuuccggauguucacaaacagaucucagggguggaccuuggccucccaagcugggggaaguaugugcugaugagugcaggagcuuuggcaacccuaauacuggugaucucuuuaaugaaauguugcaggugggucaacagaacaaaaucaauacaacaggguccuagagaaucagaacgaaaggugucaguuacuccccaaaacgggaaaguuaucucuucuugggagucuuacaagauuggaggagagacuggacuguaa

SEQ ID NO: 63541 - RNA, 1575 nt, Artificial Sequence
  derived and/or modified CDS sequence (wt) from glycoprotein__RABV__KF484545.1
augguucuucaagcccuucuguucgcaccuuuucugauuucaucguugugucuugggaaguucccuaucuauacgauaccagacaagcucggcccuuggagcccuaucgauauacaucaucucagcugucccaacaauuuagucguagaagacgaggggugcaacagucugucaggauuuucauacauggagcugaaagugggauauaucuccgccauaaaggugaacggguucaccuguacuggugucgugacugaagcugagacuuacaccaacuuuguugguuaugucaccaccacauucaagagaaaacacuuucgcccgaugccggaugcguguagaucugcauacaacuggaaacuggcaggcgauccuagguaugaagagucucuucacaacccauaucccgaauaccacuggcugcggaccguaaaaacaaccaaggagucucuuaucgucauaucgccuaguguggcugaccuggauccguaugauaaaucccuccacucaaggauuuuuccuagugggaaaugcucagggaugacagucucuucuaccuacugcucaacuaaccaugaauacaccauauggaugcccgaaaagguaggucucgggacgucuugugacauuuuuaccaccagcaagggaaagaaagcguccaaaggaggcaggaccuguggguuuguggaugaaagaggcuuauacaaguccuugaagggagcaugcaagcucaagcugugcgggguuuccgggcucagauuaauggaugggaccuggguugcaaugcagacuucagaugagaccaagugguguucuccugaucaguuggugaaucugcaugaccuucacucagaugagauagagcaucuuguuguggaggaguuggucagaaaaagggaggagugcuuagaugcauuagaaucuaucaugaccacuaagucaguaagcuucagacgucucagccacuugagaaagcucguuccaggcuuugggaaagcauauacgauauucaacaaaaccuuaauggaagcugacgcccauuacaagucgguccgaacuuggaaugagauaauccccucaaaaggguguuugagagucggggggaagugucauccucaugugaaugggguguucuucaacggcauaauauuggguccagacgggcauguccugaucccagagaugcagucgucucuucuccaacaacauauggaacuguuggagucuucugugauuccccugaugcaucccuuggcagaccucucaacagucuuuaaggauggugacgaagcggaagacuucguugaaguucaccuuccggauguucacaaacagaucucagggguggaccuuggccucccaagcugggggaaguaugugcugaugagugcaggagcuuuggcaacccuaauacuggugaucucuuuaaugaaauguugcaggugggucaacagaacaaaaucaauacaacaggguccuagagaaucagaacgaaaggugucaguuacuccccaaaacgggaaaguuaucucuuccugggagucuuacaagauuggaggagagacuggauuguaa

SEQ ID NO: 63542 - RNA, 1575 nt, Artificial Sequence
  derived and/or modified CDS sequence (wt) from glycoprotein__RABV__KF484546.1
augguucuucaagcccuucuguucgcaccuuuucugauuucaucguugugucuugggaaguucccuaucuauacgauaccagacaagcucggcccuuggagcccuaucgauauacaucaucucagcugucccaacaauuuagucguagaagacgaggggugcaacagucugucaggauuuucauacauggagcugaaagugggauauaucuccgccauaaaggugaacggguucaccuguacuggugucgugacugaagcugagacuuacaccaacuuuguugguuacgucaccaccacauucaagagaaaacacuuucgcccgaugccggaugcguguagaucugcauacaacuggaaacuggcaggcgauccuagguaugaagagucucuucacaacccauauccagaauaccacuggcugcggaccguaaaaacaaccaaggaaucucuuaucgucauaucgccuaguguggcugaccuggauccauaugauaaaucccuccacucaaggauuuuuccuagugggaaaugcucagggaugacagucucuucuaccuacugcucaacuaaccaugaauacaccauauggaugcccgaaaagguaggucucgggacgucuugugacauuuuuaccaccagcaagggaaagagagcguccaaaggaggcaggaccuguggguuuguggaugaaagaggcuuauacaaguccuugaagggagcaugcaagcucaagcugugcgggguuuccgggcucagauuaauggaugggaccuggguugcuaugcagacgucagaugagaccaagugguguucuccugaucaguuggugaaucugcaugaccuucacucagaugagauagagcaucuuguuguggaggaguuggucagaaaaagggaggagugcuuagaugcauuagaaucuaucaugaccacuaagucaguaagcuucagacgucucagccacuugagaaagcucguuccaggcuuugggaaagcauauacgauauucaacaaaaccuuaauggaggcugacgcccauuacaagucgguccgaacuuggaaugagauaauccccucaaaaggguguuugagagucggggggaagugucauccucauguaaaugggguguucuucaacggcauaauauuggguccggacgggcauguccugaucccagagaugcagucuucucuucuccaacaacauauggagcuguuggagucuucugugauuccccugaugcaucccuuggcagaccucucaacagucuuuaaggauggugacgaagcggaagacuucguugaaguucaccuuccggauguucacaaacagaucucagggguggaccuuggccucccaagcugggggaaguaugugcugaugagugcaggagcuuuggcaacccuaauacuggugaucucuuuaaugaaaugcugcaggugggucaacagaacaaaaucaauacaacaggguccuagagaaucagaacgaaagguaucaguuacuccccaaaacgggaaaguuaucucuucuugggagucuuacaagauuggaggagagacuggacuguaa

SEQ ID NO: 63543 - RNA, 1575 nt, Artificial Sequence
  derived and/or modified CDS sequence (wt) from glycoprotein__RABV__KF484547.1
augguucuucaagcccuucuguucgcaccuuuucugaucucaucguugugucuugggaaguucccuaucuauacgauaccagacaagcucgguccuuggagcccuaucgauauacaucaucucagcugucccaacaaucuaguuguagaagacgagggguguaacagucuaucaggauuuucuuacauggaacugaaagugggauauaucuccgccauaaaggugaacggguucaccuguacugguguugugacugaagcugagacuuacaccaacuuuguugguuaugucaccaccacauucaagagaaaacacuuucgcccgaugccggaugcguguagaucugcauacaacuggaaacuggcaggcgauccuagguaugaagagucucuucacaacccauaucccgauuaccacuggcugcggaccguaaaaaccaccaaggagucucuuaucgucauaucgccuaguguggcugaccuggacccauaugacaaaucccuccauucaaggauuuuuccuagugggaagugcucaggaaugacagucucuucuaccuacugcucaacuaaccaugaauacacuauauggaugcccgaaaaggcaggucucgggacgucuugugacaucuucacaaccagcaagggaaagagagcguccaaaggaggcaggaccuguggguuuguggaugaaagaggcuuauacaaguccuugaagggagcauguaagcucaagcugugcgggguuuccgggcuuagacuaauggaugggacuuggguugcaauucagacaucagaugagaccaaguggugcucuucugaucaguuggugaaucugcaugaccuucacucagaugagauagagcaucuuguuguagaggaguuggucagaaagagggaggagugcuuagaugcauuagaaucuaucaugaccacuaaaucaguaagcuucagacgucucagccacuugagaaagcucguuccaggcuuugggaaagcauauacgauauuuaacaaaaccuuaauggaagcugacgcccacuacaagucgguccgaacuuggaaugagguaauccccucaaaaggauguuugagaguuggggggaagugucauccucacgugaaugggguguucuuuaacggcauaauacuggguccagacggccauguccugaucccagagaugcagucgucucuucuccagcaacauauggaacuguuggagucuucugugaucccccugaugcaucccuuggcagacauaucaacagucuuuaaggauggugacgaagcggaagacuucguugaaguucaccuuccggauguucacaaacagaucucagggguggaccuuggccucccaagcuggggaaaguaugugcugaugagugcaggugcuuuggcaauccuaaugcugaugaucucuuuaaugaaauguugcaggggggucaacagaacgaaaucaauacaacaggguccuagagaaucagaaagaaagguaucaguuacuccccagaacgggaaaguuauauccucuugggagucuuauaagaguggaggagagacuggacuguaa

SEQ ID NO: 63544 - RNA, 1575 nt, Artificial Sequence
  derived and/or modified CDS sequence (wt) from glycoprotein__RABV__KF484548.1
augguucuucaaguccuucuguucgcacuuuuuuugauuucaucguugugucuagggaaguucccuaucuauacgauaccagacaagcucggcccuuggagcccuaucgauauacaucaucucagcugucccaacaaucuagucguagaagacgaggggugcaacagucugucaggauuuucuuacauggaacugaaagugggauauaucuccgccauaaaggugaacggguucaccuguacaggugucgugacugaagcugagacuuacaccaacuuuguugguuaugucaccaccacauucaagagaaaacacuuucgcccgaugccugaugcguguagaucugcauacaacuggaaacuggcaggcgauccuagguaugaagagucucuucacaacccauaucccgaguaccacuggcugcgaaccguaaagacaaccaaggaaucucuuaucgucauaucgccuaguguggcugaccuggauccauaugauaaaucccuccacucaagaauuuuuccuagugggaaaugcucagggaugacagucucuucuaccuacugcucaacuaaccaugaauacaccauauggaugcccgaaaagguaagucucgggacgucuugugacauuuucaccaccagcaagggaaagagagcguccaaaggaggcaggaccuguggguuuguggaugaaagaggcuuauacaaguccuugaagggagccuguaagcucaagcugugcgggguuuccgggcucagauuaauggaugggaccuggguugcaauucagacgucagaugaggccaagugguguucuccugaucaguuggugaaucugcaugaccuucacucggaugagauagagcaucuuguuguggaggaguuggucagaaaaagggaggagugcuuagaugcauuagaaucuaucaugaccaccaagucaauaagcuucagacgucucagccacuugagaaagcucguuccaggcuuugggaaggcauauacgauauucaacaaaaccuuaauggaagcugacgcccauuacaagucgguccgaacuuggaaugagauaauccccucaaaaggguguuugagagucggggggaagugucauccucacgugaaugggguguucuucaacggcauaauacuggguccagacgggcauguccugaucccagagaugcagucgucucuucuucaacaacauauagaacuguuggagucuucugugauuccccugaugcaucccuuggcagaucucucaacagucuuuaaggauggugacgaagcggaagacuucguugaaguucaccuuccggauguucacaaacagaucucagggguggaccuuggccuuccaagcugggggaaauacguguugaugagugcaggugcuuuggcaacccuaguacuggugaucucuuuaaugaaauggugcaggugggucaacaaaacaaaaucaauacaacaggguccuagagaaucagaacgaaagguaucaguuacuccccaaaacgggaaaguuauaucuucuugggagucuuacaagauuggaggagagacugggcuguaa

SEQ ID NO: 63545 - RNA, 1575 nt, Artificial Sequence
  derived and/or modified CDS sequence (wt) from glycoprotein__RABV__KF484549.1
augguucuucaagcccuuuuguucgcaccuuuucugaucucaucuuugugucuugggaaguucccuauuuauacgauaccagacaagcucgguccuuggagcccuaucgauauacaucaucuuagcugucccaacaaucuagucguagaagaugaggggugcaacagucuaucgggauuuucuuacauggaacugaaagugggauauaucucugccauaaaggugaauggauucaccugcacugguguugugacugaagcugagacuuacaccaacuuuguugguuaugucaccaccacauucaagagaaaacacuuucgcccgaugccggaugcguguagaucugcguacaauuggaaacuggcaggugauccuagguaugaagagucucuucacaacccauaccccgauuaccacuggcuucggaccguaaaaaccaccaaggagucucuuauugucauaucgccuaguguggcugaccuggauccauaugacaagucccuccacucaaggauauuuccuggugggaaaugcucugggaugacagucucuucuaccuacugcccaacuaaccaugaauacacuauauggaugccugagaaggcaggucucgggacgucuugugacaucuuuaccaccagcaagggaaagagggcguccaaaggaggcaggacuuguggguuuguggaugaaagagguuuauauaaguccuugaagggagcaugcaagcucaagcugugcgggguuucagggcucagacuaauggauggaacuuggguugcaauucagacgucagaugagaccaagugguguucuccugaucaguuggugaauuugcaugaccuucacucagaugagauagagcaccuuguuguagaggaguugguuagaaaaagggaggagugcuuagaugcauuagaaucuaucaugaccacuaaaucaguaagcuucagacgucucagccacuugagaaagcucguuccaggcuuugggaaagcauauacgauauucaacaaaaccuuaauggaagcugacgcccacuacaagucaguccgaacuuggaaugaaauaauccccucaaaagggugccugagaguugggggaaaaugucauccucaugugaaugggguguucuucaacggcauaauacuggguccagacgggcaugucuugaucccagagaugcagucgucucuucuucaacaacauguggaauuguuggagucuucugugauccccuugaugcaucccuuggcagaccccucaacagucuuuaaggacgaugacgaagcggaagacuucguugagguucaccuuccggauguucacagacaggucuccggaguugaccucggccucccaagcuggggaaaguaugugcugaugagugcaggugcuuuggcaacccugaugcuggugaucuccuuaaugaaauguugcaggggauucaacagaacaaaaucaacaagacaagguucuagagaaucagaacgaaaaguaucaguuacuccccaaaacgggaaaguuauauccucuugggagucuuauaagaguggaggagagacaggacuauaa

SEQ ID NO: 63546 - RNA, 1575 nt, Artificial Sequence
  derived and/or modified CDS sequence (wt) from glycoprotein__RABV__KF484550.1
augguucuucaagcccuucuguucgcaccuuuucugauuucaucguuguguuuugggaaguuccccauuuacacgauaccggacaagcuagguccuuggagcccuaucgauauacaucaucucagcugucccaacaaucuaguuguagaagacgaggggugcaacaguuuaucaggauucucuuacauggaacugaaagugggauauaucucugccauaaaggugaacggguucaccuguacuggugucgugaccgaagcagagacuuacaccaacuuugucgguuaugucaccaccacauucaagagaaaacacuuucgcccgaugccugacgcgugcaggucugcauacaacuggaaaguagcgggcgauccuagguaugaagagucucuucacaacccguaucccgauuaccacuggcugcggacuguaaaaaccaccaaagagucucuuaucaucauaucgccuaguguggccgaccuggauccauaugacaaaucccuccacucaaggauuuuuccuggugggaaaugcucaggaaugacaaucucuuccaccuacugcucaacuaaccacgacuacacuauauggaugccugagaagacgggucucgggacauccugugacaucuuuaccaccaguaaggggaagagagcuucaaaaggaggcaggaccuguggguuuguggaugaaagaggccuauacaagucccugaagggagcauguaagcucaagcugugcgggguuuccgggcucagacuaauggaugggacuugggcggcaauucagacgucagaugagaccaagugguguucuccugaucaguuggugaaucuucaugaccuucacucagaugagauagagcaucuuguuguggaggaguuggucagaagaagggaagagugcuuagaugcauuagagucuaucaugaccaccaaaucagugagcuucagacgucucagccaccugagaaaacucguaccagguuucgggaaagcauauacgauauucaacaaaaccuuaauggaagcugacgcccacuacaagucaguccgaacuuggaaugagauaauccccucaaaaggguguuugagagucgggggaaagugucauccucaugugaacgggguauucuucaacggcauaauacuggguccagaugggcauguccugauuccagagaugcagucaucucuucuccaacaacauauggaacuucuggagucuucugugaucccccugaugcaucccuuggcagaccucucaaccgucuuuaaggacggugaugaagcggaagacuucguugaaguucaccuuccagauguucacaaacagguuucagggguggaccuuggccucccaagcugggggaaguacaugcugaugagugcaggugcucuggcaacccuaaugcuggugguccccuuaaugaagugcugcaggagggucaacagaacaaaaucaauacaacagggucccagagaaucagaucgaaagguaucaguuacuccucagagcgggaaaguuauaucuucuugggagucuuauaagaguggaggagggacuggacuguaa

SEQ ID NO: 63547 - RNA, 1575 nt, Artificial Sequence
  derived and/or modified CDS sequence (wt) from glycoprotein__RABV__KF484551.1
augguucuucaagcccuucuguucgcaccuuuucugauuucaucguugugucuugggaaguucccuaucuauacgauaccagacaagcucggcccuuggagcccuaucgauauacaucaucucagcugucccaacaaucuagucguagaagacgaggggugcaacagucugucaggauucucauacauggaacuaaaagugggauauaucuccgccauaaaggugaacggguucaccuguacuggugucgugacugaagcugagacuuacaccaacuuuguugguuaugucaccaccacauucaagagaaaacacuuucgcccgaugccggaugcguguagaucugcauacaacuggaaacuggcuggcgauccuagguaugaagagucucuucacaacccauaucccgaauaccacuggcugcggacuguaaaaacaaccaaggagucucuuaucgucauaucgccuaguguggcugaccuggauccauaugauaaaucccuccacucaaggauuuuuccuagugggaaaugcucagggaugacagucuccucuaccuacugcucaacuaaccaugaauacaccauauggaugcccgaaaagguaggucucgggacgucuugugacauuuuuaccaccagcaaggggaagagagcguccaaaggaggcaggaccuguggguuuguggaugaaagaggcuuauacaaguccuugaagggagcauguaagcucaagcugugcgggguuuccgggcucagauuaauggaugggaccuggguugcaaugcagacgucagaugagaccaagugguguucuccugaucaguugguaaaucugcaugaccuucacucagaugagauagagcaucuuguuguggaggaguuggucagaaaaagggaggagugcuuagaugcauuagaaucuaucaugaccacuaagucaguaagcuucagacgucucagccacuugagaaagcucguuccaggcuucgggaaagcauauacgauauucaacaaaaccuuaauggaagcugacgcccauuacaagucgguccgaacuuggaaugagauaauccccucaaaaggguguuugagagucggggggaggugucauccucaugugaaugggguguucuucaacggcauaauauuggguccagacgggcauguccugaucccagagaugcagucgucucuucuccaacaacauauggaacuguuggagucuucuguaauuccccugaugcaucccuuggcagaccucucaacagucuuuaaggauggugacgaagcggaagacuucguugaaguucaccuuccggauguucacaaacagaucucagggguggaccuuggccucccaagcuggggaaaguaugugcugaugagugcaggagcuuuggcaacccuaauacuggugaucucuuuaaugaaauguugcaggugggucaacagaacaaaaucaauacaacaggguccuagagaaucagaacgaaagguaucaguuacuccccaaaacgggaaaguuaucucuucuugggagucuuacaagauuggaggagagacuggacuguaa

SEQ ID NO: 63548 - RNA, 1575 nt, Artificial Sequence
  derived and/or modified CDS sequence (wt) from glycoprotein__RABV__KF484552.1
augguucuucaagcccuucuguucgcaccuuuucugauuucaucguugugucuugggaaguucccuaucuauacgauaccagacaagcucggcccuuggagccccaucgauauacaucaucucagcugucccaacaaucuagucguagaagacgaggggugcaacaaccugucaggauucuccuacauggaacugaaagugggauauaucuccgccauaaaggugaacggguucaccuguacuggugucgugacugaagcugagacuuacaccaacuuuguugguuaugucaccaccacauucaagagaaaacacuuucgcccgaugccggaugcguguagaucugcauacaacuggaaacuggcaggcgauccuagguaugaagagucucuucacaacccauaucccgaguaccacuggcugcggaccguaaaaacaaccaaggagucucuuaucgucauaucgccuaguguggcugaccuggauccauaugauaaaucccuccacucaaggauuuuuccuagugggaaaugcucagggaugacagucucuucuaccuacugcucaacuaaccaugaauacaccauauggaugcccgaaaaggcaggucucgggacgucuugugacauuuuuaccaccagcaagggaaagagagcguccaaaggaggcaggacuuguggguuuguggaugaaagaggcuuauacaaguccuugaagggagcauguaagcucaagcugugcgggguuuccgggcucagauugauggaugggaccuggguugcaauucagacgucagaugagaccaagugguguucuccugaucaguuggugaaucugcaugaccuucacucagaugagauagagcaucuuguuguggaggaguuggucagaaaaagggaggagugcuuagaugcauuagaaucuauuaugaccaccaagucaguaagcuucagacgucucagccacuugagaaagcucguuccaggcuuugggaaagcauauacgauauucaacaaaaccuuaauggaagcugacgcccauuacaagucgguccgaacuuggaaugagauaauccccucaaaaggguguuugagagucggggggaagugucauccucaugugaaugggguguucuucaacggcauaauauuggguccagacgggcauguccugaucccagagaugcagucgucucuucuccaacaacauauggaacuguuggagucuucugugauuccccugaugcaucccuuggcagaccucucaacagucuuuaaggauggugacgaagcagaagacuucguugaaguucaccuuccagauguucacaaacagaucucagggguggaccuuggccucccaagcuggggaaaauaugugaugaugagugcaggugcuuuugcaacccuaauacuggugaucucuuuaaugaaauguugcaggugggucaacagaacaaaaucaauacaacaggguccuagagaaucagaacgaaagguaucaguuacuccccaaaacgggaaaguuauaucuucuugggagucuuacaagaucggaggagagacuggacuguaa

SEQ ID NO: 63549 - RNA, 1575 nt, Artificial Sequence
  derived and/or modified CDS sequence (wt) from glycoprotein__RABV__KF484553.1
augguucuucaagcccuucuguucgcaccuuuucugauuucaucguugugucucgggaaguucccuaucuauacgauaccagacaagcucggcccuuggagcccuaucgauauacaucaucucagcugucccaacaaucuagucguagaagacgaggggugcaacagucugucaggauuuuccuacauggaacugaaagugggauauaucuccgccauaaaggugaacggguucaccuguacaggugucgugacugaagcugagacuuacaccaacuuuguugguuaugucaccaccacauucaagagaaaacacuuucgcccgaugccugaugcguguagaucugcauacaacuggaaacuggcaggcgauccuagguaugaagagucucuucacaacccauaucccgaguaccacuggcugcgaaccguaaaaacaaccaaggagucucuuaucgucauaucgccuaguguggcugaccuggauccauaugauaaaucccuccacucaagaauuuuuccuagugggaaaugcucagggaugacagucucuucuaccuacugcucaacuaaccaugaauacaccauauggaugcccgaaaagguaagucucgggacgucuugugacauuuuuaccaccagcaagggaaagagagcguccaaaggaggcaggaccuguggguuuguagaugaaagaggcuuauacaaguccuugaagggagccuguaagcucaagcugugcgggguuuccgggcucagauuaauggaugggaccuggguugcaauucagacgucagaugagaccaagugguguucuccugaucaguuggugaaucugcaugaccuucacucagaugagauagagcaucuuguuguggaggaguuggucagaaaaagggaggagugcuuagaugcauuagaaucuaucaugaccaccaagucaguaagcuucagacgucucagccacuugagaaagcucguuccaggcuuugggaaggcauauacgauauucaacaaaaccuuaauggaagccgacgcccauuacaagucgguccgaacuuggaaugagauaauccccucaaaaggguguuugagagucggggggaagugucauccucacgugaaugggguguucuucaacggcauaauacuggguccagacgggcauguccugaucccagagaugcagucgucucuucuccaacaacauauagaacuguuggagucuucugugauuccccugaugcaucccuuggcagaccucucaacagucuuuaaggauggugacgaagcggaagacuucguugaaguucaccuuccggauguucacaaacagaucucagggguggaccuuggccuuccaagcuggggaaaauacguguugaugagugcaggugcuuuggcaacccuaguacuggugaucucuuuaaugaaauguugcaggugggucaacagaacaaaaucaauacaacaggguccuagagaaucagaacgaaagguaucaguuacuccccaaaacgggaaaguuauaucuucuugggagucuuacaagauuggaggagagacuggacuguaa

SEQ ID NO: 63550 - RNA, 1575 nt, Artificial Sequence
  derived and/or modified CDS sequence (wt) from glycoprotein__RABV__KF484554.1
augguucuucaagcccuucuguucgcaccuuuucugauuucaucguugugucuugggaaguucccuaucuauacgauaccagacaagcucggcccuuggagccccaucgauauacaucaucucagcugucccaacaaucuagucguagaagacgaggggugcaacaaccugucaggauucuccuacauggaacugaaagugggauauaucuccgccauaaaggugaacggguucaccuguacuggugucgugacugaagcugagacuuacaccaacuuuguugguuaugucaccaccacauucaagagaaaacacuuucgcccgaugccggaugcguguagaucugcauacaacuggaaacuggcaggcgauccuagguaugaagagucucuucacaacccauaucccgaguaccacuggcugcggaccguaaaaacaaccaaggagucucuuaucgucauaucgccuaguguggcugaccuggauccauaugauaaaucccuccacucaaggauuuuuccuagugggaaaugcucagggaugacagucucuucuaccuacugcucaacuaaccaugaauacaccauauggaugcccgaaaaggcaggucucgggacgucuugugacauuuuuaccaccagcaagggaaagagagcguccaaaggaggcaggacuuguggguuuguggaugaaagaggcuuauacaaguccuugaagggagcauguaagcucaagcugugcgggguuuccgggcucagauugauggaugggaccuggguugcaauucagacgucagaugagaccaagugguguucuccugaucaguuggugaaucugcaugaccuucacucagaugagauagagcaucuuguuguggaggaguuggucagaaaaagggaggagugcuuagaugcauuagaaucuauuaugaccaccaagucaguaagcuucagacgucucagcuacuugagaaagcucguuccaggcuuugggaaagcauauacgauauucaacaaaaccuuaauggaagcugacgcccauuacaagucgguccgaacuuggaaugagauaauccccucaaaaggguguuugagagucggggggaagugucauccucaugugaaugggguguucuucaacggcauaauauuggguccagacgggcauguccugaucccagagaugcagucgucucuucuccaacagcauauggaacuguuggagucuucugugauuccccugaugcaucccuuggcagaccucucaacagucuuuaaggauggugacgaagcagaagacuucguugaaguucaccuuccagauguucacaaacagaucucagggguggaccuuggccucccaagcuggggaaaauaugugaugaugagugcaggugcuuuggcaacccuaauacuggugaucucuuuaaugaaauguugcaggugggucaacagaacaaaaucaauacaacaggguccuagagaaucagaacgaaagguaucaguuacuccccaaaacgggaaaguuauaucuucuugggagucuuacaagaucggaggagagacuggacuguaa

SEQ ID NO: 63551 - RNA, 1575 nt, Artificial Sequence
  derived and/or modified CDS sequence (wt) from glycoprotein__RABV__KF484555.1
augguucuucaagcccuuuuguucgcaccucuucugaucucgucguugugccuugggaaguucccuauuuauacgauaccagaaaagcucgguccuuggagcccuaucgauauacaucaucucagcugucccaacaaucuagucguagaagaugaggggugcaacagucuaucgggauuuucuuacauggaacuaaaagugggauauaucucugccauaaaggugaacggguucaccuguacugguguugugacugaagcugagacuuacaccaacuuuguugguuaugucaccaccacauucaagagaaaacacuuuagcccgaugccggaugcguguagaucugcguacaacuggaaacuggcaggcgauccuagguaugaagagucucuucacaacccauaucccgauuaccacugguugcggaccguaaaaaccaccaaggagucucuuauugucauaucgccuaguguggcugaccuggauccauaugacaagucccuccacucaaggauauuuccuggugggaaaugcucaggaaugacaguuucuucuaccuacugcucaacuaaccaugaauacacuauauggaugccugaaaagccaggucucgggacgucuugugacaucuucaccaccagcaagggaaagagggcguccaaggaaggcaggaccuguggguuuguggaugaaagagguuuauacaaguccuugaagggagcaugcaagcucaagcugugcgggguuucagggcucagacuaauggauggaacuuggguugcaauucagacgucagaugaaaucaaguggugcucuccugaucaguuggugaauuugcaugaccuucacucagaugagauagagcaucuuguuguagaggaguuagucagaaaaagggaggagugcuuagaugcauuagaaucuaucaugaccacuaaaucaguaagcuucaggcgccucagccacuugagaaagcucguuccaggcuuugggaaagcauauacaauauucaacaaaaccuuaauggaagcugacgcccacuacaagucgguccgaacuuggaaugagauaauccccucaaaagggugcuugagagucgggggaaagugucauccucaugugaaugggguguucuucaacggcauaauacuggguccagacggacauguccugaucccagagaugcaaucgucucuucuccaacaacauguggaacuguuggagucuucugugaucccccugaugcauccuuuggcagacccuucaacagucuuuaaggacgaugacgaagcggaagacuucguugaaguucaccuuccggauguucaaaaacaggucucaggaguugaccucggccucccaagcuggggaaaguaugugcugaugagugcaggugcauuggcaacccuggugcuggugaucuccuuaaugaaauguugcagggggaucaacagaacaaaauuaauaaaacaaggcuccagagaaucagaacgaaagguaucaguuacuccccagaacgggaaaguuauauccucuugggagucuuauaagaguggaggagagacuggacuauaa

SEQ ID NO: 63552 - RNA, 1575 nt, Artificial Sequence
  derived and/or modified CDS sequence (wt) from glycoprotein__RABV__KF484556.1
augguucuucaagcccuucuguucgcaccuuuucugauuucaucguugugucuugggaaguucccuaucuauacgauaccagacaagcucggcccuuggagccccaucgauauacaucaucucagcugucccaacaaucuagucguagaagacgaggggugcaacaaccugucaggauucuccuacauggaacugaaagugggauauaucuccgccauaaaggugaacggguucaccuguacuggugucgugacugaagcugagacuuacaccaacuuuguugguuaugucaccaccacauucaggagaaaacacuuucgcccgaugccggaugcguguagaucugcauacaacuggaaacuggcaggcgauccuagguaugaagagucucuucacaacccauaucccgaguaccacuggcugcggaccguaaaaacaaccaaggagucucuuaucgucauaucgccuaguguggcugaccuggauccauaugauaaaucccuccacucaaggauuuuuccuagugggaaaugcucagggaugacagucucuucuaccuacugcucaacuaaccaugaauacaccauauggaugccugaaaaggcaggucucgggacgucuugugacauuuuuaccaccagcaagggaaagagagcguccaaaggaggcaggacuuguggguuuguggaugaaagagguuuauacaaguccuugaagggagcauguaagcucaagcugugcgggguuuccgggcucagauugauggaugggaccuggguugcaauucagacgucagaugagaccaagugguguucuccugaucaguuggugaaucugcaugaccuucacucagaugagauagagcaucuuguuguggaggaguuggucagaaaaagggaggagugcuuagaugcauuagaaucuauuaugaccaccaagucaguaagcuucagacgucucagccacuugagaaagcucguuccaggcuuugggaaagcauauacgauauucaacaaaaccuuaauggaagcugacgcccauuacaagucgguccgaacuuggaaugagauaauccccucaaaaggguguuugagagucggggggaagugucauccucaugugaaugggguguucuucaacggcauaauauuggguccagacgggcauguccugaucccagagaugcagucgucucuucuccaacaacauauggaacuguuggagucuucugugauuccccugaugcaucccuuggcagaccucucaacagucuuuaaggauggugacgaagcagaagacuucguugaaguucaccuuccagauguucacaaacagaucucagggguggaccuuggccucccaagcuggggaaaauaugugaugaugagugcaggugcuuuggcaacccuaauacuggugaucucuuuaaugaaauguugcaggugggucaacagaacaaaaucaauacaacaggguccuagagaaucagaacgaaagguaucaguuacuccccaaaacgggaaaguuauaucuucuugggagucuuacaagaucggaggagagacuggacuguaa

SEQ ID NO: 63553 - RNA, 1575 nt, Artificial Sequence
  derived and/or modified CDS sequence (wt) from glycoprotein__RABV__KF484557.1
augguucuucaagcccuucuguucgcaccuuuucugauuucaucguuguguuuugggaaauuccccauuuacacgauaccggacaagcuagguccuuggagcccuaucgauauacaucaucucagcugucccaacaaucuaguuguagaagacgaggggugcaacaguuuaucaggauucucuuacauggaacugaaagugggauauaucucugccauaaaggugaacggguucaccuguacuggugucgugaccgaagcagagacuuacaccaacuuugucgguuaugucaccaccacauucaagagaaaacacuuucgcccgaugccugacgcgugcaggucugcauacaacuggaaaguagcgggcgauccuagauaugaagagucucuucacaacccauaucccgauuaccacuggcugcggacuguaaaaaccaccaaagagucucuuaucaucauaucgccuaguguggccgaccuggauccauaugacaaaucccuccacucaaggauuuuuccuggugggaaaugcucaggaaugacaaucucuuccaccuacugcucaacuaaccaugacuacacuauauggaugccugagaaagcgggucucgggacauccugugacaucuuuaccaccaguaaggggaagagagcuucaaaaggaggcaggaccuguggguuuguggaugaaagaggccuauacaagucccugaagggagcauguaagcucaagcugugcgggguuuccgggcucagacuaauggaugggacuugggcggcaauucagacgucagaugagaccaagugguguucuccugaucaguuggugaaucuucaugaccuucacucagaugagauagagcaucuuguuguggaggaguuggucagaagaagggaagagugcuuagaugcauuagagucuaucaugaccaccaaaucagugagcuucagacgucucagccaccugagaaaacucguaccagguuuugggaaagcauauacgauauucaacaaaaccuuaauggaagcugacgcccacuacaagucgguccgaacuuggaaugagauaauccccucaaaaggauguuugagagucgggggaaagugucauccucaugugaaugggguauucuucaacggcauaauacuggguccagauggacauguccugauuccagagaugcagucaucucuucuccaacaacauauggaacuucuggagucuucugugauaccccugaugcaucccuuggcagaccucucaaccgucuuuaaggacggugaugaagcggaagacuucguugaaguucaccuuccggauguucacaaacagguuucagggguggaccuuggccucccaagcugggggaaguacaugcugaugagugcaggugcucuggcaacccugaugcuggugaucccauuaaugagaugcugcaggagggucaacagaacaaagucaauacaacagggucccagagaaucagaucgaaagguaucaguuacuccucagaacgggaaaguuauaucuucuugggagucuuauaagaguggaggagagacuggacuguaa

SEQ ID NO: 63554 - RNA, 1575 nt, Artificial Sequence
  derived and/or modified CDS sequence (wt) from glycoprotein__RABV__KF484558.1
augauucuucacgcccuucuguucgcaccuuuucugauuucaucguugugucuugggaaguucccuaucuauacgauaccagauaagcucggcccuuggagcccuaucgauauacaucaucucagcugucccaacaaucuagucauagaagacgaggggugcaacagucugucaggauuuucuuauauggaacugaaagugggauauaucuccgccauaaaggugaacggguucaccuguacuggugucgugacugaagcugagacuuacaccaacuuuguugguuaugucaccaccacauucaagagaaaacacuuucgcccgaugccggaugcguguagaucugcauacaauuggaaacuggcaggcgauccuagguaugaagagucucuucacaacccauaucccgaguaccacuggcugcggaccguaaagacaaccaaggagucucuugucgucauaucgccuaguguggcugaccuggauccauaugauaaaucccuccacucgaggauuuuuccuagugggaaaugcucagggaugacagucucuucuaccuacugcucaacuaaccaugaauacaccauauggaugcccgaaaagguaggucucgggacgucuugugacauuuuuaccaccagcaagggaaagagagcguccaaagggggcaggaccuguggguuuguggaugaaagaggcuuauacaaguccuugaagggagcauguaagcucaagcugugcgggguuuccgggcucagauuaauggaugggaccuggguugcaauucagacgucagaugagaccaagugguguucuccugaucaguuggugaaucugcaugaccuucacucagaugagauagagcaucuuguuguggaggaguuggucagaaaaagggaggagugcuuagaugcauuagaaucuaucaugaccacuaagucaguaagcuucagacgucucagccacuugagaaagcucguuccaggcuuugggaaagcauauacgauauucaacaaaaccuuaauggaagcugacgcccauuacaagucgguccgaacuuggaaugagauaauccccucaaaaggauguuugagaguuggggggaagugucauccucaugugaaugggguguucuucaacggcauaauauuggguccagacgggcauguccugaucccagagaugcagucgucucuucuccaacaacauauggaacuguuggagucuucuguaauuccccugaugcaucccuuggcagaccucucaacagucuucaaggauggugacgaagcggaagacuucguugaaguucaccuuccggauguucacaaacagaucucagggguggaccuuggccucccaagcuggggaaaguaugugcugaugagugcaggugcuuuggcaacccuaauacuggugaucucuuuaaugaaauguugcaggugggucaacagaacagaaucaauacaacaggguccuagagaaucagaacgaaaggugucaguuacuccccaaaacgggaaaguuaucucuucuugggagucuuacaagauugggggagagacuggacuguaa

SEQ ID NO: 63555 - RNA, 1575 nt, Artificial Sequence
  derived and/or modified CDS sequence (wt) from glycoprotein__RABV__KF484559.1
augguucuucaagcccuucuguucgcaccuuuucugauuucaucguuguguuuugggaaauuccccauuuacacgauaccggacaagcuagguccuuggagcccuaucgauauacaucaucucagcugucccaacaaucuaguuguagaagacgaggggugcaacaguuuaucaggauucucuuacauggaacugaaagugggauauaucucugccauaaaggugaacggguucaccuguacuggugucgugaccgaagcagagacuuacaccaacuuugucgguuaugucaccaccacauucaagagaaaacacuuucgcccgaugccugacgcgugcaggucugcauacaacuggaaaguagcgggcgauccuagauaugaagagucucuucacaacccauaucccgauuaccacuggcugcggacuguaaaaaccaccaaagagucucuuaucaucauaucgccuaguguggccgaccuggauccauaugacaaaucccuccacucaaggauuuuuccuggugggaaaugcucaggaaugacaaucucuuccaccuacugcucaacuaaccaugacuacacuauauggaugccugagaaagcgggucucgggacauccugugacaucuuuaccaccaguaaggggaagagagcuucaaaaggaggcaggaccuguggguuuguggaugaaagaggccuauacaagucccugaagggagcauguaagcucaagcugugcgggguuuccgggcucagacuaauggaugggacuugggcagcaauucagacgucagaugagaccaagugguguucuccugaucaguuggugaaucuucaugaccuucacucagaugagauagagcaucuuguuguggaggaguuggucagaagaagggaagagugcuuagaugcauuagagucuaucaugaccaccaagucagugagcuuuagacgucucagccaccugagaaaacucguaccagguuuugggaaagcauauacgauauucaacaaaaccuuaauggaagcugacgcccacuacaagucgguccgaacuuggaaugagauaauccccucaaaaggguguuugagagucgggggaaagugucauccucaugugaaugggguauucuucaacggcauaauacuggguccagauggacauguccugauuccagagaugcagucaucucuucuccaacaacauauggaacuucuggagucuucugugauaccccugaugcaucccuuggcagaccucucaaccgucuuuaaggacggugaugaagcggaagacuucguugaaguucaccuuccggauguucacaaacagguuucagggguggaccuuggccucccaagcugggggaaguacaugcugaugagugcaggugcucuggcaacccugaugcuggugaucccauuaaugaaaugcugcaggagggucaacagaacaaaaucaauacaacagggucccagagaaucagaucgaaagguaucaguuacuccucagaacgggaaaguuauaucuucuugggagucuuauaagaguggaggagagacuggacuguaa

SEQ ID NO: 63556 - RNA, 1575 nt, Artificial Sequence
  derived and/or modified CDS sequence (wt) from glycoprotein__RABV__KF620487.1
augauuccucaggcucuucuguuuguacccuuucuggguuuuccguugugucucgggaaguuuccuauuuacacgauaccagacaaacuuggccccuggagcccuauugauauacaucaccucagcuguccgaauaauauggucguggaggacgaaggauguaccaaccugucaggguucucauacauggagcucaaaguaggauacauuucagccauaaaggugaacggguucaccuguacggguguggugacggaagcagagaccuauaccaacuuuguuggcuaugucacuaccacauuuaagagaaagcacuuucguccggugccggaugcaugcagagaugcgcauaacuggaagauggcuggggaccccagauaugaagagucuuugcauaauccuuauccugauuaucauuggcuucggacuguaaagacuaccaaagagucucuaguuaucauauccccgaguguugcagauuuagacccguaugacaaaucucuucauucuagcguuuuuccuggugggaaaugcucaggaauaacaguguccucuacuuacuguucuaccaaccaugauuacaccaucuggaugccugaaaauccuagauuggggacuucuugugauauuuucaccuauaguaaagggaagagagcauccaaagagagcaagacauguggauuuguagaugagagaggcuuguacaagucuuugaaaggagcauguaagcugaagcugugugggguuccuggacucagacuuauggauggaacaugggucgcgauccagacaucagaugaggucaaguggugcccuccugaucagcuagugaaucuacaugaccuucacucggaugagcuugaacaucuuguaguggaagaguuagucaagaaacgggaggaguguuuagaugcauuagaguccaucaugaccacuaagucagugaguuucagacgucuuagucacuugaggaaacuugugccuggguuugggaaagcguauaccauauucaacaagaccuugauggaggcugaugcucauuacaaaucggucaggacuuggaaugagaucauccccucuaaaggguguuuaagaguuggagguagaugucauccccauguaaaugggguguuuuucaaugguaucauucuaggcccugacggccauguucugaucccggaaaugcaaucgucccuccuccagcagcauauggaguuguuagaaucuucugucauucccuuaaugcaucccuuggcagaucccucggcgguuuucaaaacuggugacgaggcggaggauuuuguugagguucaccuuccagauguccacaagcaggucucagggguugaucucggucucccaagcugggggaaauaugugcugaugagcgcaggcguccugaucguacuagugcugaugauuuucuugaugacguguuguaaaaggccuaauagagcggagcuaauacaccacaguccuagggagacggaaaggaaagugucaguaaccucccaaggcgggagagucauaucuucuugggagucauauaaaaacggaggugagaccaagcuguaa

SEQ ID NO: 63557 - RNA, 1575 nt, Artificial Sequence
  derived and/or modified CDS sequence (wt) from glycoprotein__RABV__KF620488.1
augauuccucaggcucuucuguuuguacccuuucuggguuuuccguugugucuugggaaguuuccuauuuacacgauaccagacaaacuuggccccuggagcccuauugauauacaucaccucagcuguccgaauaauauggucguggaggacgaaggauguaccaaccugucaggguucucauacauggaacucaaaguaggauacauuucagccauaaaggugaauggguucaccuguacagguguggugacggaagcagagaccuauaccaacuuuguuggcuaugucacuaccacguuuaagagaaagcacuuucguccgaugccggaugcaugcagagaugcgcauaacuggaagauggcaggggaccccagauacgaagagucuuugcauaauccuuauccugacuaucauuggcuucggacuguaaagacuaccaaagagucccuaguuaucauaucuccgaguguggcagaucuagacccguaugauaaaucucuucauucuagcguuuuuccuggugggaaaugcucaggaauaacaguguccucuacuuacuguucuaccaaccaugauuacaccaucuggaugccugaaaauccuagauuggggacuucuugugauauuuucaccuauaguaaagggaagagagcauccaaagagagcaagacauguggauuuguagaugagaggggcuuguacaagucuuugaaaggagcauguaaacugaagcugugugggguucuuggacucagacuuauggauggaacaugggucgcgauucagacaucagaugaggucaaauggugcccuccugaucagcuagugaaucuacacgacuuucguucggaugagcuggagcaucuuguuguggaagaguuggucaagaaacgggaggaguguuuagaugcacuagaguccaucaugaccaccaagucagugaguuucagacgucuuagucacuugaggaaacuugugccuggguuugggaaagcguauaccauauucaacaagaccuugauggaggcugaugcucacuacaaaucggucaggacuuggaaugagaucauccccucuaaaggguguuuaaaaguuggagguagaugucauccccauguaaacgggguguuuuucaauggcaucauucuaggcccugacggccauguucuaaucccggagaugcaaucgucccuccuccagcagcauauggaguuguuagaauccucugucauucccuuaaugcaucccuuggcagaucccucggcgguuuucaaaaccggugacgaggcggaggauuuuguugagguucaccuuccagauguccacaagcaggucucagggguugaucucggucucccaagcugggggaaauauguacugaugagcgcaggcgucuugaucguacuaguguugaugauuuucuugaugauguguuguaaaaagccuaauagagcggagccaauucaucacaguccuagggagacggaaaggaaaaugucaguaacuucucaaggcgggagagucauaucuucaugggagucauauaaaaacggaggugagaccaagcuguaa

SEQ ID NO: 63558 - RNA, 1575 nt, Artificial Sequence
  derived and/or modified CDS sequence (wt) from glycoprotein__RABV__KF620489.1
augauuccucaggcucuucuguuuguacccuuucuggguuuuccauugugucucgggaaguuuccuauuuacacgauaccagacaaacuuggccccuggagcccuauugauauacaucaccucagcuguccgaauaauaugguuguggaggacgaaggauguaccaaccugucaggguucucauacauggagcucaaaguaggauacauuucagcaauaaaggugaacggguucaccuguacggguguggugacggaagcagagaccuauaccaacuuuguuggcuaugucacuaccacauuuaagagaaagcacuuucguccggugccggaugcaugcagagaugcgcauaacuggaagauagcuggggaccccagauaugaagagucuuugcauaauccuuauccugauuaucauuggcuucggacuguaaagacuaccaaggagucucuaguuaucauauccccgaguguugcagauuuagacccauaugauaaaucucuucauucuagcguuuuuccuggugggaaaugcucaggaauaacaguguccucuacuuacuguucuaccaaccaugauuacaccaucuggaugccugaaaauccuagauuggggacuucuugugauauuuucaccuauaguaaagggaagagagcauccaaagagagcaagacauguggauuuguggaugagagaggcuuguacaagucuuugaaaggagcauguaagcugaagcuaugcgggguuccuggacucagacuuauggauggaacaugggucgcgauccagacaucagaugaggucaaauggugcccuccugaucagcuagugaaucuacaugaccuucacucggaugagcuugaacaucguguuguggaagaguuagucaagaaacgggaggaguguuuagaugcauuagaguccaucaugaccacuaagucagugaguuucagacgucuuagucacuugaggaaacuugugccuggguuugggaaagcguauaccauauucaacaagaccuugauggaggcugaugcucauuacaaaucggucaggacuuggaaugagaucauccccucuaaaggguguuuaagagucggagguagaugucauccccauguaaacgggguguuuuucaaugguaucauucuaggcccugacggccauguucugaucccggaaaugcaaucgucccuccuccagcagcauauggaguuguuagaauccucugucauucccuuaaugcaucccuuggcagaucccucggcgguuuucaaaacuggugacgaggcggaggauuuuguugagguucaccuuccagauguccacaagcaggucucagggguugaucucggucucccaagcugggggaaauaugugcugaugagcgcaggcguccugaucguacuagugcugaugauuuucuugaugacguguuguaaaaggccuaauagagcggagccaauacaccacaguccuagggagacggaaaggaaagugucaguaaccucccaaggcgggagagucauaucuucaugggagucauauaaaaacggaggugagaccaagcuguaa

SEQ ID NO: 63559 - RNA, 1575 nt, Artificial Sequence
  derived and/or modified CDS sequence (wt) from glycoprotein__RABV__KF656698.1
augauccuucagguccuucaguuugugccucuccuaaucucuccguugugucucgggaaauuccccaucuacacaauaccggacaagcuugguccuuggagucccaucgauauacaucaccucagcuguccgaacaauuuaguuguggaggacgagggaugcaccaaucuaucaggguucucuuacauggagcuaaaggugggauacaucucugccauaaaggugaacggguucacuuguaccgguguugugacagaggcugagaccuauaccaacuuuguugguuaugucaccacaacauucaagaggaaacauuuucgcccuauaccggaugcaugcagggcggcauacaacuggaagauggcuggugauccuagauaugaggagucucuucaaaauccuuauccugaguaccauugguuaaggaccguaaagaccacuaaggagucucuuauuaucauaucuccgaguguggcugauuuagacccauacgacaaaucccuucauucuaggguguucccuggcggaagugcuuugggaauaacgguuucuuccaccuacugcucaaccaaccacgauuacaccaucuggaugcccgaggaaccaagacucgggacaucuugcgacauuuuuacuagcagcaaggggaaaaaggcaucuaaaggaggcaagacuugcggauuuguggaugaaaggggcuuguacaagucucucaaaggagcauguaaacucaagcugugcggaguucucggacuuagacuuauggauggaaccuggguuucaauucaaacaucagacaauaccaaguggugcucuccggaucaacuggugaaucuacaugacuuucacucagacgaaauagagcaucuugucguggaggaguuggucaagaagagggaagagugucuagacgcauuggaguccaucaugaccaccaaaucuguaaguuuuagacgucucacuuacuugagaaaacuuguccccggguuuggaaaggcauacacuauauucaacaagaccuugauggaggcugaugcccacuacaagucaguucggacuuggaacgagaucauccccucaaaagggugucugaaagucagagagaggugucauccuccuguggauggaguguucuucaauggcauaauucuggguccggacgggaacguccugauaccugagaugcaaucgucucuacuucaacaacauauggagcuguuggagucuucuguaauccccuuaaugcaucccuuggcggacccaucaacagucuucaaggaaggggaugaagcggaggacuuuguugaaguucaccucccagauguucacaaacagaucucagggguugaccuuggucucccgaguugggggaaauaucuccugaugauugcaggcggucuggcgacgcuaguccugauaaucugcucgauugcaugcuguagaagagccaagcgaacagagucaagaagacgaggcucuggagagucaggaaagaaggcaacugcaaccccccggacgaggaaaguuguaucuucaugggagcuguacaagagggaaggcgaugccaggcuguga

SEQ ID NO: 63560 - RNA, 1575 nt, Artificial Sequence
  derived and/or modified CDS sequence (wt) from glycoprotein__RABV__KF656699.1
augauccuucagguccuucaguuugugccucuccuaaucucuccguugugucucgggaaauuccccaucuacacaauaccggacaagcuugguccuuggagucccaucgauauacaucaccucagcuguccgaacaauuuaguuguggaggacgagggaugcaccaaucuaucaggguucucuuacauggagcuaaaggugggauacaucucugccauaaaggugaacggguucacuuguaccgguguugugacagaggcugagaccuauaccaacuuuguugguuaugucaccacaacauucaagaggaaacauuuucgcccuauaccggaugcaugcagggcggcauacaacuggaagauggcuggugauccuagauaugaggagucucuucaaaauccuuauccugaguaccauugguuaaggaccguaaagaccacuaaggagucucuuauuaucauaucuccgaguguggcugauuuagacccauacgacaaaucccuucauucuaggguguucccuggcggaagugcuuugggaauaacgguuucuuccaccuacugcucaaccaaccacgauuacaccaucuggaugcccgaggaaccaagacucgggacaucuugcgacauuuuuacuagcagcaaggggaaaaaggcaucuaaaggaggcaagacuugcggauuuguggaugaaaggggcuuguacaagucucucaaaggagcauguaaacucaagcugugcggaguucucggacuuagacuuauggauggaaccuggguuucaauucaaacaucagacaauaccaaguggugcucuccggaucaacuggugaaucuacaugacuuucacucagacgaaauagagcaucuugucguggaggaguuggucaagaagagggaagagugucuagacgcauuggaguccaucaugaccaccaaaucuguaaguuuuagacgucucaguuacuugagaaaacuuguccccggguuuggaaaggcauacacuauauucaacaagaccuugauggaggcugaugcccacuacaagucaguucggacuuggaacgagaucauccccucaaaagggugucugaaagucagagagaggugucauccuccuguggauggaguguucuucaauggcauaauucuggguccggacgggaacguccugauaccugagaugcaaucgucucuacuucaacaacauauggagcuguuggagucuucuguaauccccuuaaugcaucccuuggcggacccaucaacagucuucaaggaaggggaugaagcggaggacuuuguugaaguucaccucccagauguucacaaacagaucucagggguugaccuuggucucccgaguugggggaaauaucuccugaugauugcaggcggucuggcgacgcuaguccugauaaucugcucgauugcaugcuguagaagagccaagcgaacagagucaagaagacgaggcucuggagagucaggaaagaaggcaacugcaaccccccggacgaggaaaguuguaucuucaugggagcuguacaagagggaaggcgaugccaggcuguga

SEQ ID NO: 63561 - RNA, 1575 nt, Artificial Sequence
  derived and/or modified CDS sequence (wt) from glycoprotein__RABV__KF663531.1
augauuccucaaguucuuuuguuuguuccccuucuaguuuucucgucguguuuugggaaauuccccauuuacacgauaccagacaaacuugguccauggagucccaucgauauacaucaucucagcuguccgaacaaucugguuguggaagaugaaggaugcaccaauuugucuggauuuuccuacauggaacucaaagugggauauauuucagccauaaaagugaacggauucaccuguacagguguggugaccgaagcagaaaccuacacuaacuuuguugguuaugucaccaccacguuuaagagaaagcacuuucgcccuaugccggaugcgugcagagccgcauacaacuggaagguggcuggugaccccagguaugaagagucucugcacaauccguaccccgacuaccacuggcuccgaacugucaagaccaccaaggagucccuugucaucauaucuccgagcguugcagauuuggacccguacgauaaaucccuucacucgagaguuuuuccuggcggaaaaugcucaggaauaaccguguccuccacuugcugcucuacuaaccacgacuacaccaucuggaugccugaaaauccuagacugggaacuucaugugacauuuucaccaauaguagagggaagagggcaucaaaagggggcaagacuuguggauuuguggaugaaagaggcuugugcaagucucuaaagggagcaugcaagcugaagcuaugugggguucuaggacuuagacuuauggacggaacaugggucgcgauucagacaucagaugagaucaaauggugcccuccugaucagcuaguaaaucuacacgacuuucacucggaugagauugaacauuuuguuguggaggaguuggucaaaaagagggaagagugucuggacgcacuggagacuauuaugaccacaaaguccgugaguuucagacgucuuagucauuugaggaagcuagucccuggguuuggaaaggcguauaccauauucaacaaaaccuugauggaggcugaugcccacuacaaaucaauccggacuuggaaugaaaucauccccuccaaaggguguuuaagaguuggggggagaugucauccucaugugaacgggguguucuucaacggcauuauacuggguccugacggacauguucuaaucccagagaugcagucgucucuccuccaccagcauauggaauuguuggaguccucagucaucccuuugaugcaucccuuagcagacccgucaacagucuuuaaagacggcgacgaggcagaggacuuuguugagguucaccuuccggaugugcacaagcagaucucggggguugaucucggucucccaaacugggggaaguaugugcugauaagugcaggugcuuugacugcauuaauguugacgauuuucuuaaugacguguugcagaaagacuaauagagcagggucaauacaacacaguccuggagagacagggaggaaagugucggugacuucucacaacggaagggucauaucucuaugggaaucauauaaaagcggaagugagaccaagcuguga

SEQ ID NO: 63562 - RNA, 1575 nt, Artificial Sequence
  derived and/or modified CDS sequence (wt) from glycoprotein__RABV__KF663532.1
augauuccucaaguucuuuuguuuguuccccuucuagccuucucgucguguuuugggaaauuccccauuuacacgauaccagacaaacuugguccauggagucccaucgauauacaucaucucagcuguccgaacaaucugguuguggaagaugaaggaugcaccaauuugucuggauuuuccuacauggaacucaaagugggauauauuucagccauaaaagugaacggauucaccuguacagguguggugaccgaagcagaaaccuacacuaacuuuguugguuaugucaccaccacguuuaagagaaagcacuuucgcccuaugccggaugcgugcagagccgcauacaacuggaagguggcuggugaccccagguaugaagagucucugcacaauccguaccccgacuaccacuggcuccgaacugucaagaccaccaaggagucccuugucaucauaucuccgagcguugcagauuuggacccguacgauaaaucccuucacucgagaguuuuuccuggcggaaaaugcucaggaauaaccguguccuccacuugcugcucuacuaaccacgacuacaccaucuggaugccugaaaauccuagacugggaacuucaugugacauuuucaccaauaguagagggaagagggcaucaaaagggggcaagacuuguggauuuguggaugaaagaggcuuguacaagucucuaaagggagcaugcaagcugaagcuaugugggguucuaggacuuggacuuauggacggaacaugggucgcgauucagacaucagaugagaucaaauggugcccuccugaucagcuaguaaaucuacacgacuuucacucggaugagauugaacaucuuguuguggaggaguuggucaaaaagagggaagagugucuggacgcacuggagacuauuaugaccacaaaguccgugaguuucagacgucuuagucauuugaggaagcuagucccuggguuuggaaaggcguauaccauauucaacaaaaccuugauggaggcugaugcccacuacaaaucaauccggacuuggaaugaaaucauccccuccaaaggguguuuaagaguuggggggagaugucauccucaugugaacgggguguucuucaacggcauuauacuggguccugacggacauguucuaaucccagagaugcagucgucucuccuccaccagcauauggaauuguuggaguccucagucaucccuuugaugcaucccuuagcagacccgucaacagucuuuaaagacggcgacgaggcagaggacuuuguugagguucaccuuccggaugugcacaagcagaucucggggguugaucuuggucucccaaacugggggaaguaugugcugauaagugcaggugcuuugacugcauuaauguugacgauuuucuuaaugacguguugcagaaagacuaauagagcagggucaauacaacacaguccuggagagacagggaggaaagugucggugacuucucacaacggaagggucaugaucuuaugggaaucauauaaaagcggaagugagaccaagcuguga

SEQ ID NO: 63563 - RNA, 1575 nt, Artificial Sequence
  derived and/or modified CDS sequence (wt) from glycoprotein__RABV__KF663533.1
augauuccucaaguucuuuuguuuguuccccuucuagauuucucgucguguuuugggaaauuccccauuuacacgauaccagacaaacuugguccauggagucccaucgauauacaucaucucagcuguccgaacaaucugguuguggaagaugaaggaugcaccaauuugucuggauuuuccuacauggaacucaaagugggauauauuucagccauaaaagugaacggauucaccuguacagguguggugaccgaagcagaaaccuacacuaacuuuguugguuaugucaccaccacguuuaagagaaagcacuuucgcccuaugccggaugcgugcagagccgcauacaacuggaagguggcuggugaccccagguaugaagagucucugcacaauccguaccccgacuaccacuggcuccgaacugucaagaccaccaaggagucccuugucaucauaucuccgagcguugcagauuuggacccguacgauaaaucccuucacucgagaguuuuuccuggcggaaaaugcucaggaauaaccguguccuccacuugcugcucuacuaaccacgacuacaccaucuggaugccugaaaauccuagacugggaacuucaugugacauuuucaccaauaguagagggaagagggcaucaaaagggggcaagacuuguggauuugaggaugaaagaggcuuguacaagucucuaauaggagcaugcaagcugaagcuaugugggguucuaggacuuagacguauggacggaacaugggucgcgauucagacaucagauaagaucaaaaggugcccuccugaucagcuaguaaaucuacacgacuuucacucggaugagauugaacaucuuguuguggaggaguuggucaaaaagagggaagagugucuggacgcacuggagacuauuaugaccacaaaguccgugaguuucagacgucuuagucauuugaggaagcuagucccuggguuuggaaaggcguauaccauauucaacaaaaccuugauggaggcugaugcccacuacaaaucaauccggacuuggaaugaaaucauccccuccaaaggguguuuaagaguuggggggagaugucauccucaugugaacgggguguucuucaacggcauuauacuggguccugacggacauguucuaaucccagagaugcagucgucucuccuccaccagcauauggaauuguuggaguccucagucaucccuuugaugcaucccuuagcagacccgucaacagucuuuaaagacggcgacgaggcagaggacuuuguugagguucaccuuccggaugugcacaagcagaucucggggguugaucuuggucucccaaacugggggaaguaugugcugauaagugcaggugcuuugacugcauuaauguugacgauuuucuuaaugacguguugcagaaagacuaauagagcagggucaauacaacacaguccuggagagacagggaggaaagugucggugacuucucacaacggaagggucauaucuuuaugggaaucauauaaaagcgaaagugagaccaagcuguga

SEQ ID NO: 63564 - RNA, 1575 nt, Artificial Sequence
  derived and/or modified CDS sequence (wt) from glycoprotein__RABV__KF663534.1
augauuccucaaguucuuuuguuuguuccccuucuaguuuucucgucguguuuugggaaauuccccauuuacacgauaccagacaaacuugguccauggagucccaucgauauacaucaucucagcuguccgaacaaucugguuguggaagaugaaggaugcaccaauuugucuggauuuuccuacauggaacucaaagugggauauauuucagccauaaaagugaacggauucaccuguacagguguggugaccgaagcagaaaccuacacuaacuuuguugguuaugucaccaccacguuuaagagaaagcacuuucgcccuaugccggaugcgugcagagccgcauacaacuggaagguggcuggugaccccagguaugaagagucucugcacaauccguaccccgacuaccacuggcuccgaacugucaagaccaccaaggagucccuugucaucauaucuccgagcguugcagauuuggacccguacgauaaaucccuucacucgagaguuuuuccuggcggaaaaugcucaggaauaaccguguccuccacuugcugcucuacuaaccacgacuacaccaucuggaugccugaaaauccuagacugggaacuucaugugacauuuucaccaauaguagagggaagagggcaucaaaagggggcaagacuuguggauuuggggaugaaagaggcuuguacaagucucuaaacggagcaugcaagcugaagcuaugugggguucuaggacuuagacguauggacggaacaugggucgcgauucagacaucagaugagaucaaauggugcccuccugaucagcuaguaaaucuacacgacuuucacucggaugagauugaacaucuuguuguggaggaguuggucaaaaagagggaagagugucuggacgcacuggagacuauuaugaccacaaaguccgugaguuucagacgucuuagucauuugaggaagcuagucccuggguuuggaaaggcguauaccauauucaacaaaaccuugauggaggcugaugcccacuacaaaucaauccggacuuggaaugaaaucauccccuccaaaggguguuuaagaguuggggggagaugucauccucaugugaacgggguguucuucaacggcauuauacuggguccugacggacauguucuaaucccagagaugcagucgucucuccuccaccagcauauggaauuguuggaguccucagucaucccuuugaugcaucccuuagcagacccgucaacagucuuuaaagacggcgacgaggcagaggacuuuguugagguucaccuuccggaugugcacaagcagaucucggggguugaucuuggucucccaaacugggggaaguaugugaugauaagugcaggugcuuugacugcauuaauguugacgauuuucuuaaugacguguugcagaaagacuaauagagcagggucaauacaacacaguccuggagagacagggaggaaagugucggugacuucucacaacggaagggucauaucuuuaugggaaucauauaaaagcgaaagugagaccaagcuguga

SEQ ID NO: 63565 - RNA, 1575 nt, Artificial Sequence
  derived and/or modified CDS sequence (wt) from glycoprotein__RABV__KF663535.1
augauuccucaaguucuuuuguuuguuccccuucuaguuaucucgucguguuuugggaaauuccccauuuacacgauaccagacaaacuugguccauggagucccaucgauauacaucaucucagcuguccgaacaaucugguuguggaagaugaaggaugcaccaauuugucuggauuuuccuacauggaacucaaagugggauauauuucagccauaaaagugaacggauucaccuguacagguguggugaccgaagcagaaaccuacacuaacuuuguugguuaugucaccaccacguuuaagagaaagcacuuucgcccuaugccggaugcgugcagagccgcauacaacuggaagguggcuggugaccccagguaugaagagucucugcacaauccguaccccgacuaccacuggcuccgaacugucaagaccaccaaggagucccuugucaucauaucuccgagcguugcagauuuggacccguacgauaaaucccuucacucgagaguuuuuccuggcggaaaaugcucaggaauaaccguguccuccacuugcugcucuacuaaccacgacuacaccaucuggaugccugaaaauccuagacugggaacuucaugugacauuuucaccaauaguagagggaagagggcaucaaaagggggcaagacuuguggauuuguggaugaaagaggcuuguacaagucucuaaagggagcaugcaagcugaagcuaugugggguucuaggacuuagacuuauggacggaacaugggucgcgauucagacaucagaugagaucaaauggugcccuccugaucagcuaguaaaucuacacgacuuucacucggaugagauugaacaucuuguuguggaggaguuggucaaaaagagggaagagugucuggacgcacuggagacuauuaugaccacaaaguccgugaguuucagacgucuuagucauuugaggaagcuagucccuggguuuggaaaggcguauaccauauucaacaaaaccuugauggaggcugaugcccacuacaaaucaauccggacuuggaaugaaaucauccccuccaaaggguguuuaagaguuggggggagaugucauccucaugugaacgggguguucuucaacggcauuauacuggguccugacggacauguucuaaucccagagaugcagucgucucuccuccaccagcauauggaauuguuggaguccucagucaucccuuugaugcaucccuuagcagacccgucaacagucuuuaaagacggcgacgaggcagaggacuuuguugagguucaccuuccggaugugcacaagcagaucucggggguugaucuuggucucccaaacugggggaaguaugugcugauaagugcaggugcuuugacugcauuaauguugacgauuuucuuaaugacguguugcagaaagacuaauagagcagggucaauacaacacaguccuggagagacagggaggaaagugucggugacuucucacaacggaagggucauauucuuaugggaaucauauaaaagcggaagugagaccaagcuguga

SEQ ID NO: 63566 - RNA, 1575 nt, Artificial Sequence
  derived and/or modified CDS sequence (wt) from glycoprotein__RABV__KF663536.1
augauuccucaaguucuuuuguuuguuccccuucuaguuuucucgucguguuuugggaaauuccccauuuacacgauaccagacaaacuugguccauggagucccaucgauauacaucaucucagcuguccgaacaaucugguuguggaagaugaaggaugcaccaauuugucuggauuuuccuacauggaacucaaagugggauauauuucagccauaaaagugaacggauucaccuguacagguguggugaccgaagcagaaaccuacacuaacuuuguugguuaugucaccaccacguuuaagagaaagcacuuucgcccuaugccggaugcgugcagagccgcauacaacuggaagguggcuggugaccccagguaugaagagucucugcacaauccguaccccgacuaccacuggcuccgaacugucaagaccaccaaggagucccuugucaucauaucuccgagcguugcagauuuggacccguacgauaaaucccuucacucgagaguuuuuccuggcggaaaaugcucaggaauaaccguguccuccacuugcugcucuacuaaccacgacuacaccaucuggaugccugaaaauccuagacugggaacuucaugugacauuuucaccaauaguagagggaagagggcaucaaaagggggcaagacuuguggauuuguggaugaaagaggcuugugcaagucucuaaagggagcaugcaagcugaagcuaugugggguucuaggacuuagacuuauggacggaacaugggucgcgauucagacaucagaugagaucaaauggugcccuccugaucagcuaguaaaucuacacgacuuucacucggaugagauugaacaucuuguuguggaggaguuggucaaaaagagggaagagugucuggacgcacuggagacuauuaugaccacaaaguccgugaguuucagacgucuuagucauuugaggaagcuagucccuggguuuggaaaggcguauaccauauucaacaaaaccuugauggaggcugaugcccacuacaaaucaauccggacuuggaaugaaaucauccccuccaaaggguguuuaagaguuggggggagaugucauccucaugugaacgggguguucuucaacggcauuauacuggguccugacggacauguucuaaucccagagaugcagucgucucuccuccaccagcauauggaauuguuggaguccucagucaucccuuugaugcaucccuuagcagacccgucaacagucuuuaaagacggcgacgaggcagaggacuuuguugagguucaccuuccggaugugcacaagcagaucucggggguugaucuuggucucccaaacugggggaaguaugugcugauaagugcaggugcuuugacugcauuaauguugacgauuuucuuaaugacguguugcagaaagacuaauagagcagggucaauacaacacaguccuggagagacagggaggaaagugucggugacuucucacaacggaagggucauaucuuuaugggaaucauauaaaagcggaagugagaccaagcuguga

SEQ ID NO: 63567 - RNA, 1575 nt, Artificial Sequence
  derived and/or modified CDS sequence (wt) from glycoprotein__RABV__KF663537.1
augauuccucaaguucuuuuguuuguuccccuucuugacuucucgucguguuuugggaaauuccccauuuacacgauaccagacaaacuugguccauggagucccaucgauauacaucaucucagcuguccgaacaaucugguuguggaagaugaaggaugcaccaauuugucuggauuuuccuacauggaacucaaagugggauauauuucagccauaaaagugaacggauucaccuguacagguguggugaccgaagcagaaaccuacacuaacuuuguugguuaugucaccaccacguuuaagagaaagcacuuucgcccuaugccggaugcgugcagagccgcauacaacuggaagguggcuggugaccccagguaugaagagucucugcacaauccguaccccgacuaccacuggcuccgaacugucaagaccaccaaggagucccuugucaucauaucuccgagcguugcagauuuggacccguacgacaaaucccuucacucgagaguuuuuccuggcggaaaaugcucaggaauaaccguguccuccacuugcugcucuacuaaccacgacuacaccaucuggaugccugaaaauccuagacugggaacuucaugugacauuuucaccaauaguagagggaagagggcaucaaaagggggcaagacuuguggauuuguggaugaaagaggcuuguacaagucucuaaacggagcaugcaagcugaagcuaugugggguucuaggacuuagacguauggacggaacaugggucgcgauucagacaucagaugagaucaaauggugcccuccugaucagcuaguaaaucuacacgacuuucacucggaugagauugaacaucuuguuguggaggaguuggucaaaaagagggaagagugucuggacgcacuggagacuauuaugaccacaaaguccgugaguuucagacgucuuagucauuugaggaagcuagucccuggguuuggaaaggcguauaccauauucaacaaaaccuugauggaggcugaugcccacuacaaaucaauccggacuuggaaugaaaucauccccuccaaaggguguuuaagaguuggggggagaugucauccucaugugaacgggguguucuucaacggcauuauacuggguccugacggacauguucuaaucccagagaugcagucgucucuccuccaccagcauauggaauuguuggaguccucagucaucccuuugaugcaucccuuagcagacccgucaacagucuuuaaagacggcgacgaggcagaggacuuuguugagguucaccuuccggaugugcacaagcagaucucggggguugaucuuggucucccaaacugggggaaguaugugcugauaagugcaggugcuuugacugcauuaauguugacgauuuucuuaaugacguguugcagaaagacuaauagagcagggucaauacaacacaguccuggagagacagggaggaaagugucggugacuucucacaacggaagggucauaucuuuaugggaaucauauaaaagcgaaagugagaccaagcuguga

SEQ ID NO: 63568 - RNA, 1575 nt, Artificial Sequence
  derived and/or modified CDS sequence (wt) from glycoprotein__RABV__KF663538.1
augauuccucaaguucuuuuguuuguuccccuucuaguuuucucgucguguuuugggaaauuccccauuuacacgauaccagacaaacuugguccauggagucccaucgauauacaucaucucagcuguccgaacaaucugguuguggaagaugaaggaugcaccaauuugucuggauuuuccuacauggaacucaaagugggauauauuucagccauaaaagugaacggauucaccuguacagguguggugaccgaagcagaaaccuacacuaacuuuguugguuaugucaccaccacguuuaagagaaagcacuuucgcccuaugccggaugcgugcagagccgcauacaacuggaagguggcuggugaccccagguaugaagagucucugcacaauccguaccccgacuaccacuggcuccgaacugucaagaccaccaaggagucccuugucaucauaucuccgagcguugcagauuuggacccguacgauaaaucccuucacucgagaguuuuuccuggcggaaaaugcucaggaauaaccguguccuccacuugcugcucuacuaaccacgacuacaccaucuggaugccugaaaauccuagacugggaacuucaugugacauuuucaccaauaguagagggaagagggcaucaaaagggggcaagacuuguggauuuguggaugaaagaggcuuguacaagucucuaaagggagcaugcaagcugaagcuaugugggguucuaggacuuagacuuauggacggaacaugggucgcgauucagacaucagaugagaucauaaggugcccuccugaucagcuaguaaaucuacacgacuuucacucggaugagauugaacaucuuguuguggaggaguuggucaaaaagagggaagagugucuggacgcacuggagacuauuaugaccacaaaguccgugaguuucagacgucuuagucauuugaggaagcuagucccuggguuuggaaaggcguauaccauauucaacaaaaccuugauggaggcugaugcccacuacaaaucaauccggacuuggaaugaaaucauccccuccaaaggguguuuaagaguuggggggagaugucauccucaugugaacgggguguucuucaacggcauuauacuggguccugacggacauguucuaaucccagagaugcagucgucucuccuccaccagcauauggaauuguuggaguccucagucaucccuuugaugcaucccuuagcagacccgucaacagucuuuaaagacggcgacgaggcagaggacuuuguugagguucaccuuccggaugugcacaagcagaucucggggguugaucuuggucucccaaacugggggaaguaugugcugauaagugcaggugcuuugacugcauuaauguugacgauuuucuuaaugacguguugcagaaagacuaauagagcagggucaauacaacacaguccuggagagacagggaggaaagugucggugacuucucacaacggaagggucauaucuuuaugggaaucauauaaaagcgaaagugagaccaagcuguga

SEQ ID NO: 63569 - RNA, 1575 nt, Artificial Sequence
  derived and/or modified CDS sequence (wt) from glycoprotein__RABV__KF663539.1
augauuccucaaguucuuuuguuuguuccccuucuaguuuucucgucguguuucgggaaauuccccauuuacacaauaccagacaaacuugguccauggagucccaucgauauacaucaccucagcuguccgaacaaucugguuguggaagaugaaggaugcaccaaucugucuggauuuuccuacauggaacucaaaguaggauauauuucagccauaaaagugaacggauucaccuguacagguguagugaccgaagcagaaaccuacacuaacuuuguugguuaugucaccaccacguuuaagagaaagcacuuucgcccuaugccggaugcgugcagagccgcauacaacuggaagauggcuggugaccccagguaugaagagucucugcacaauccguaccccgacuaccacuggcuccgaacugucaagaccaccaaggagucccuugucaucauaucuccgagcguugcagauuuggacccguacgauaaaucccuucacucgagaguuuuuccuggcggaaaaugcucaggaauaaccguguccuccacuugcugcucuacuaaccacgacuacaccaucuggaugccugaaaauccuagacugggaacuucaugugacauuuucaccaauaguagagggaagagggccucaaaagggggcaagacuuguggauuuggagaugaaagaggcuuguacaagucucuaaggggagcaugcaagcugaagcuaugugggguucuaggacuuagacuuauggacggaacaugggucguaauucagacaucagaugagaucaaauggugcucuccugaucagcuaguaaaucuacacgacuuucacucggaugagaucgaacaucuuguuguggaggaguuggucaaaaagagggaagagugucuggacgcacuggagacuauuaugaccacaaaguccgugaguuucagacgucuuagucauuugaggaagcuagucccuggguuuggaaaggcguauaccauauucaacaagaccuugauggaggcugaugcucacuacaaaucaauccggacuuggaaugaaaucauccccuccaaaggguguuuaagaguuggggggagaugucauccucaugugaacgggguguucuucaacggcauuauacuggguccugacggacauguucucaucccagagaugcagucgucccuccuccaccagcauauggaauuguuggaguccucagucaucccuuugaugcaucccuuagcagacccgucaacagucuuuaaagacggcgacgaggcagaggacuuuguugagguucaccuuccggaugugcacaagcagaucucggggguugaucuuggucucccaaacugggggaaguaugugcugauaagugcaggugcucugacugcauuaauguugaugauuuucuuaaugacguguugcagaaagacuaauagagcagagucaauacaacacaguccuggagagacagggaggaaagugucggugacuucucacaacggaagggucauaucuucaugggaaucauauaaaagcgaaagugagaccaagcuguga

SEQ ID NO: 63570 - RNA, 1575 nt, Artificial Sequence
  derived and/or modified CDS sequence (wt) from glycoprotein__RABV__KF663540.1
augauuccucaaguucuuuuguuuguuccccuucuaguuuucucgucguguuucgggaaauuccccauuuacacaauaccagacaaacuugguccauggagucccaucgauauacaucaccucagcuguccgaacaaucugguuguggaagaugaaggaugcaccaaucugucuggauuuuccuacauggaacucaaaguaggauauauuucagccauaaaagugaacggauucaccuguacagguguagugaccgaagcagaaaccuacacuaacuuuguugguuaugucaccaccacguuuaagagaaagcacuuucgcccuaugccggaugcgugcagagccgcauacaacuggaagauggcuggugaccccagguaugaagagucucugcacaauccguaccccgacuaccacuggcuccgaacugucaagaccaccaaggagucccuugucaucauaucuccgagcguugcagauuuggacccguacgauaaaucccuucacucgagaguuuuuccuggcggaaaaugcucaggaauaaccguguccuccacuugcugcucuacuaaccacgacuacaccaucuggaugccugaaaauccuagacugggaacuucaugugacauuuucaccaauaguagagggaagagggccucaaaagggggcaagacuuguggauuuguagaugaaagaggcuuguacaagucucuaacgggagcaugcaagcugaagcuaugugggguucuaggacugagccuuauggacggaacaugggucgcaauucagacaucagaugagaucaaauggugcucuccugaucagcuaguaaaucuacacgacuuucacucggaugagaucgaacaucuuguuguggaggaguuggucaaaaagagggaagagugucuggacgcacuggagacuauuaugaccacaaaguccgugaguuucagacgucuuagucauuugaggaagcuagucccuggguuuggaaaggcguauaccauauucaacaagaccuugauggaggcugaugcucacuacaaaucaauccggacuuggaaugaaaucauccccuccaaaggguguuuaagaguuggggggagaugucauccucaugugaacgggguguucuucaacggcauuauacuggguccugacggacauguucucaucccagagaugcagucgucccuccuccaccagcauauggaauuguuggaguccucagucaucccuuugaugcaucccuuagcagacccgucaacagucuuuaaagacggcgacgaggcagaggacuuuguugagguucaccuuccggaugugcacaagcagaucucggggguugaucuuggucucccaaacugggggaaguaugugcugauaagugcaggugcucugacugcauuaauguugaugauuuucuuaaugacguguugcagaaagacuaauagagcagagucaauacaacacaguccuggagagacagggaggaaagugucggugacuucucacaacggaagggucauaucuucaugggaaucauauaaaagcgaaagugagaccaagcuguga

SEQ ID NO: 63571 - RNA, 1575 nt, Artificial Sequence
  derived and/or modified CDS sequence (wt) from glycoprotein__RABV__KF663541.1
augauuccucaaguucuuuuguuuguuccccuucuaguuuucucgucguguuucgggaaauuccccauuuacacaauaccagacaaacuugguccauggagucccaucgauauacaucaccucagcuguccgaacaaucuggucguggaagaugaaggaugcaccaaucugucuggauuuuccuacauggaacucaaaguaggauauauuucagccauaaaagugaacggauucaccuguacagguguagugaccgaagcagaaaccuacacuaacuuuguugguuaugucaccaccacguuuaagagaaagcacuuucgcccuaugccggaugcgugcagagccgcauacaacuggaagauggcuggugaccccagguaugaagagucucugcacaauccguaccccgacuaccacuggcuccgaacugucaagaccaccaaggagucccuugucaucauaucuccgagcguugcagauuuggacccguacgauaaaucccuucacucgagaguuuuuccuggcggaaaaugcucaggaauaaccguguccuccacuugcugcucuacuaaccacgacuacaccaucuggaugccugaaaauccuagacugggaacuucaugugacauuuucaccaauaguagagggaagagggccucaaaagggggcaagacuuguggauuuguggaugaaagaggcuuguacaagucuucuaagggagcaugcaagcugaagcuaugugggguucuaggacucagacuuauggacggaacaugggucgcaauccagacaucagaugagaucaaauggugcucuccugaucagcuaguaaaucuacacgacuuucacucggaugagaucgaacaucuuguuguggaggaguuggucaaaaagagggaagagugucuggacgcacuggagacuauuaugaccacaaaguccgugaguuucagacgucuuagucauuugaggaagcuagucccuggguuuggaaaggcguauaccauauucaacaagaccuugauggaggcugaugcucacuacaaaucaauccggacuuggaaugaaaucauccccuccaaaggguguuuaagaguuggggggagaugucauccucaugugaacgggguguucuucaacggcauuauacuggguccugacggacauguucucaucccagagaugcagucgucccuccuccaccagcauauggaauuguuggaguccucagucaucccuuugaugcaucccuuagcagacccgucaacagucuuuaaagacggcgacgaggcagaggacuuuguugagguucaccuuccggaugugcacaagcagaucucggggguugaucuuggucucccaaacugggggaaguaugugcugauaagugcaggugcucugacugcauuaauguugaugauuuucuuaaugacguguugcagaaagacuaauagagcagagucaauacaacacaguccuggagagacagggaggaaagugucggugacuucucacaacggaagggucauaucuucaugggaaucauauaaaagcggaagugagaccaagcuguga

SEQ ID NO: 63572 - RNA, 1575 nt, Artificial Sequence
  derived and/or modified CDS sequence (wt) from glycoprotein__RABV__KF663542.1
auguuuccuccaguucuuuuguuuguuccccuucuaguuuucucgucguguuuugggaaauuccccauuuacacgauaccagacaaacuugguccauggagucccaucgauauacaucaucucagcuguccgaacaaucugguuguggaagaugaaggaugcaccaauuugucuggauuuuccuacauggaacucaaagugggauauauuucagccauaaaagugaacggauucaccuguacagguguggugaccgaagcagaaaccuacacuaacuuuguugguuaugucaccaccacguuuaagagaaagcacuuucgcccuaugccggaugcgugcagagccgcauacaacuggaagguggcuggugaccccagguaugaagagucucugcacaauccguaccccgacuaccacuggcuccgaacugucaagaccaccaaggagucccuugucaucauaucuccgagcguugcagauuuggacccguacgauaaaucccuucacucgagaguuuuuccuggcggaaaaugcucaggaauaaccguguccuccacuugcugcucuacuaaccacgacuacaccaucuggaugccugaaaauccuagacugggaacuucaugugacauuuucaccaauaguagagggaagagggcaucaaaagggggcaagacuuguggauuuagggaugaaagaggcuuguacaagucucuaaagggagcaugcaagcugaagcuaugugggguucuaggacuuagacuuauggacggaacaugggucgcgacucagaccucgaaugagaucaaauggugcccuccugaucagcuaguaaaucuacacgacuuucacucggaugagauugaacaucuuguuguggaggaguuggucaaaaagagggaagagugucuggacgcacuggagacuauuaugaccacaaaguccgugaguuucagacgucuuagucauuugaggaagcuagucccuggguuuggaaaggcguauaccauauucaacaaaaccuugauggaggcugaugcccacuacaaaucaauccggacuuggaaugaaaucauccccuccaaaggguguuuaagaguuggggggagaugucauccucaugugaacgggguguucuucaacggcauuauacuggguccugacggacauguucuaaucccagagaugcagucgucucuccuccaccagcauauggaauuguuggaguccucagucaucccuuugaugcaucccuuagcagacccgucaacagucuuuaaagacggcgacgaggcagaggacuuuguugagguucaccuuccggaugugcacaagcagaucucggggguugaucuuggucucccaaacugggggaaguaugugcugauaagugcaggugcuuugacugcauuaauguugacgauuuucuuaaugacguguugcagaaagacuaauagagcagggucaauacaacacaguccuggagagacagggaggaaaguaucggugacuucucacaacggaagggucauauucuuaugggaaucccauauaagcggaagugagaccaagcuguga

SEQ ID NO: 63573 - RNA, 1575 nt, Artificial Sequence
  derived and/or modified CDS sequence (wt) from glycoprotein__RABV__KF663543.1
auguuuccucaaguucuuuuguuuguuccccuucuaguuuucucgucguguuuugggaaauuccccauuuacacgauaccagacaaacuugguccauggagucccaucgauauacaucaucucagcuguccgaacaaucugguuguggaagaugaaggaugcaccaauuugucuggauuuuccuacauggaacucaaagugggauauauuucagccauaaaagugaacggauucaccuguacagguguggugaccgaagcagaaaccuacacuaacuuuguugguuaugucaccaccacguuuaagagaaagcacuuucgcccuaugccggaugcgugcagagccgcauacaacuggaagguggcuggugaccccagguaugaagagucucugcacaauccguaccccgacuaccacuggcuccgaacugucaagaccaccaaggagucccuugucaucauaucuccgagcguugcagauuuggacccguacgauaaaucccuucacucgagaguuuuuccuggcggaaaaugcucaggaauaaccguguccuccacuugcugcucuacuaaccacgacuacaccaucuggaugccugaaaauccuagacugggaacuucaugugacauuuucaccaauaguagagggaagagggcaucaaaagggggcaagacuuguggauuugaggaugaaagaggcuuguacaagucucuaacaggagcaugcaagcugaagcuaugugggguucuaggacuuagacuuauggacggaacaugggucgcgauucagacaucagaugagaucaaauggugcccuccugaucagcuaguaaaucuacacgacuuucacucggaugagauugaacaucuuguuguggaggaguuggucaaaaagagggaagagugucuggacgcacuggagacuauuaugaccacaaaguccgugaguuucagacgucuuagucauuugaggaagcuagucccuggguuuggaaaggcguauaccauauucaacaaaaccuugauggaggcugaugcccacuacaaaucaauccggacuuggaaugaaaucauccccuccaaaggguguuuaagaguuggggggagaugucauccucaugugaacgggguguucuucaacggcauuauacugggucccgacggacauguucuaaucccagagaugcagucgucucuccuccaccagcauauggaauuguuggaguccucagucaucccuuugaugcaucccuuagcagacccgucaacagucuuuaaagacggcgacgaggcagaggacuuuguugagguucaccuuccggaugugcacaagcagaucucggggguugaucuuggucucccaaacugggggaaguaugugcugauaagugcaggugcuuugacugcauuaaugcugacgauuuucuuaaugacguguugcagaaagacuaauagagcagggucaauacaacacaguccuggagagacagggaggaaagugucggugacuucucacaacggaagggucauaucuuuaugggaaucauauaaaagcggaagugagaccaagcuguga

SEQ ID NO: 63574 - RNA, 1575 nt, Artificial Sequence
  derived and/or modified CDS sequence (wt) from glycoprotein__RABV__KF663544.1
auguuuccucaaguucuuuuguuuguuccccuucuaguuuucucgucguguuuugggaaauuccccauuuacacgauaccagacaaacuugguccauggagucccaucgauauacaucaucucagcuguccgaacaaucugguuguggaagaugaaggaugcaccaauuugucuggauuuuccuacauggaacucaaagugggauauauuucagccauaaaagugaacggauucaccuguacagguguggugaccgaagcagaaaccuacacuaacuuuguugguuaugucaccaccacguuuaagagaaagcacuuucgcccuaugccggaugcgugcagagccgcauacaacuggaagguggcuggugaccccagguaugaagagucucugcacaauccguaccccgacuaccacuggcuccgaacugucaagaccaccaaggagucccuugucaucauaucuccgagcguugcagauuuggacccguacgauaaaucccuucacucgagaguuuuuccuggcggaaaaugcucaggaauaaccguguccuccacuugcugcucuacuaaccacgacuacaccaucuggaugccugaaaauccuagacugggaacuucaugugacauuuucaccaauaguagagggaagagggcaucaaaagggggcaagacuuguggauuugaggaugaaagaggcuuguacaagucucuaaagggagcaugcaagcugaagcuaugugggguucuaggacuuagacguauggacggaacaugggucgcgauucagacaucagaugagaucaaauggugcccuccugaucagcuaguaaaucuacacgacuuucacucggaugagauugaacaucuuguuguggaggaguuggucaaaaagagggaagagugucuggacgcacuggagacuauuaugaccacaaaguccgugaguuucagacgucuuagucauuugaggaagcuagucccuggguuuggaaaggcguauaccauauucaacaaaaccuugauggaggcugaugcccacuacaaaucaauccggacuuggaaugaaaucauccccuccaaaggguguuuaagaguuggggggagaugucauccucaugugaacgggguguucuucaacggcauuauacuggguccugacggacauguucuaaucccagagaugcagucgucucuccuccaccagcauauggaauuguuggaguccucagucaucccuuugaugcaucccuuagcagacccgucaacagucuuuaaagacggcgacgaggcagaggacuuuguugagguucaccuuccggaugugcacaagcagaucucggggguugaucuuggucucccaaacugggggaaguaugugcugauaagugcaggugcuuugacugcauuaauguugacgauuuucuuaaugacguguugcagaaagacuaauagagcagggucaauacaacacaguccuggagagacagggaggaaagugucggugacuucucacaacggaagggucauaucuuuaugggaaucauauaaaagcggaagugagaccaagcuguga

SEQ ID NO: 63575 - RNA, 1575 nt, Artificial Sequence
  derived and/or modified CDS sequence (wt) from glycoprotein__RABV__KF663545.1
auguuuccucaaguucuuuuguuuguuccccuucuaguuuucucgucguguuuugggaaauuccccauuuacacgauaccagacaaacuugguccauggagucccaucgauauacaucaucucagcuguccgaacaaucugguuguggaagaugaaggaugcaccaauuugucuggauuuuccuacauggaacucaaagugggauauauuucagccauaaaagugaacggauucaccuguacagguguggugaccgaagcagaaaccuacacuaacuuuguugguuaugucaccaccacguuuaagagaaagcacuuucgcccuaugccggaugcgugcagagccgcauacaacuggaagguggcuggugaccccagguaugaagagucucugcacaauccguaccccgacuaccacuggcuccgaacugucaagaccaccaaggagucccuugucaucauaucuccgagcguugcagauuuggacccguacgauaaaucccuucacucgagaguuuuuccuggcggaaaaugcucaggaauaaccguguccuccacuugcugcucuacuaaccacgacuacaccaucuggaugccugaaaauccuagacugggaacuucaugugacauuuucaccaauaguagagggaagagggcaucaaaagggggcaagaccuguggauuuggggaugaaagaggcuuguacaagucucuaaagggagcaugcaagcugaagcuaugugggguucuaggacuuagacuuauggacggaacaugggucgcgauucagacaucagaugagaucaaauggugcccuccugaucagcuaguaaaucuacacgacuuucacucggaugagauugaacaucuuguuguggaggaguuggucaaaaagagggaagagugucuggacgcacuggagacuauuaugaccacaaaguccgugaguuucagacgucuuagucauuugaggaagcuagucccuggguuuggaaaggcguauaccauauucaacaaaaccuugauggaggcugaugcccacuacaaaucaauccggacuuggaaugaaaucauccccuccaaaggguguuuaagaguuggggggagaugucauccucaugugaacgggguguucuucaacggcauuauacuggguccugacggacauguucucaucccagagaugcagucgucccuccuccaccagcauauggaauuguuggaguccucagucaucccuuugaugcaucccuuagcagacccgucaacagucuuuaaagacggcgacgaggcagaggacuuuguugagguucaccuuccggaugugcacaagcagaucucggggguugaucuuggucucccaaacugggggaaguaugugcugauaagugcaggugcucugacugcauuaauguugaugauuuucuuaaugacguguugcagaaagacuaauagagcagagucaauacaacacaguccuggagagacagggaggaaagugucggugacuucucacaacggaagggucauaucuucaugggaaucauauaaaagcggaagugagaccaagcuguga

SEQ ID NO: 63576 - RNA, 1575 nt, Artificial Sequence
  derived and/or modified CDS sequence (wt) from glycoprotein__RABV__KF663546.1
auguuuccucaaguucuuuuguuuguuccccuucuaguuuucucgucguguuuugggaaauuccccauuuacacgauaccagacaaacuugguccauggagucccaucgauauacaucaucucagcuguccgaacaaucugguuguggaagaugaaggaugcaccaauuugucuggauuuuccuacauggaacucaaagugggauauauuucagccauaaaagugaacggauucaccuguacagguguggugaccgaagcagaaaccuacacuaacuuuguugguuaugucaccaccacguuuaagagaaagcacuuucgcccuaugccggaugcgugcagagccgcauacaacuggaagguggcuggugaccccagguaugaagagucucugcacaauccguaccccgacuaccacuggcuccgaacugucaagaccaccaaggagucccuugucaucauaucuccgagcguugcagauuuggacccguacgauaaaucccuucacucgagaguuuuuccuggcggaaaaugcucaggaauaaccguguccuccacuugcugcucuacuaaccacgacuacaccaucuggaugccugaaaauccuagacugggaacuucaugugacauuuucaccaauaguagagggaagagggcaucaaaagggggcaagacuuguggauuuguggaugaaagaggcuuguacaagucucuaaagggagcaugcaagcugaagcuaugugggguucuaggacuuagacuuauggacggaacaugggucgcgauucagacaucagacgagaucaaauggugcccuccugaucagcuaguaaaucuacacgacuuucacucggaugagauugaacaucuuguuguggaggaguuggucaaaaagagggaagagugucuggacgcacuggagacuauuaugaccacaaaguccgugaguuucagacgucuuagucauuugaggaagcuagucccuggguuuggaaaggcguauaccauauucaacaaaaccuugauggaggcugaugcccacuacaaaucaauccggacuuggaaugaaaucauccccuccaaaggguguuuaagaguuggggggagaugucauccucaugugaacgggguguucuucaacggcauuauacuggguccugacggacauguucuaaucccagagaugcagucgucucuccuccaccagcauauggaauuguuggaguccucagucaucccuuugaugcaucccuuagcagacccgucaacagucuuuaaagacggcgacgaggcagaggacuuuguugagguucaccuuccggaugugcacaagcagaucucggggguugaucuuggucucccaaacugggggaaguaugugcugauaagugcaggugcuuugacugcauuaauguugccgauuuucuuaaugacguguugcagaaagacuaauagagcagggucaauacaacccaguccuggagagacagggaggaaagugucggugacuucucacaacggaagggucauauccuuaugggaaucauauaaaagcggaagugagaccaagcuguga

SEQ ID NO: 63577 - RNA, 1575 nt, Artificial Sequence
  derived and/or modified CDS sequence (wt) from glycoprotein__RABV__KF709069.1
augguuccucaggcucuccuguuuguaccucuucugguuuuuucaauguguuucgggaaauuccccaucuacacgauaccagacaaacuugguccuuggagcccaauugacauacaucaucucagcuguccaaacaacuugguuguagaggaugaaggaugcaccaacuugucagguuuuuccuacauggaacuuaaagugggauacauuucggccauaaaagugaacggguucacgugcacagguguggugacagaggcagaaacuuauacuaacuuuguugguuaugucaccacuauguucaaaagaaagcauuuccgcccgacaccggaugcaugucgggccgcuuacaacuggaaaauggccggugaccccagauaugaagaaucucugcacaauccuuacccugacuaccacuggcuucgaacugucaaaaccacgaaggaaucccuagucaucauauccccaaguguagcggaccuggacccauacgauaaaucccuucacucuagagucuuuccuaacggaaagugcucaggaauaacgauauccucuaccuacugcccuaccaaccaugauuacacuaucuggcucccugagaauccaagacuggggacaucuugugacaucuuuaccaauaguagagggaagagagcauccaaagggagcaagacuugcggguuuguugaugaaagagguuuguauaagucauugaaaggggcaugcaaacuuaaguugugugggguccuuggacuuagacuuauggauggaacgugggucgcaaugcaagcgucggacgagaccaaauggugccccccagaucagcugguaaaucuacacgacuuucgcucggacgagaucgaacauuucguuguggaggaguuggucaagaagagagaagagugucuggaugcacuagaguccaucaugacuacuaagucagugaguuucagacgucucagccacuugagaaagcuugucccuggguucggaaaagcauacaccauauucaacaaaaccuugauggaagcugaugcucacuacaagucaguccgaaccuggaaugagaucauccccucaaaaggguguuugagagucggggggaggugucauccucauguaaacgggguguuuuucaacgguauaauccuggguccugauggccauguucuaaucccagagaugcaaucgucccuccuucagcaacauauggaguuguuggaauccucaguuaucccccugaugcacccuuuagcagacccgucuacaguuuucaaggauggugaugaagcagagaauuuuguggagguucaccuuccugauguacacaaacagaucucgggaguugaccugggucucccuaacugggggaaguauguuuuaguaagugcagggguccugaucgccuugauguugauaauuuuucuaaugacauguugcggaagagucaaucgaccaaaguccacacaacacaaucuuggcgggacagggagggaggugucaguaacuccccaaagcggaaaggugauaucuucaugggagucauacaaaagcggaggugagaccagacuguga

SEQ ID NO: 63578 - RNA, 1575 nt, Artificial Sequence
  derived and/or modified CDS sequence (wt) from glycoprotein__RABV__KF709070.1
augguuccucaggcucuccuguuuguaccucuucugguuuuuucaauguguuucgggaaauuccccaucuacacgauaccagacaaacuugguccuuggagcccaauugacauacaucaucucagcuguccaaacaacuugguuguagaggaugaaggaugcaccaacuugucagguuuuuccuacauggaacuuaaagugggauacauuucggccauaaaagugaacggguucacgugcacagguguggugacagaggcagaaacuuauacuaacuuuguugguuaugucaccacuauguucaaaagaaagcauuuccgcccgacaccggaugcaugucgggccgcuuacaacuggaaaauggccggugaccccagauaugaagaaucucugcacaauccuuacccugacuaccacuggcuucgaacugucaaaaccacgaaggaaucccuagucaucauauccccaaguguagcggaccuggacccauacgauaaaucccuucacucuagagucuuuccuaacggaaagugcucaggaauaacgauauccucuaccuacugcccuaccaaccaugauuacacuaucuggcucccugagaauccaagacuggggacaucuugugacaucuuuaccaauaguagagggaagagagcauccaaagggagcaagacuugcggguuuguugaugaaagagguuuguauaagucauugaaaggggcaugcaaacuuaaguugugugggguccuuggacuuagacuuauggauggaacgugggucgcaaugcaagcgucggacgagaccaaauggugccccccagaucagcugguaaaucuacacgacuuucgcucggacgagaucgaacaucucguuguggaggaguuggucaagaagagagaagagugucuggaugcacuagaguccaucaugacuacuaagucagugaguuucagacgucucagccacuugagaaagcuugucccuggguucggaaaagcauacaccauauucaacaaaaccuugauggaagcugaugcucacuacaagucaguccgaaccuggaaugagaucauccccucaaaaggguguuugagagucggggggaggugucauccucauguaaacgggguguuuuucaacgguauaauccuggguccugauggccauguucuaaucccagagaugcaaucgucccuccuucagcaacauauggaguuguuggaauccucaguuaucccccugaugcacccuuuagcagacccgucuacaguuuucaaggauggugaugaagcagagaauuuuguggagguucaccuuccugauguacacaaacagaucucgggaguugaccugggucucccuaacugggggaaguauguuuuaguaagugcagggguccugaucgccuugauguugauaauuuuucuaaugacauguugcggaagagucaaucgaccaaaguccacacaacacaaucuuggcgggacagggagggaggugucaguaacuccccaaagcggaaaggugauaucuucaugggagucauacaaaagcggaggugagaccagacuguga

SEQ ID NO: 63579 - RNA, 1575 nt, Artificial Sequence
  derived and/or modified CDS sequence (wt) from glycoprotein__RABV__KF709071.1
augguuccucaggcucuccuguuuguaccucuucuggucuuuucaauguguuucgggaaauuccccaucuacacgauaccagacaaacuugguccuuggagcccaauugacauacaucaucucagcuguccaaacaacuugguuguagaggaugaaggaugcaccaacuugucagguuuuuccuacauggaacuuaaagugggauacauuucggccauaaaagugaacggguucacgugcacagguguggugacagaggcagaaacuuauacuaacuuuguugguuaugucaccacuacguucaaaagaaagcauuuccgcccgacaccggaugcaugucgggccgcuuacaacuggaaaauggccggugaccccagauaugaagaaucucugcacaauccuuacccugacuaccacuggcuucgaacugucaaaaccacgaaggaaucccuagucaucauauccccaaguguagcggaccuggacccauacgauaaaucccuucacucuagagucuuuccuaacggaaagugcucaggaauaacgauauccucuaccuacugcccuaccaaccaugauuacacuaucuggcucccugagaauccaagacuggggacaucuugugacaucuuuaccaauaguagagggaagagagcauccaaagggagcaagacuugcggguuuguugaugaaagagguuuguauaagucauugaaaggggcaugcaaacuuaaguugugugggguccuuggacuuagacuuauggauggaacgugggucgcaaugcaagcgucggacgagaccaaauggugccccccagaucagcugguaaaucuacacgacuuucgcucggacgagaucgaacaucucguuguggaggaguuggucaagaagagagaagagugucuggaugcacuagaguccaucaugacuacuaagucagugaguuucagacgucucagccacuugagaaagcuugucccuggguucggaaaagcauacaccauauucaacaaaaccuugauggaagcugaugcucacuacaagucaguccgaaccuggaaugagaucauccccucaaaaggguguuugagagucggggggaggugucauccucauguaaacgggguguuuuucaacgguauaauccuggguccugauggccauguucuaaucccagagaugcaaucgucccuccuucagcaacauauggaguuguuggaauccucaguuaucccccugaugcacccuuuagcagacccgucuacaguuuucaaggauggugaugaagcagagaauuuuguggagguucaccuuccugauguacacaaacagaucucgggaguugaccugggucucccuaacugggggaaguauguuuuaguaagugcagggguccugaucgccuugauguugauaauuuuucuaaugacauguugcggaagagucaaucgaccaaaguccacacaacacaaucuuggcgggacagggagggaggugucaguaacuccccaaagcggaaaggugauaucuucaugggagucauacaaaagcggaggugagaccagacuguga

SEQ ID NO: 63580 - RNA, 1575 nt, Artificial Sequence
  derived and/or modified CDS sequence (wt) from glycoprotein__RABV__KF709072.1
augguuccucaggcucuccuguuuguaccucuucugguuuuuucaauguguuucgggaaauuccccaucuacacgauaccagacaaacuugguccuuggagcccaauugacauacaucaucucagcuguccaaacaacuugguuguagaggaugaaggaugcaccaacuugucagguuuuuccuacauggaacuuaaagugggauacauuucggccauaaaagugaacggguucacgugcacagguguggugacagaggcagaaacuuauacuaacuuuguugguuaugucaccacuacguucaaaagaaagcauuuccgcccgacaccggaugcaugucgggccgcuuacaacuggaaaauggccggugaccccagauaugaagaaucucugcacaauccuuacccugacuaccacuggcuucgaacugucaaaaccacgaaggaaucccuagucaucauauccccaaguguagcggaccuggacccauacgauaaaucccuucacucuagagucuuuccuaacggaaagugcucaggaauaacgauauccucuaccuacugcccuaccaaccaugauuacacuaucuggcucccugagaauccaagacuggggacaucuugugacaucuuuaccaauaguagagggaagagagcauccaaagggagcaagacuugcggguuuguugaugaaagagguuuguauaagucauugaaaggggcaugcaaacuuaaguugugugggguccuuggacuuagacuuauggauggaacgugggucgcaaugcaagcgucggacgagaccaaauggugccccccagaucagcugguaaaucuacacgacuuucgcucggacgagaucgaacaucucguuguggaggaguuggucaagaagagagaagagugucuggaugcacuagaguccaucaugacuacuaagucagugaguuucagacgucucagccacuugagaaagcuugucccuggguucggaaaagcauacaccauauucaacaaaaccuugauggaagcugaugcucacuacaagucaguccgaaccuggaaugagaucauccccucaaaaggguguuugagagucggggggaggugucauccucauguaaacgggguguuuuucaacgguauaauccuggguccugauggccauguucuaaucccagagaugcaaucgucccuccuucagcaacauauggaguuguuggaauccucaguuaucccccugaugcacccuuuagcagacccgucuacaguuuucaaggauggugaugaagcagagaauuuuguggagguucaccuuccugauguacacaaacagaucucgggaguugaccugggucucccuaacugggggaaguauguuuuaguaagugcagggguccugaucgccuugauguugauaauuuuucuaaugacauguugcggaagagucaaucgaccaaaguccacacaacacaaucuuggcgggacagggagggaggugucaguaacuccccaaagcggaaaggugauaucuucaugggagucauacaaaagcggaggugagaccagacuguga

SEQ ID NO: 63581 - RNA, 1575 nt, Artificial Sequence
  derived and/or modified CDS sequence (wt) from glycoprotein__RABV__KF709074.1
augguuccucaggcucuccuguuuguaccucuucugguuuuuccaauguguuucgggaaauuccccaucuacacgauaccagacaaacuugguccuuggagcccaauugacauacaucaucucagcuguccaaacaacuugguuguagaggaugaaggaugcaccaacuugucagguuuuuccuacauggaacuuaaagugggauacauuucggccauaaaagugaacggguucacgugcacagguguggugacagaggcagaaacuuauacuaacuuuguugguuaugucaccacuacguucaaaagaaagcauuuccgcccgacaccggaugcaugucgggccgcuuacaacuggaaaauggccggugaccccagauaugaagaaucucugcacaauccuuacccugacuaccacuggcuucgaacugucaaaaccacgaaggaaucccuagucaucauauccccaaguguagcggaccuggacccauacgauaaaucccuucacucuagagucuuuccuaacggaaagugcucaggaauaacgauauccucuaccuacugcccuaccaaccaugauuacacuaucuggcucccugagaauccaagacuggggacgucuugugacaucuuuaccaauaguagagggaagagagcauccaaagggagcaagacuugcggguuuguugaugaaagagguuuguauaagucauugaaaggggcaugcaaacuuaaguugugugggguccuuggacuuagacuuauggauggaacgugggucgcaaugcaagcgucggacgagaccaaauggugccccccagaucagcugguaaaucuacacgacuuucgcucggacgagaucgaacaucucguuguggaggaguuggucaagaagagagaagagugucuggaugcacuagaguccaucaugacuacuaagucagugaguuucagacgucucagccacuugagaaagcuugucccuggguucggaaaagcauacaccauauucaacaaaaccuugauggaagcugaugcucacuacaagucaguccgaaccuggaaugagaucauccccucaaaaggguguuugagagucggggggagguguuauccucauguaaacgggguguuuuucaacgguauaauccuggguccugauggccauguucuaaucccagagaugcaaucgucccuccuucagcaacauauggaguuguuggaauccucaguuaucccccugaugcacccuuuagcagacccgucuacaguuuucaaggauggugaugaagcagagaauuuuguggagguucaccuuccugauguacacaaacagaucucgggaguugaccugggucucccuaacugggggaaguauguuuuaguaagugcagggguccugaucgccuugauguugauaauuuuucuaaugacauguugcggaagagucaaucgaccaaaguccacacaacacaaucuuggcgggacagggagggaggugucaguaacuccccaaagcggaaaggugauaucuucaugggagucauacaaaagcggaggugagaccagacuguga

SEQ ID NO: 63582 - RNA, 1575 nt, Artificial Sequence
  derived and/or modified CDS sequence (wt) from glycoprotein__RABV__KF709075.1
augguuccucaggcucuccuguuuguaccucuucugguuuuuucaauguguuucgggaaauuccccaucuacacgauaccagacaaacuugguccuuggagcccaauugacauacaucaucucagcuguccaaacaacuugguuguagaggaugaaggaugcaccaacuugucagguuuuuccuacauggaacuuaaagugggauacauuucggccauaaaagugaacggguucacgugcacagguguggugacagaggcagaaacuuauacuaacuuuguugguuaugucaccacuacguucaaaagaaagcauuuccgcccgacaccggaugcaugucgggccgcuuacaacuggaaaauggccggugaccccagauaugaagaaucucugcacaauccuuacccugacuaccacuggcuucgaacugucaaaaccacgaaggaaucccuagucaucauauccccaaguguagcggaccuggacccauacgauaaaucccuucacucuagagucuuuccuaacggaaagugcucaggaauaacgauauccucuaccuacugcccuaccaaccaugauuacacuaucuggcucccugagaauccaagacuggggacaucuugugacaucuuuaccaauaguagagggaagagagcauccaaagggagcaagacuugcggguuuguugaugaaagagguuuguauaagucauugaaaggggcaugcaaacuuaaguugugugggguccuuggacuuagacuuauggauggaacgugggucgcaaugcaagcgucggacgagaccaaauggugccccccagaucagcugguaaaucuacacgacuuucgcucggacgagaucgaacaucucguuguggaggaguuggucaagaagagagaagagugucuggaugcacuagaguccaucaugacuacuaagucagugaguuucagacgucucagccacuugagaaagcuugucccuggguucggaaaagcauacaccauauucaacaaaaccuugauggaagcugaugcucacuacaagucaguccgaaccuggaaugagaucauccccucaaaaggguguuugagagucggggggaggugucauccucauguaaacgggguguuuuucaacgguauaauccuggguccugauggccauguucuaaucccagagaugcaaucgucccuccuucagcaacauauggaguuguuggaauccucaguuaucccccugaugcacccuuuagcagacccgucuacaguuuucaaggauggugaugaagcagagaauuuuguggagguucaccuuccugauguacacaaacagaucucgggaguugaccugggucucccuaacugggggaaguauguuuuaguaagugcagggguccugaucgccuugauguugauaauuuuucuaaugacauguugcggaagagucaaucgaccagaguccacacaacacaaucuuggcgggacagggagggaggugucaguaacuccccaaagcggaaaggugauaucuucaugggagucauacaaaagcggaggugagaccagacuguga

SEQ ID NO: 63583 - RNA, 1575 nt, Artificial Sequence
  derived and/or modified CDS sequence (wt) from glycoprotein__RABV__KF709076.1
augguuccucaggcucuccuguuuguaccucuucugguuuuuucaauguguuucgggaaauuccccaucuacacgauaccagacaaacuugguccuuggagcccaauugacauacaucaucucagcuguccaaacaacuugguuguagaggaugaaggaugcaccaacuugucagguuuuuccuacauggaacuuaaagugggauacauuucggccauaaaagugaacggguucacgugcacagguguggugacagaggcagaaacuuauacuaacuuuguugguuaugucaccacuacguucaaaagaaagcauuuccgcccgacaccggaugcaugucgagccgcuuacaacuggaaaauggccggugaccccagauaugaagaaucucugcacaauccuuacccugacuaccacuggcuucgaacugucaaaaccacgaaggaaucccuagucaucauauccccaaguguagcggaccuggacccauacgauaaaucccuucacucuagagucuuuccuaacggaaagugcucaggaauaacgauauccucuaccuacugcccuaccaaccaugauuacacuaucuggcucccugagaauccaagacuggggacaucuugugacaucuuuaccaauaguagagggaagagagcauccaaagggagcaagacuugcggguuuguugaugaaagagguuuguauaagucauugaaaggggcaugcaaacuuaaguugugugggguccuuggacuuagacuuauggauggaacgugggucgcaaugcaagcgucggacgagaccaaauggugccccccagaucagcugguaaaucuacacgacuuucgcucggacgagaucgaacaucucguuguggaggaguuggucaagaagagagaagagugucuggaugcacuagaguccaucaugacuacuaagucagugaguuucagacgucucagccacuugagaaagcuugucccuggguucggaaaagcauacaccauauucaacaaaaccuugauggaagcugaugcucacuacaagucaguccgaaccuggaaugagaucauccccucaaaaggguguuugagagucggggggaggugucauccucauguaaacgggguguuuuucaacgguauaauccuggguccugauggccauguucuaaucccagagaugcaaucgucccuccuucagcaacauauggaguuguuggaauccucaguuaucccccugaugcacccuuuagcagacccgucuacaguuuucaaggauggugaugaagcagagaauuuuguggagguucaccuuccugauguacacaaacagaucucgggaguugaccugggucucccuaacugggggaaguauguuuuaguaagugcagggguccugaucgccuugauguugauaauuuuucuaaugacauguugcggaagagucaaucgaccagaguccacacaacacaaucuuggcgggacagggagggaggugucaguaacuccccaaagcggaaaggugauaucuucaugggagucauacaaaagcggaggugagaccagacuguga

SEQ ID NO: 63584 - RNA, 1575 nt, Artificial Sequence
  derived and/or modified CDS sequence (wt) from glycoprotein__RABV__KF709077.1
augguuccucaggcucuccuguuuguaccucuucugguuuuuucaauguguuucgggaaauuccccaucuacacgauaccagacaaaccugguccuuggagcccaauugacauacaucaucucagcuguccaaacaacuugguuguagaggaugaaggaugcaccaacuugucagguuuuuccuacauggaacuuaaagugggauacauuucggccauaaaagugaacggguucacgugcacagguguggugacagaggcagaaacuuauacuaacuuuguugguuaugucaccacuacguucaaaagaaagcauuuccgcccgacaccggaugcaugucgagccgcuuacaacuggaaaauggccggugaccccagauaugaagaaucucugcacaauccuuacccugacuaccacuggcuucgaacugucaaaaccacgaaggaaucccuagucaucauauccccaaguguagcggaccuggacccauacgauaaaucccuucacucuagagucuuuccuaacgaaaagugcucaggaauaacgauauccucuaccuacugcccuaccaaccaugauuacacuaucuggcucccugagaauccaagacuggggacaucuugugacaucuuuaccaauaguagagggaagagagcauccaaagggagcaagacuugcggguuuguugaugaaagagguuuguauaagucauugaaaggggcaugcaaacuuaaguugugugggguccuuggacuuagacuuauggauggaacgugggucgcaaugcaagcgucggacgagaccaaauggugccccccagaucagcugguaaaucuacacgacuuucgcucggacgagaucgaacaucucguuguggaggaguuggucaagaagagagaagagugucuggaugcacuagaguccaucaugacuacuaagucagugaguuucagacgucucagccacuugagaaagcuugucccuggguucggaaaagcauacaccauauucaacaaaaccuugauggaagcugaugcucacuacaagucaguccgaaccuggaaugagaucauccccucaaaaggguguuugagagucggggggaggugucauccucauguaaacgggguguuuuucaacgguauaauccuggguccugauggccauguucuaaucccagagaugcaaucgucccuccuucagcaacauauggaguuguuggaauccucaguuaucccccugaugcacccuuuagcagacccgucuacaguuuucaaggauggugaugaagcagagaauuuuguggagguucaccuuccugauguacacaaacagaucucgggaguugaccugggucucccuaacugggggaaguauguuuuaguaagugcagggguccugaucgccuugauguugauaauuuuucuaaugacauguugcggaagagucaaucgaccagaguccacacaacacaaucuuggcgggacagggagggaggugucaguaacuccccaaagcggaaaggugauaucuucaugggagucauacaaaagcggaggugagaccagacuguga

SEQ ID NO: 63585 - RNA, 1575 nt, Artificial Sequence
  derived and/or modified CDS sequence (wt) from glycoprotein__RABV__KF709078.1
augguuccucaggcucuccuguuuguaccucuucugguuuuuucaauguguuucgggaaauuccccaucuacacgauaccagacaaacuugguccuuggagcccaauugacauacaucaucucagcuguccaaacaacuugguuguagaggaugaaggaugcaccaacuugucagguuuuuccuacauggaacuuaaagugggauacauuucggccauaaaagugaacggguucacgugcacagguguggugacagaggcagaaacuuauacuaacuuuguugguuaugucaccacuacguucaaaagaaagcauuuccgcccgacaccggaugcaugucgagccgcuuacaacuggaaaauggccggugaccccagauaugaagaaucucugcacaauccuuacccugacuaccacuggcuucgaacugucaaaaccacgaaggaaucccuagucaucauauccccaaguguagcggaccuggacccauacgauaaaucccuucacucuagaguccuuccuaacggaaagugcucaggaacaacgacauccucuaccuacugcccuaccaaccaugauuacacuaucuggcucccugagaauccaagacuggggacaucuugugacaucuuuaccaauaguagagggaagagagcauccaaagggagcaagacuugcggguuuguugaugaaagagguuuguauaagucauugaaaggggcaugcaaacuuaaguugugugggguccuuggacuuagacuuauggauggaacgugggucgcaaugcaagcgucggacgagaccaaauggugccccccagaucagcugguaaaucuacacgacuuucgcucggacgagaucgaacaucucguuguggaggaguuggucaagaagagagaagagugucuggaugcacuagaguccaucaugacuacuaagucagugaguuucagacgucucagccacuugagaaagcuugucccuggguucggaaaagcauacaccauauucaacaaaaccuugauggaagcugaugcucacuacaagucaguccgaaccuggaaugagaucauccccucaaaaggguguuugagagucggggggaggugucauccucauguaaacgggguguuuuucaacgguauaauccuggguccugauggccauguucuaaucccagagaugcaaucgucccuccuucagcaacauauggaguuguuggaauccucaguuaucccccugaugcacccuuuagcagacccgucuacaguuuucaaggauggugaugaagcagagaauuuuguggagguucaccuuccugauguacacaaacagaucucgggaguugaccugggucucccuaacugggggaaguauguuuuaguaagugcagggguccugaucgccuugauguugauaauuuuucuaaugacauguugcggaagagucaaucgaccagaguccacacaacacaaucuuggcgggacagggagggaggugucaguaacuccccaaagcggaaaggugauaucuucaugggagucauacaaaagcggaggugagaccagacuguga

SEQ ID NO: 63586 - RNA, 1575 nt, Artificial Sequence
  derived and/or modified CDS sequence (wt) from glycoprotein__RABV__KF709080.1
augguuccucaggcucuccuguuuguaccucuucugguuuuuucaauguguuucgggaaauuccccaucuacacgauaccagacaaacuugguccuuggagcccaauugacauacaucaucucagcuguccaaacaacuugguuguagaggaugaaggaugcaccaacuugucagguuuuuccuacauggaacuuaaagugggauacauuucggccauaaaagugaacggguucacgugcacagguguggugacagaggcagaaacuuauacuaacuuuguugguuaugucaccacuacguucaaaagaaagcauuuccgcccgacaccggaugcaugucgagccgcuuacaacuggaaaauggccggugaccccagauaugaagaaucucugcacaauccuuacccugacuaccacuggcuucgaacugucaaaaccacgaaggaaucccuagucaucauauccccaaguguagcggaccuggacccauacgauaaaucccuucacucuagagucuuuccuaacggaaagugcucaggaauaacgauauccucuaccuacugcccuaccaaccaugauuacacuaucuggcucccugagaauccaagacuggggacaucuugugacaucuuuaccaauaguagagggaagagagcauccaaagggagcaagacuugcggguuuguugaugaaagagguuuguauaagucauugaaaggggcaugcaaacuuaaguugugugggguccuuggacuuagacuuauggauggaacgugggucgcaaugcaagcgucggacgagaccaaauggugccccccagaucagcugguaaaucuacacgacuuucgcucggacgagaucgaacaucucgcuguggaggaguuggucaagaagagagaagagugucuggaugcacuagaguccaucaugacuacuaagucagugaguuucagacgucucagccacuugagaaagcuugucccuggguucggaaaagcauacaccauauucaacaaaaccuugauggaagcugaugcucacuacaagucaguccgaaccuggaaugagaucauccccucaaaaggguguuugagagucggggggaggugucauccucauguaaacgggguguuuuucaacgguauaauccuggguccugauggccauguucuaaucccagagaugcaaucgucccuccuucagcaacauauggaguuguuggaauccucaguuaucccccugaugcacccuuuagcagacccgucuacaguuuucaaggauggugaugaagcagagaauuuuguggagguucaccuuccugauguacacaaacagaucucgggaguugaccugggucucccuaacugggggaaguauguuuuaguaagugcagggguccugaucgccuugauguugauaauuuuucuaaugacauguugcggaagagucaaucgaccagaguccacacaacacaaucuuggcgggacagggagggaggugucaguaacuccccaaagcggaaaggugauaucuucaugggagucauacaaaagcggaggugagaccagacuguga

SEQ ID NO: 63587 - RNA, 1575 nt, Artificial Sequence
  derived and/or modified CDS sequence (wt) from glycoprotein__RABV__KF726852.1
augaucccucaggcuuuucuguuuguaccccuucugguuguuccauuguguuuugggaaauuccccauuuacacgauaccagacaaacucggucccuggagucccauugauauacaucaucucagcuguccgaauaauuugguuguggaggaugaaggauguaccaaucugucaggauucucauacauggaacuuaaaguaggauauauuucagccauaaaggugaauggguucacuuguacggguguggugacagaagcagaaaccuacacuaacuuuguuggcuaugucaccaccacguuuaagagaaagcacuuccgaccaacgccggaugcaugcagaucugcauacaauuggaagauggcuggugaccccagauaugaagagucucugcacaaucccuauccggauuaucauuggcuccgaacuguaaaaaccaccaaagaguccuuuguuaucauaucuccaaguguggcagaucuagacccguacgauaagucccuucauucgagaguuuuuccuagagggaaaugcucaggaauaacgguguccucuaccuacugcccuaccaaccaugacuacaccaucuggaugccugagaaucccagacuggggaccucuugugauauuuucaccaauagccgagggaagagagcauucaaagggagcaagaccuguggauuuguagaugagagaggcuuguacaaaucucuaaaaggagcaugcaaacugaagcuuugcgggguucuuggacucagacuuauggauggaacaugggucgcgauucagacaucagacgagaccaaguggugcccuccugaccagcuaguaaaucuacaugacuuucauucggaugagauugaacaucuuguuguggaggaguuggucaagaaaagagaagagugucuagaugcacuggaguccaucaugaccaccaaguccgugaguuuccgacgccucagucacuugaggaaacuugugccuggguuuggaaaagcauacaccauauucaauaagaccuugauggaggcugaugcucacuacaagucgguccgaacuuggaacgagaucauccccucuaaaggguguuuaagaguugggggcagaugucacccccaugugaacggaguguuuuucaacgguaucauccugggcccugacggucauguccugaucccggaaaugcagucaucccuccuccagcagcauauggagcuguuggaauccucgguuauccccuugaugcauccuuuggcagauccaucaacgguuuuuaaaaauggugacgaggcggaggauuuuguugagguacaccuuccagaugugcauaagcaggucucagggguugaucucggucucccaaguugggggaaguauguguugaugagugcaggcauucugacugcacugauguugaugauuuucuuaaugacguguugccgaaggaccaauagaucagaaucaauacaacacagucuuggagagacggggaggaaagugucgguaaccucccaaagcgggagggucauaucuucaugggagucauauaaaaguggaggugagaccaagcuguaa

SEQ ID NO: 63588 - RNA, 1575 nt, Artificial Sequence
  derived and/or modified CDS sequence (wt) from glycoprotein__RABV__KF726853.1
augauuucucaagccuuuuuguuuguaccccuucuagcuuucucaccauguuucgggaaauuccccauuuacacgauaccagacaagcuugguccauggagccccauugauauacaucaucucaguuguccgaacaaucugguuguggaagaugaaggaugcaccaaucugucuggauuuuccuacauggagcucaaaguaggauacaucuccgccauaaaagugaacggauucaccuguacagguguagugacagaagcagaaaccuacacgaacuuugucgguuaugucaccaccacguuuaagagaaagcacuuucguccuaugccagacgcgugcagaaccgcauacagcuggaagauggcuggugaccccagguaugaagagucucugcacaauccauacccugacuaccacuggcuccgaacuguaaagaccaccaaggagucccuugucauuauaucuccaagcguugcagauuuggacccguaugauaaaucccuucacucgagaguuuuuccuggcggaaaauguucaggauuaaccguguccucuaccuguugcucuacuaaccacgacuacaccaucuggaugccugaaaauccuagacugggaacuucgugugacaucuucacaaauaguagagggaagagggcaucaaaggggggcaagaccuguggauuuguggaugaaagaggcuuguauaagucucuaaagggggcaugcaagcugaagcuauguggggucucagggcuucgacuuauggauggaacauggguugcaauucagacgucagaugagaucaaauggugcucuccugaucagcuagugaaucuacacgaucuucauucggaugagauugaacaucuuguuguggaggaguuggucaagaagagggaagaaugucuggacgcacuggagucuauuaugaccacaaaguccgugagcuucagacgucuuagucacuugaggaagcuggucccuggguuuggaaaggcguauaccauauucaacaaaaccuugauggaggccgaugcucacuauaagucaauccggaccuggaaugaaaucauccccucuaaaggguguuuaagaguuggggggagaugucauccccaugugaacgggguguucuucaaugguaucauacuagguccugacggacauguucuaaucccagagaugcaaucgucccuccuccaucagcauauggaauuguuggaguccucagucaucccuuugaugcaucccuuagcagacccgucaacggucuuuaaagacggugacgaggcggaggacuuuguugagguucaccuuccagaugcgcacaagcagaucucggggguugaucuuggucucccaaacugggggaaguaugugcugaugagugcaggcgcucugacugcauuaauguugaugauuuucuuaaugacgugcugcagaaagacuaauagagcagaaucaaugccacacaguccuggagagacagggaggaaagugucauuaacuucgcacaacggaagggucauaucuucaugggaaucauauaaaaguggaggugagaccaagcuguga

SEQ ID NO: 63589 - RNA, 1575 nt, Artificial Sequence
  derived and/or modified CDS sequence (wt) from glycoprotein__RABV__KJ004416.1
augauuccucaaguucuuuuguuuguuccccuucuaguuuucucgucguguuuugggaaauuccccauuuacacgauaccagacaaacuugguccauggagucccaucgauauacaucaucucagcuguccgaacaaucugguuguggaagaugaaggaugcaccaauuugucuggauuuuccuacauggaacucaaagugggauauauuucagccauaaaagugaacggauucaccuguacagguguggugaccgaagcagaaaccuacacuaacuuuguugguuaugucaccaccacguuuaagagaaagcacuuucgcccuaugccggaugcgugcagagccgcauacaacuggaagauggcuggugaccccagguaugaagagucucugcacaauccguaccccgacuaccacuggcuccgaacugucaagaccaccaaggagucccuugucaucauaucuccgagcguugcagauuuggacccguacgauaaaucccuucacucgagaguuuuuccuggcggaaaaugcucaggaauaaccguguccuccacuugcugcucuacuaaccacgacuacaccaucuggaugccugaaaauccuagacugggaacuucaugugacauuuucaccaauaguagagggaagagggcaucaaaagggggcaagacuuguggauuuguggaugaaagaggcuuguacaagucucuaaagggagcaugcaagcugaaacuaugugggguucuaggacuuagacuuauggacggaacaugggucgcgauucagacaucagaugagaccaaauggugcucuccugaucagcuaguaaaucuacacgacuuucacucggaugagauugaacaucuuguuguggaggaguuggucaaaaagagggaagagugucuggacgcacuggagacuauuaugaccacaaaguccgugaguuucagacgucuuagucauuugaggaagcuagucccuggguuuggaaaggcguauaccauauucaacaaaaccuugauggaggcugaugcucacuacaaaucaauccggacuuggaaugaaaucauccccuccaaaggguguuuaagaguuggggggagaugucauccucauguuaacgggguguucuucaacggcauuauacuggguccugacggacauguucuaaucccagagaugcagucgucccuccuccaccagcauauggaauuguuggaguccucagucaucccuuugaugcaucccuuagcagacccgucaacagucuuuaaagacggcgacgaggcagaggacuuuguugagguucaccucccggaugugcacaagcagaucucggggguugaucuuggucucccaaacugggggaaguaugugcugauaagugcaggugcuuugacugcauuaauguuuacgauuuucuuaaugacguguugcagaaagacuaauagagcagggucaauacaacucaguccuggagagacagggaggaaagugucggugacuucucacaacggaagggucauaucuuccugggaaucauauaaaagcggaagugagaccaagcuguga

SEQ ID NO: 63590 - RNA, 1575 nt, Artificial Sequence
  derived and/or modified CDS sequence (wt) from glycoprotein__RABV__KJ174608.1
augaucccucaggcucuucugucugugccucuucuaauuuccucguuguguuucgggaaauuccccaucuacacgauaccggagaagcucggcccuuggagucccaucgacauacaucaccucagcuguccuaacaauuugguuguggaggaugagggaugcaacagucugucaggguuuucuuacauggaacugaaggugggauacaucucugccauaaaaguuaauggguucacuuguacugguguugugacagaagcugagaccuacaccaacuuuguugguuacgucaccaccacauucaagagaaaacacuuccgcccuaugccagaugcaugcagagccgcauacaacuggaagacggccggcgauccuagauaugaagagucccuucacaauccuuauccugauuaccauuggcuaaggaccguaaaaaccaccaaagaaucccuuauuaucauaucgccaaguguggcugauuuggaccccuacgacaaaucucuucauucaagaaucuucccuggugggaaaugcuugggaauaacaaucucuuccaccuacuguucaacuaaccaugauuauacuaucuggaugccugaagaagcaagacucgggacaucuugugacauuuuuaccaacagcaaagggaagagagcauccaaaggggguaggacuuguggauucguggaugaacggggcuuguauaagucucuaaaaggggcauguaaacuuaagcugugcggaguuccuggacuuagacuuauggauggaacgugggucgcuauucagacaccaaaugagaccaaauggugcucuccugaucagcuggugaauguacaugacuuucgcucagaugagauagaacaucucgucguggaggaguugaucaggaaaagggaggaaugucuagaugcacuggaguccaucaugacuacaaaaucaguaagcuucaggcgucucagcaacuugagaaaacuuguuccuggguuuggaaaggcauauacuauauucaacaaaaccuuaauggaggcugaugcucacuacaagucaguucggacuuggaaugaaaucauccccucaagagggugccugaaaguuggagggaggugucauccucaugugaauggaguguuuuucaaugguauaauuuuggguccggaugggcauauccugauuccggagaugcaaucaucccuccuccaacagcauauggagcuguuagaauccucuguaauccccuuaauacauccucuggcagacccaucaacagucuucaaggacggugaugaggcggaggacuuuguugagguucaccuuccggacguucaccaacaggucucagggguugaccucggucucccagacugggggaaguaugugcugaugagugcaggugcucuagcgaccgugaugcugacaauauucuugauaaccuguugcagaagggucaagagaacagaaucaauacaacaaagucuuggugagucaggaaggaaagugucgguaacuccccaaaacggaaaagucauguccucaugggaauauuacaagaguggaggcgggaccaggcuguga

SEQ ID NO: 63591 - RNA, 1575 nt, Artificial Sequence
  derived and/or modified CDS sequence (wt) from glycoprotein__RABV__KJ174609.1
augaucccucaagcucuucugucugugccucuucuaauuuccucguuguguuucgggaaauuccccaucuacacgauaccagagaagcucggcccuuggagucccaucgacauacaucaccucagcuguccuaacaauuugguuguggaggaugagggaugcaacagucugucaggguuuucuuacauggaacugaaggugggauacaucucugccauaaaaguuaauggguucacuuguacugguguugugacagaagcugagaccuacaccaacuuuguugguuacgucaccaccacauuuaagagaaaacacuuccgcccuauggcggaugcaugcagagccgcauacaacuggaagacggccggcgauccuagauaugaagagucccuucacaauccuuauccagauuaccauuggcuaaggaccguaaaaaccaccaaagaaucccuuauuaucauaucgccaaguguggcugauuuggaccccuacgacaaaucucuucauucaagaaucuucccuggugggaaaugcuuggggauaacaaucucuuccaccuacuguucaacuaaccaugauuauacuaucuggaugcccgaagaggcaagacucgggacaucuugugacauuuuuaccaacagcaaggggaagagagcauccaagggggguaggacuuguggauucguggaugaacggggcuuguauaagucucuaaaaggggcauguaaacuuaagcugugcggaguuccuggacuuagacuuauggauggaacguggguggcuauucagacaccaaaugagaccaaauggugcucucccgaucagcuggugaauguacaugacuuucgcucagaugagauagaacaucucgucguggaggaguugaucaggaaaagggaagaaugucuagaugcacuggaguccaucaugacuacaaaaucaguaagcuucaggcgucucagcaacuugagaaaacuuguuccuggguuuggaaaggcauauacuauauucaacaaaaccuuaauggaggcugacgcucacuacaagucaguucggacuuggaaugaaaucauccccucgagagggugccugaaagucggagggaggugucauccucaugugaauggaguguuuuucaaugguauaauuuuggguccggaugggcauauccugauuccggaaaugcaaucaucccuccuccaacagcauauggagcuguuagaauccucuguaaucccuuuaauacauccucuggcagacccaucaacagucuucaaggacggugaugaggcggaggacuuuguugagguucaccucccggacguucaccaacaggucucagggguugaccucggucucccagacugggggaaguaugugcugaugagugcaggugcucuagcgaccgugaugcugacaauauucuugauaaccuguugcagaagggucaagagaacagaaucaauacaacaagguccuggugagucaggaaggaaaguaucgguuacuccccaaaacggaaaagucauguccucaugggaauauuacaagaguggaggcgggaccagguuguga

SEQ ID NO: 63592 - RNA, 1575 nt, Artificial Sequence
  derived and/or modified CDS sequence (wt) from glycoprotein__RABV__KJ174615.1
augaucccucaagcucuucugucugugccucuucuaauuuccucguuguguuucgggaaauuccccaucuacacgauaccagagaagcucggcccuuggagucccaucgacauacaucaccucagcuguccuaacaauuugguuguggaggaugagggaugcaacagucugucaggguuuucuuacauggaacugaaggugggauacaucucugccauaaaaguuaauggguucacuuguacugguguugugacagaagcugagaccuacaccaacuuuguugguuacgucaccaccacauuuaagagaaaacacuuccgcccuauggcggaugcaugcagagccgcauacaacuggaagacggccggcgauccuagauaugaagagucccuucacaauccuuauccagauuaccauuggcuaaggaccguaaaaaccaccaaagaaucccuuauuaucauaucgccaaguguggcugauuuggaccccuacgacaaaucucuucauucaagaaucuucccuggugggaaaugcuuggggauaacaaucucuuccaccuacuguucaacuaaccaugauuauacuaucuggaugcccgaagaagcaagacucgggacaucuugugacauuuuuaccaacagcaaggggaagagagcauccaagggggguaggacuuguggauucguggaugaacggggcuuguauaagucucuaaaaggggcauguaaacuuaagcugugcggaguuccuggacuuagacuuauggauggaacguggguggcuauucagacgccaaaugagaccaaauggugcucucccgaucagcuggugaauguacaugacuuucgcucagaugagauagaacaucucgucguggaggaguugaucaggaaaagggaagaaugucuagaugcacuggaguccaucaugacuacaaaaucaguaagcuucaggcgucucagcaacuugagaaaacuuguuccuggguuuggaaaggcauauacuauauucaacaaaaccuuaauggaggcugacgcucacuacaagucaguucggacuuggaaugaaaucauccccucaagagggugccugaaagucggagggaggugucauccucaugugaauggaguguuuuucaaugguauaauuuuggguccggaugggcauauccugauuccggaaaugcaaucaucccuccuccaacagcauauggagcuguuagaauccucuguaaucccuuuaauacauccucuggcagacccaucaacagucuucaaggacggugaugaggcggaggacuuuguugagguucaccuuccggacguucaccaacaggucucagggguugaccucggucucccagacugggggaaguaugugcugaugagugcaggugcucuagcgaccgugaugcugacaauauucuugauaaccuguugcagaagggucaagagaacagaaucaauacaacaagguccuggugagucaggaaggaaauuaucgguuacuccccaaaacggaaaagucauguccucaugggaauauuacaagaguggaggcgggaccagguuguga

SEQ ID NO: 63593 - RNA, 1575 nt, Artificial Sequence
  derived and/or modified CDS sequence (wt) from glycoprotein__RABV__KJ174616.1
augaucccucaggcucuucugucugugccucuucuaauuuccucguuguguuucgggaaauuccccaucuacacgauaccagagaagcucggcccuuggagucccaucgacauacaucaccucagcuguccuaacaauuugguuguggaggaugagggaugcaacagucugucaggguuuucuuacauggaacugaaggugggauacaucucugccauaaaaguuaauggguucacuuguacugguguugugacagaagcugagaccuacaccaacuuuguugguuacgucaccaccacauucaagagaaaacacuuccgcccuaugccggaugcaugcagagccgcauacaacuggaagacggccggugauccuagauaugaagagucccuucacaauccuuauccugauuaccauuggcuaaggacuguaaaaaccaccaaagaaucccuuauuaucauaucgccaaguguggcugauuuggaccccuacgacaaaucucuucauucaagaaucuucccuggugggaaaugcuugggaauaacaaucucuuccaccuacuguucaacuaaucaugauuauacuaucuggaugcccgaagaagcaagacucgggacaucuugugacauuuuuaccaacagcaaagggaagagagcauccaagggggguaggacuuguggauucguggaugaacggggcuuguauaagucucuaaaaggggcauguaaacuuaagcugugcggaguuccuggacucagacuuauggauggaacgugggucgcuauucagacaccaaaugagaccaaauggugcucuccugaucagcuggugaauguacaugacuuucgcucagaugagauagaacaucucgucguggaggaguugaucaggaaaagggaagaaugucuagaugcacuggaguccaucaugacuacaaaaucaguaagcuucaggcgucucagcaacuugagaaaacuuguuccuggguuuggaaaggcauauacuauauucaacaaaaccuugauggaggcugaugcucacuacaagucaguucggacuuggaaugaaaucauccccucaaaagggugccugaaagucggagggaggugucauccucaugugaauggaguguuuuucaaugguauaauuuuggguccggaugggcauauccugauuccggagaugcaaucaucccuccuccaacagcauauggaacuguuagaauccucuguaauccccuuaauacauccucuggcagacccaucaacagucuucaaggacggugaugaggcggaggacuuuguugagguucaccuuccggacguucaccaacaggucucagggguugaccucggucucccagacugggggaaguaugugcugaugagugcaggugcucuagcgaccgugaugcugacaauauucuugauaaccuguugcagaagggucaagagaacagaaucaguacaacaaggucuuggugagucaggaaggaaagugucgguagcuccccaaaacggaaaagucauguccucaugggaauauuacaagaguggaggcgggaccaggcuguga

SEQ ID NO: 63594 - RNA, 1575 nt, Artificial Sequence
  derived and/or modified CDS sequence (wt) from glycoprotein__RABV__KJ174617.1
augaucccucaggcucuucugucugugccucuucuaauuuccucguuguguuucgggaaauuccccaucuacacgauaccagagaagcucggcccuuggagucccaucgacauacaucaccucagcuguccuaacaauuugguuguggaggaugagggaugcaacagucugucaggguuuucuuacauggaacugaaggugggauacauuucugccauaaaaguuaauggguucacuuguacugguguugugacagaagcugagaccuacaccaacuuuguugguuacgucaccaccacauucaagagaaaacacuuccgcccuaugccggaugcaugcagagccgcauacaacuggaagacggccggcgauccuagauaugaagagucccuucacaauccuuauccugauuaccauuggcuaaggacuguaaaaaccaccaaagaaucccuuauuaucauaucgccaaguguggcugauuuggaccccuacgacaaaucucuucauucaagaaucuucccuggugggaaaugcuugggaauaacaaucucuuccaccuacuguucaacuaaccaugauuauacuaucuggaugcccgaagaagcaagacucgggacaucuugugacauuuuuaccaacagcaaagggaagagagcauccaagggggguaggacuuguggauucguggaugaacgaggcuuguauaagucucuaaaaggggcauguaaacuuaagcugugcggaguuccuggacuuagacuuauggauggaacgugggucgcuauucagacaccaaaugagaccaaauggugcucuccugaucagcuggugaauguacaugacuuucgcucagaugagauagaacaucucgucguggaggaguugaucaggaaaagggaagaaugucuagaugcacuggaguccaucaugacuacaaaaucaguaagcuucaggcgucucagcaacuugagaaaacuuguuccuggguuuggaaaggcauauacuauauucaacaaaaccuuaauggaggcugaugcucacuacaagucaguucggacuuggaaugaaaucauccccucaagagggugccugaaagucggagggaggugucauccucaugugaauggaguguuuuucaaugguauaauuuuggguccggaugggcauauccugauuccggagaugcaaucaucccuccuccaacagcauauggagcuguuagaauccucuguaauccccuuaauacauccucuggcagacccaucaacagucuucaaggacggugaugaggcggaggacuuuguugagguucaccuuccggacguucaccaacaggucucagggguugaccucggucucccagacugggggaaguaugugcugaugagugcaggugcucuagcgaccgugaugcugacaauauucuugauaaccuguugcagaagggucaagagaacagaaucaauacaacaaggucuuggugagucaggaaggaaagugucgguagcuccccaaaacggaaaagucauguccucaugggaauacuacaagaguggaggcgggaccaggcuguga

SEQ ID NO: 63595 - RNA, 1575 nt, Artificial Sequence
  derived and/or modified CDS sequence (wt) from glycoprotein__RABV__KJ174618.1
augaucccucaggcucuucuguuugugccuuuucuauuucccucguugugucucgggaaauuccccaucuacaccauaccggaaaagcucggcccuuggagucccaucgacauacaucaucucagcuguccuaacaauuugguuguggaggacgaggguugcgacagucugucaggguuuucuuacauggaacugaagguggguuacaucucugccauaaaggugaauggguucacuuguaccggugucguuacagaagcugagaccuacaccaacuuuguugguuaugucaccaccacauucaagagaaaacacuuccgcccuaugccagaugcaugcagagcugcguacaacuggaagacagccggugacccuagauaugaggagucucuucacaauccuuauccugauuaccauuggcuacggaccguaaaaaccacuaaagaaucucuuauuaucauaucgccgaguguggcugauuuggacccauaugacaaaucccuucauucaagaguuuucccuggugggaaauguuuggggauaacaaucucuucuaccuacugcucaacuaaccaugacuauacuaucuggaugcccgaagaagcaagacucgggacaucuugugacauuuuuaccaacagcaaagggaagagggcaucuaagggggguaggacuugcggauucguggaugaaaggggcuuauauaagucucuaaaaggggcauguaaacuuaagcugugcggaguuccuggacuuagacuuauggauggaacgugggucgcuauucagacaccaggugagaccaaauggugcucuccugaucagcugguaaaucuacaugacuuucguucagaugagauagaacaucucgucguggaggaguugaucaagaagagagaagaaugucuagaugcacuagaguccaucaugaccaccaaaucaguaagcuucagacgucucagcaacuugagaaaacuugucccuggguuuggaaaggcauacacuauauucaacaaaaccuuaauggaggcugaugcucacuacaagucaauucggacuugggaugaaaucauucccucaaaagggugccuaagagucggagggaggugucauccucauguaaacggaguguuuuucaaugguauaauucuggguccggaugggcauguccuaauuccagagaugcaaucgucccuccuccaacagcauauggagcuguuggaauccucuguaaucccccuaauacaucccuuggccgacccaucaacagucuucaaagacggugaugaagcggaggacuuuguugagguucaccuuccggacguucacgagcaggucucaggggucgaucuuggucucccaaacugggggaaguaugugcugauaagugcagguguucuagcgaccgugauacugacaaucuucuuguuaacauguugcagaaggguuaacagaacaaaaccaaaacaacaaagucuuggggauucaggaaggaaaguaucgguuacuccucaaaaugggaaggucaugucuucaugggaguauuacaagagugagggcaggaccagucuguga

SEQ ID NO: 63596 - RNA, 1575 nt, Artificial Sequence
  derived and/or modified CDS sequence (wt) from glycoprotein__RABV__KJ174619.1
augaucccucaggcuuuucuguuugugccuuuucuauuucccucguugugucucgggaaauuccccaucuacaccauaccggaaaagcucggcccuuggagucccaucgacauacaucaucucagcuguccuaacaauuugguuguggaggacgaggguugcgacagucugucaggguuuucuuacauggaacugaagguggguuacaucucugccauaaaggugaacggguucacuuguaccggugucguuacagaagcugagaccuacaccaacuuuguugguuaugucaccaccacauucaagagaaaacacuuccgcccuaugccagaugcaugcagagcugcguacaacuggaagacagccggugacccuagauaugaggagucucuucacaauccuuauccugauuaccauuggcuacggaccguaaaaaccacuaaagaaucucuuauuaucauaucgccgaguguggcugauuuggacccauaugacaaaucccuucauucaagaguuuucccuggugggaaauguuuggggauaacaaucucuucuaccuacugcucaacuaaccaugacuauacuaucuggaugcccgaagaagcaagacucgggacaucuugugacauuuuuaccaacagcaaagggaagagggcaucuaagggggguaggacuugcggauucguggaugaaaggggcuuauauaagucucuaaaaggggcauguaaacuuaagcugugcggaguuccuggacuuagacuuauggauggaacgugggucgcuauucagacaccaggugagaccaaauggugcucuccugaucagcugguaaaucuacaugacuuucguucagaugagauagaacaucucgucguggaggaguugaucaagaagagagaagaaugucuagaugcacuagaguccaucaugaccaccaaaucaguaagcuucagacgucucagcaacuugagaaaacuugucccuggguuuggaaaggcauacacuauauucaacaaaaccuuaauggaggcugaugcucacuacaagucaauucggacuugggaugaaaucauucccucaaaagggugccuaagagucggagggaggugucauccucauguaaacggaguguuuuucaaugguauaauucuggguccggaugggcauguccuaauuccagagaugcaaucgucccuccuccaacagcauauggagcuguuggaauccucuguaaucccccuaauacaucccuuggccgacccaucaacagucuucaaagacggugaugaagcggaggacuuuguugagguucaccuuccggacguucacgagcaggucucaggggucgaucuuggucucccaaacugggggaaguaugugcugauaagugcagguguucuagcgaccgugauacugacaaucuucuuguuaacauguugcagaaggguuaacagaacaaaaccaaaacaacaaagucuuggggagucaggaaggaaaguaucgguuacuccucaaaaugggaaggucaugucuucaugggaguauuacaagagugagggcaggaccagucuguga

SEQ ID NO: 63597 - RNA, 1575 nt, Artificial Sequence
  derived and/or modified CDS sequence (wt) from glycoprotein__RABV__KJ174620.1
augaucccucaggcucuucuguuugugccuuuucuauuucccucguugugucucgggaaauuccccaucuacaccauaccggaaaagcucggcccuuggagucccaucgacauacaucaucucagcuguccuaacaauuugguuguggaggacgaggguugcgacagucugucaggguuuucuuacauggaacugaagguggguuacaucucugccauaaaggugaauggguucacuuguaccggugucguuacagaagcugagaccuacaccaacuuuguugguuaugucaccaccacauucaagagaaaacacuuccgcccuaugccagaugcaugcagagcugcguauaacuggaagacagccggugacccuagauaugaggagucucuucacaauccuuauccugauuaccauuggcuacggaccguaaaaaccacuaaagaaucucuuauuaucauaucgccgaguguggcugauuuggacccauaugacaaaucccuucauucaagaguuuucccuggugggaaauguuuggggauaacaaucucuucuaccuacugcucaacuaaccaugacuauacuaucuggaugcccgaagaagcaagacucgggacaucuugugacauuuuuaccaacagcaaagggaagagggcaucuaagggggguaagacuugcggauucguggaugaaaggggcuuauauaagucucuaaaaggggcauguaaacuuaagcugugcggaguuccuggacuuagacuuauggauggaacgugggucgcuauucagacaccaggugagaccaaauggugcucuccugaucagcugguaaaucuacaugacuuucguucagaugagauagaacaucucgucguggaggaguugaucaagaagagagaagaaugucuagaugcacuagaguccaucaugaccaccaaaucaguaagcuucagacgucucagcaacuugagaaaacuugucccuggguuuggaaaggcauacacuauauucaacaaaaccuuaauggaggcugaugcucacuacaagucaauucggacuugggaugaaaucauucccucaaaagggugccuaagagucggagggaggugucauccucauguaaacggaguguuuuucaaugguauaauucuggguccggaugggcauguccuaauuccagagaugcaaucgucccuccuccaacagcauauggagcuguuggaauccucuguaaucccccuaauacaucccuuggccgacccaucaacagucuucaaagacggugaugaagcggaggacuuuguugagguucaccuuccggacguucacgagcaggucucaggggucgaucuuggucucccaaacugggggaaguaugugcugauaagugcagguguucuagcgaccgugauacugacaaucuucuuguuaacauguugcagaaggguuaacagaacaaaaccaaaacaacaaagucuuggggagucaggaaggaaaguaucgguuacuccucaaaaugggaaggucaugucuucaugggaguauuacaagagugagggcaggaccagucuguga

SEQ ID NO: 63598 - RNA, 1575 nt, Artificial Sequence
  derived and/or modified CDS sequence (wt) from glycoprotein__RABV__KJ174622.1
augaucccucaggcucuucuguuugugccuuuucuauuucccucguugugucucgggaaauuccccaucuacaccauaccggaaaagcucggcccuuggagucccaucgacauacaucaucucagcuguccuaacaauuugguuguggaggacgaggguugcgacagucugucaggguuuucuuacauggaacugaagguggguuacaucucugccauaaaggugaauggguucacuuguaccggugucguuacagaagcugagaccuacaccaacuuuguugguuaugucaccaccacauucaagagaaaacacuuccgcccuaugccagaugcaugcagagcugcguacaacuggaagacagccggugacccuagauaugaggagucucuucacaauccuuauccugauuaccauuggcuacggaccguaaaaaccacuaaagaaucucuuauuaucauaucgccgaguguggcugauuuggacccauaugacaaaucccuucauucaagaguuuucccuggugggaaauguuuggggauaacaaucucuucuaccuacugcucaacuaaccaugacuauacuaucuggaugcccgaagaagcaagacucgggacaucuugugacauuuuuaccaacagcaaagggaagagggcaucuaagggggguaggacuugcggauucguggaugaaaggggcuuauauaagucucuaaaaggggcauguaaacuuaagcugugcggaguuccuggacuuagacuuauggauggaacgugggucgcuauucagacaccaggugagaccaaauggugcucuccugaucagcugguaaaucuacaugacuuucguucagaugagauagaacaucucgucguggaggaguugaucaagaagagagaagaaugucuagaugcacuagaguccaucaugaccaccaaaucaguaagcuucagacgucucagcaacuugagaaaacuugucccuggguuuggaaaggcauacacuauauucaacaaaaccuuaauggaggcugaugcucacuacaagucaauucggacuugggaugaaaucauucccucaaaagggugccuaagagucggagggaggugucauccucauguaaacggaguguuuuucaaugguauaauucuggguccggaugggcauguccuaauuccagagaugcaaucgucccuccuccaacagcauauggagcuguuggaauccucuguaaucccccuaauacaucccuuggccgacccaucaacagucuucaaagacggugaugaagcggaggacuuuguugagguucaccuuccggacguucacgagcaggucucaggggucgaucuuggucucccaaacugggggaaguaugugcugauaagugcagguguucuagcgaccgugauacugacagucuucuuguuaacauguugcagaaggguuaacagaacaaaaccaaaacaacaaagucuuggggagucaggaaggaaaguaucgguuacuccucaaaaugggaaggucaugucuucaugggaguauuacaagagugagggcaggaccagucuguga

SEQ ID NO: 63599 - RNA, 1575 nt, Artificial Sequence
  derived and/or modified CDS sequence (wt) from glycoprotein__RABV__KJ174623.1
augaucccucaggcucuucuguuugugccuuuucuauuucccucguugugucucgggaaauuccccaucuauaccauaccggaaaagcucggcccuuggagucccaucgacauacaucaucucagcugcccuaacaauuugguuguggaggacgaggguugcgacagucugucaggguuuucuuacauggaacugaagguggguuacaucucugccauaaaggugaacggguucacguguaccggugucgugacagaagcugagaccuacaccaacuuuguugguuaugucaccaccacauuuaagagaaaacacuuccgcccuaugccagaugcaugcagagcugcguacaacuggaagacagccggugacccuagauaugaggagucucuucacaauccuuauccugauuaccauuggcuacggaccguaaaaaccaccaaagaaucucuuauuaucauaucgccgaguguggcugauuuggacccauaugacaaaucccuucauucaagaguuuucccuggugggaaauguuuggggauaacagucucuucuaccuacugcucaacuaaccaugacuauacuaucuggaugcccgaagaagcaagacucgggacaucuugugacauuuuuaccaacagcaaagggaagagggcaucuaagggggguaggacuuguggauucguggaugaaaggggcuuauauaagucucuaaaaggggcauguaaacuuaagcugugcggaguuccuggacuuagacuuauggauggaacgugggucgcuauucagacaccaggugagaccaaauggugcucuccugaucagcugguaaaucuacaugacuuucguucagaugagauagaacaucucgucguggaggaguugaucaagaagagagaagaaugucuagaugcacuagaguccaucaugaccaccaaaucaguaagcuucagacgucucagcaacuugagaaaacuugucccuggguuuggaaaggcauacacuauauucaacaaaaccuuaauggaggcugaugcucauuacaagucaguucggacuugggaugaaaucauucccucaaaagggugccuaagagucggagggaggugucauccucauguaaacggaguguuuuucaaugguauaauucuggguccggauggacauguccugauuccagagaugcaaucgucccuccuccaacagcauauggagcuguuggaauccucuguaaucccccuaauacaucccuuggccgacccaucaacagucuucaaagacggugaugaagcggaggacuuuguugagguucaccuuccggacguucacaagcaggucucaggggucgaucuuggucucccaaacugggggaaguaugugcugaugggugcagguguucuagcgaccgugauacugacaaucuucuuguuaacauguugcagaaggguuaacagaacaaaaccaaaacaacaaagucuuggggagucaggaaggaaaguaucgguuacuccucaaaaugggaaagucaugucuucaugggaguauuacaagagugagggcaggaccagucuguaa

SEQ ID NO: 63600 - RNA, 1575 nt, Artificial Sequence
  derived and/or modified CDS sequence (wt) from glycoprotein__RABV__KJ174624.1
augaucccucaggcucuucuguuugugccuuuucuauuucccucguugugucucgggaaauuccccaucuauaccauaccggaaaagcucggcccuuggagucccaucgacauacaucaucucagcugcccuaacaauuugguuguggaggacgaggguugcgacagucugucaggguuuucuuacauggaacugaagguggguuacaucucugccauaaaggugaauggguucacuuguaccggugucgugacagaagcugagaccuacaccaacuuuguugguuaugucaccaccacauuuaagagaaaacacuuccgcccuaugccagaugcaugcagagcugcguacaacuggaagacagccggugacccuagauaugaggagucucuucacaauccuuauccugauuaccauuggcuacggaccguaaaaaccaccaaagaaucucuuauuaucauaucgccgaguguggcugauuuggacccauaugacaaaucccuucauucaagaguuuucccuggugggaaauguuuggggauaacagucucuucuaccuacugcucaacuaaccaugacuauacuaucuggaugcccgaagaagcaagacucgggacaucuugugacauuuuuaccaacagcaaagggaagagggcaucuaagggggguaggacuuguggauucguggaugaaaggggcuuauauaagucucuaaaaggggcauguaaacuuaagcugugcggaguuccuggacuuagacuuauggauggaacgugggucgcuauucagacaccaggugagaccaaauggugcucuccugaucagcugguaaaucuacaugacuuucguucagaugagauagaacaucucgucguggaggaguugaucaagaagagagaagaaugucuagaugcacuagaguccaucaugaccaccaaaucaguaagcuucagacgucucagcaacuugagaaaacuugucccuggguuuggaaaggcauacacgauauucaacaaaaccuuaauggaggcugaugcucacuacaagucaguucggacuugggaugaaaucauucccucaaaagggugccuaagagucggagggaggugucauccucauguaaacggaguguuuuucaaugguauaauucuggguccggauggacauguccugauuccagagaugcaaucgucccuccuccaacagcauauggagcuguuggaauccucuguaaucccccuaauacaucccuuggccgacccaucaacagucuucaaagacggugaugaagcggaggacuuuguugagguucaccuuccggacguucacaagcaggucucaggggucgaucuuggucucccaaacugggggaaguaugugcugaugagugcagguguucuagcgaccgugauacugacaaucuucuuguuaacauguugcagaaggguuaacagaacaaaaccaaaacaacaaagucuuggggagucaggaaggaaaguaucgguuacuccucaaaaugggaaggucaugucuucaugggaguauuacaagagugagggcaggaccagucuguga

SEQ ID NO: 63601 - RNA, 1575 nt, Artificial Sequence
  derived and/or modified CDS sequence (wt) from glycoprotein__RABV__KJ174625.1
augaucccucaggcucuucuguuugugccuuuucuauuucccucguugugucucgggaaauuccccaucuauaccauaccggaaaagcucggcccuuggagucccaucgacauacaucaucucagcugcccuaacaauuugguuguggaggacgaggguugcgacagucugucaggguuuucuuacauggaacugaagguggguuacaucucugccauaaaggugaauggguucacuuguaccggugucgugacagaagcugagaccuacaccaacuuuguugguuaugucaccaccacauuuaagagaaaacacuuccgcccuaugccagaugcaugcagagcugcguacaacuggaagacagccggugacccuagauaugaggagucucuucacaauccuuauccugauuaccauuggcuacggaccguaaaaaccaccaaagaaucucuuauuaucauaucgccgaguguggcugauuuggacccauaugacaaaucccuucauucaagaguuuucccuggugggaaauguuuggggauaacagucucuucuaccuacugcucaacuaaccaugacuauacuaucuggaugcccgaagaagcaagacucgggacaucuugugacauuuuuaccaacagcaaagggaagagggcaucuaagggggguaggacuuguggauucguggaugaaaggggcuuauauaagucucuaaaaggggcauguaaacuuaagcugugcggaguuccuggacuuagacuuauggauggaacgugggucgcuauucagacaccaggugagaccaaauggugcucuccugaucagcugguaaaucuacaugacuuucguucagaugagauagaacaucucgucguggaggaguugaucaagaaaagagaagaaugucuagaugcacuagaguccaucaugaccaccaaaucaguaagcuucagacgucucagcaacuugagaaaacuugucccuggguuuggaaaggcauacacuauauucaacaaaaccuuaauggaggcugaugcucacuacaagucaguucggacuugggaugaaaucauucccucaaaagggugccuaagagucggagggaggugucauccucauguaaacggaguguuuuucaaugguauaauucuggguccggauggacauguccugauuccagagaugcaaucgucccuccuccaacagcauauggagcuguuagaauccucuguaaucccccuaauacaucccuuggccgacccaucaacagucuucaaagacggugaugaagcggaggacuuuguugagguucaccuuccggacguucacaagcaggucucaggggucgaucuuggucucccaaacugggggaaguaugugcugaugggugcagguguucuagcgaccgugauacugacaaucuucuuguuaacauguugcagaaggguuaacagaacaaaaccaaaacaacaaagucuugaggagucagggaggaaaguaucgguuacuccucaaaaugggaaggucaugucuucaugggaguauuacaagagugagggcaggaccagucuguga

SEQ ID NO: 63602 - RNA, 1575 nt, Artificial Sequence
  derived and/or modified CDS sequence (wt) from glycoprotein__RABV__KJ174626.1
augaucccucaggcucuucuguuugugccuuuucuauuucccucguugugucucgggaaauuccccaucuauaccauaccggaaaagcucggcccuuggagucccaucgacauacaucaucucagcugcccuaacaauuugguuguggaggacgaggguugcgacagucugucaggguuuucuuacauggaacugaagguggguuacaucucugccauaaaggugaauggguuuacuuguaccggugucgugacagaagcugagaccuacaccaacuuuguugguuaugucaccaccacauuuaagagaaaacacuuccgcccuaugccagaugcaugcagagcugcguacaacuggaagacagccggugacccuagauaugaggagucucuucacaauccuuauccugauuaccauuggcuacggaccguaaaaaccaccaaagaaucccuuauuaucauaucgccgaguguggcugauuuggacccauaugacaaaucccuucauucaagaguuuucccuggugggaaauguuuggggauaacaguuucuucuaccuacugcucaacuaaccaugacuauacuaucuggaugcccgaagaagcaagacucgggacaucuugugacauuuucaccaacagcaaagggaagagggcaucuaagggggguaggacuuguggauucguggaugaaaggggcuuauauaagucucuaaaaggggcauguaaacuuaagcugugcggaguuccuggacuuagacuuauggauggaacgugggucgcuauucagacaccaggugagaccaaauggugcucuccugaucagcugguaaaucuacaugacuuucguucagaugagauagaacaucucgucguggaggaguugaucaagaagagagaagaaugucuagaugcacuagaguccaucaugaccaccaaaucaguaagcuucagacgucucagcaacuugagaaaacuugucccuggguuuggaaaggcauacacuauauucaacaaaaccuuaauggaggcugaugcucacuacaagucaguucggacuugggaugaaaucauucccucaaaagggugccuaagagucggagggaggugucauccucauguaaacggaguguuuuucaaugguauaauucuggguccggauggacauguccugauuccagagaugcaaucgucccuccuccaacagcauauggagcuguuggaauccucuguaaucccccuaauacaucccuuggccgacccaucaacagucuucaaagacggugaugaagcggaggacuuuguugagguucaccuuccggacguucacaagcaggucucaggggucgaucuuggucucccaaacugggggaaguaugugcugaugggugcagguguucuagcgaccgugauacugacaaucuucuuguuaacauguugcagaaggguuaacagaacaaaaccaaaacaacaaagucuugaggagucaggaaggaaaguaucgguuacuccucaaaaugggaaggucaugucuucaugggaguauuacaagagugagggcaggaccagucuguga

SEQ ID NO: 63603 - RNA, 1575 nt, Artificial Sequence
  derived and/or modified CDS sequence (wt) from glycoprotein__RABV__KJ174627.1
augauuccucaggcucuucuguuugugccucuccugauucccucucugugucuuggggaauuccccaucuacacgauaccagacaagcucggcccuuggagcccuaucgacauacaucaucucagcugucccaacaaucugguugcagaaaacgacgggugcaccagucugucaggguuuuccuauauggaacugaaggugggauacaucucugccauaaaggugaacggguucacuuguaccgguguugugacagaagcagagaccuacaccaacuuugucgguuaugucacuaccacauucaagaggaagcacuuccgcccgacgccagaugccugcagagcugcacacgacuggaagauggccggugaucccagauaugaagcuucccuucaaaauccuuauccugauuaccauuggcuacggaccguaaaaaccaccaaggagucacuuguuauuauauccccgaguguugcugauuuggacccuuacgacaagucccuucauucaagaguuuucccuagugggaaguguuuggggauaacagucucuuccaccuacugcucaaccaaccaugauuacaccaucuggaugcccguagaaccaagacuuggaacaucuugugauauuuuuaccaauagcagagggaagagagcaucuaaggggggcaggguuuguggauucguggaugaaaggggcuuauacaagucucucaaaggagcaugcagacucaagcugugcggagucccugggauccggcuguuggacggaacaugggucucaauccagacaucagaagauaucaaguggugcccuccugaucgauuagugaaucuacacgacuuucacucggaugaaauagaacaucuuguuguagcggaauuaaucaagaggagggaaaauugucuagaugcacuggaguccaucaugaccaccaaaucagugagcuucagacggcucagucacuugaggaaacuuguuccuggguuugggaaggcauacaccauauucaacaagacuuuaauggaagcugaugcucauuacaagucaguuaagacuuggaacgaaguuaucccuucgaaagguugccuggaagucggagggagaugucauccccaugugaacggaguauucuucaaugguauaauuuuggguccggauggaaauguucugaucccugagaugcagucuucccugcuucaacaacauauggagcuguuagagucuucugucaucccucugaugcaucccuuggcagacccaucaacagucuucaaggagggggaugaggcagaagacuuuguugagguucaucuuccagauguccacaagcagguuucggauguugaccuuggccuuccgaguugggggaaguaucuguugauuagugcaggugcuuuggcaauacugauucuggcuaucgucuugauaauauguuguaggagggucaauaagacaagauccacacagagaggucauagggaaucaggagggaaaaugucuguaguaccucaaaacgggaagaucauauccucaugggaguuauacaaaagugaaagugagacugggcuguga

SEQ ID NO: 63604 - RNA, 1575 nt, Artificial Sequence
  derived and/or modified CDS sequence (wt) from glycoprotein__RABV__KJ174628.1
augauuccucaggcucuucuguuugugccucuccugauucccucucugugucuuggggaauuccccaucuacacgauaccagacaagcucggcccuuggagcccuaucgacauacaucaucuuagcugucccaacaaucugguugcagaaaacgacgggugcaccagucugucaggguuuuccuauauggaacugaaggugggauacaucucugccauaaaggugaacggguucacuuguaccgguguugugacagaagcagagaccuacaccaacuuugucgguuaugucacuaccacauucaagaggaagcacuuccgcccgacgccagaugccugcagagccgcacacgacuggaagauggccggugaucccagauaugaagcuucccuucaaaacccuuauccugauuaccauuggcuacggaccguaaaaaccaccaaggagucacuuguuauuauauccccgaguguugcugauuuggacccuuacgacaagucccuccauucaagaguuuuccccagugggaaguguuuggggauaacagucucuuccaccuacugcucaaccaaccaugauuacaccaucuggaugcccguagaaccaagacuuggaacaucuugugauauuuuuaccaauagcagagggaagagagcaucuaaggggggcaggguuugcggauucguggaugaaaggggcuuauacaagucucucaaaggagcaugcagacucaagcugugcggaguccccgggauccggcuguuggacggaacaugggucucaauccagacaucagaagauaucaaguggugcccuccugaucgauuagugaaucuacacgacuuucacucggaugaaauagaacaucuuguuguagcggaauuaaucaagaggagggaaaauugucuagaugcacuggaguccaucaugaccaccaaaucagugagcuucagacgucucagucacuugaggaaacuuguuccuggguuugggaaggcauacaccauauucaacaagaccuuaauggaagcugaugcucauuacaagucaguuaagacuuggaacgaaguuaucccuucgaaagguugccuggaagucggagggagaugucauccccaugugaacggaguauucuucaaugguauaauuuuggguccggauggaaauguucugaucccugagaugcagucuucccugcuucaacaacauauggagcuguuagagucuucugucaucccucugaugcaucccuuggcagacccaucaacagucuucaaggagggugaugaggcagaagacuuuguugagguucaucuuccagauguccacaagcagguuucggauguugaccuuggccuuccgaguugggggaaguaucuguugauuagugcaggugcuuuggcaauacugauucuggcuaucgucuuaauaauauguuguaggagggucaauaagacaggauccacacagagaggucauagggaaucaggagggaaaaugucuguaguaccucaaaacgggaagaucauauccucaugggaguuguacaaaagugaaagugagacugggcuguga

SEQ ID NO: 63605 - RNA, 1575 nt, Artificial Sequence
  derived and/or modified CDS sequence (wt) from glycoprotein__RABV__KJ174629.1
augauuccucaggcucuucuguuugugccucuccugauucccucucugugucuuggggaauuccccaucuacacgauaccagacaagcucggcccuuggagcccuaucgacauacaucaucucagcugucccaacaaucugguugcagaaaacgacgggugcaccagucugucaggguuuuccuauauggaacugaaggugggauacaucucugccauaaaggugaacggguucacuuguaccgguguugugacagaagcagagaccuacaccaacuuugucgguuaugucacuaccacauucaagaggaagcacuuccgcccgacgccagaugccugcagagccgcacacgacuggaagauggccggugaucccagauaugaagcuucccuucaaaauccuuauccugauuaccauuggcuacggaccguaaaaaccaccaaggagucacuuguuauuauauccccgaguguugcugauuuggacccuuacgacaagucccuucauucaagaguuuucccuagugggaaguguuuggggauaacagucucuuccaccuacugcucaaccaaccaugauuacaccaucuggaugcccguagaaccaagacuuggaacaucuugugauauuuuuaccaauagcagagggaagagagcaucuaaggggggcaggguuuguggauucguggaugaaaggggcuuauacaagucucucaaaggagcaugcagacucaagcugugcggaguccccgggauccggcuguuggacggaacaugggucucaauccagacaucagaagauaucaaguggugcccuccugaucgauuagugaaucuacacgacuuucacucggaugaaauagaacaucuuguuguagcggaauuaaucaagaggagggaaaauugucuagaugcacuggaguccaucaugaccaccaaaucagugagcuucagacgucucagucacuugaggaaacuuguuccuggguuugggaaggcauacaccauauucaacaagaccuuaauggaagcugaugcucauuacaagucaguuaagacuuggaacgaaguuauuccuucgaaagguugccuggaagucggagggagaugucauccccaugugaacggaguauucuucaaugguauaauuuuggguccggauggaaauguucugaucccugagaugcagucuucccugcuucaacaacauauggagcuguuagagucuucugucaucccucugaugcaucccuuggcagacccaucaacagucuucaaggagggugaugaggcagaagacuuuguugagguucaucuuccagauguccacaagcagguuucggauguugaccuuggccuuccgaguugggggaaguaucuguugauuagugcaggugcuuuggcaauacugauucuggcuaucgucuuaauaauauguuguaggagggucaauaagacaagauccacacagagaggucauagggaaucaggagggaaaaugucuguaguaccucaaaacgggaagaucauauccucaugggaguuauacaaaagugaaagugagacugggcuguga

SEQ ID NO: 63606 - RNA, 1575 nt, Artificial Sequence
  derived and/or modified CDS sequence (wt) from glycoprotein__RABV__KJ174630.1
augauuccucaggcucuucuguuugugccucuccugauucccucucugugucuuggggaauuccccaucuacacgauaccagacaagcucggcccuuggagcccuaucgacauacaucaucucagcugucccaacaaucugguugcagaaaacgacgggugcaccagucugucaggguuuuccuauauggaacugaaggugggauacaucucugccauaaaggugaacggguucacuuguaccgguguugugacagaagcagagaccuacaccaacuuugucgguuaugucacuaccacauucaagaggaagcacuuccgcccgacgccagaugccugcagagccgcacacgacuggaagauggccggugaucccagauaugaagcuucccuucaaaauccuuauccugauuaccauuggcuacggaccguaaaaaccaccaaggagucacuuguuauuauauccccgaguguugcugauuuggacccuuacgacaagucccuucauucaagaguuuuccccagugggaaguguuuggggauaacagucucuuccaccuacugcucaaccaaccaugauuacaccaucuggaugcccguagaaccaagacuuggaacaucuugugauauuuuuaccaauagcagagggaagagagcaucuaaggggggcaggguuuguggauucguggaugaaaggggcuuauacaagucucucaaaggagcaugcagacucaagcugugcggaguccccgggauccggcuguuggacggaacaugggucucaauccagacaucagaagauaucaaguggugcccuccugaucgauuagugaaucuacacgacuuucacucggaugaaauagaacaucuuguuguagcggaauuaaucaagaggagggaaaauugucuagaugcacuggaguccaucaugaccacuaaaucagugagcuucagacgucucagucacuugaggaaacucguuccuggguuugggaaggcauacaccauauucaacaagaccuuaauggaagcugaugcucauuacaagucaguuaagacuuggaacgaaguuaucccuucgaaagguugccuggaagucggagggagaugucauccccaugugaacggaguauucuucaaugguauaauuuuggguccggauggaaauguucugaucccugagaugcagucuucccugcuucaacaacauauggagcuguuagagucuucugucaucccucugaugcaucccuuggcagacccaucaacagucuucaaggagggugaugaggcggaagacuuuguugagguucaucuuccagauguccacaagcagguuucugauguugaccuuggccuuccgaguugggggaaguaucuguugauuagugcaggugcuuuggcaauacugauucuggcuaucgucuuaauaauauguuguaggagggucaauaagacaggauccacacagagaggucauagggaaucaggagggaaaaugucuguaguaccucaaaaugggaagaucauauccucaugggaguuguacaaaagugaaagugagacugggcuguga

SEQ ID NO: 63607 - RNA, 1575 nt, Artificial Sequence
  derived and/or modified CDS sequence (wt) from glycoprotein__RABV__KJ174631.1
augauuccucaggcucuucuguuugugccucuccugauucccucucugugucuuggggaauuccccaucuacacgauaccagacaagcucggcccuuggagcccuaucgacauacaucaucucagcugucccaacaaucugguugcagaaaacgacgggugcaccagucugucaggguuuuccuauauggaacugaaggugggauacaucucugccauaaaggugaacggguucacuuguaccgguguugugacagaagcagagaccuacaccaacuuugucgguuaugucacuaccacauucaagaggaagcacuuccgcccgacgccagaugccugcagagcugcacacgacuggaagauggccggugaucccagauaugaagcuucccuucaaaauccuuauccugauuaccauuggcuacggaccguaaaaaccaccaaggagucacuuguuauuauauccccgaguguugcugauuuggacccuuacgacaagucccuucauucaagaguuuucccuagugggaaguguuuggggauaacagucucuuccaccuacugcucaaccaaccaugauuacaccaucuggaugcccguagaaccaagacuuggaacaucuugugauauuuuuaccaauagcagagggaagagagcaucuaaggggggcaggguuuguggauucguggaugaaaggggcuuauacaagucucucaaaggagcaugcagacucaagcugugcggaguccccgggaucaggcuguuagacggaacaugggucucaauccagacaucagaagauaucaaguggugcccuccugaucgauuagugaaucuacacgacuuucacucggaugaaauagaacaucuuguuguagcggaauuaaucaagaggagggaaaauugucuagaugcacuggaguccaucaugaccaccaaaucagugagcuucagacgucucagucacuugaggaaacuuguuccuggguuugggaaggcauacaccauauucaacaagaccuuaauggaagcugaugcucauuacaagucaguuaagacuuggaacgaaguuaucccuucgaaagguugccuagaagucggagggagaugucauccccaugugaacggaguauucuucaaugguauaauuuuggguccggauggaaauguucugaucccugagaugcagucuucccugcuucaacaacauauggagcuguuagaguccucugucaucccucugaugcaucccuuggcagacccaucaacagucuucaaggagggugaugaggcagaagauuuuguugagguucaucuuccagauguccacaagcagguuucggauguugaccuuggccuuccgaguugggggaaguaucuguugauuggugcaggugcuuuggcaauacugauucuggcuaucgucuuaauaauauguuguaggagggucaauaagacaagauccacacagagaggucauagggaaucaggagggaagaugucuguaguaccucaaaacgggaagaucauauccucaugggaguuauacaaaagugaaagugagacugggcuguga

SEQ ID NO: 63608 - RNA, 1575 nt, Artificial Sequence
  derived and/or modified CDS sequence (wt) from glycoprotein__RABV__KJ174632.1
augauuccucaggcucuucuguuugugccucuccugauucccucucugugucugggggaauuccccaucuacacgauaccagacaagcucggcccuuggagcccuaucgacauacaucaucucagcugucccaacaaucugguugcagaaaacgacgggugcaccagucugucaggguuuuccuauauggaacugaaggugggauacaucucugccauaaaggugaacggguucacuuguaccgguguugugacagaagcagagaccuacaccaacuuugucgguuaugucacuaccacauucaagaggaagcacuuccgcccgacgccagaugccugcagagccgcacacgacuggaagauggccggugaucccagauaugaagcuucccuucaaaauccuuauccugauuaccauuggcuacggaccguaaaaaccaccaaggagucacucguuauuauauccccgaguguugcugauuuggacccuuacgacaagucccuucauucaagaguuuuccccagugggaaguguuuggggauaacagucucuuccaccuacugcucaaccaaccaugauuacaccaucuggaugcccguagaaccaagacuuggaacaucuugugauauuuuuaccaauagcagagggaagagagcaucuaaggggggcaggguuuguggauucguggaugaaaggggauuauacaagucucucaaaggagcaugcagacucaagcugugcggaguccccgggauccggcuguuggacggaacaugggucucaauccaaacaucagaagauaucaaguggugcccuccugaucgauuagugaaucuacaugacuuucacucggaugaaauagaacaucuuguuguagcggaauuaaucaagaggagggaaaauugucuagaugcacuggaguccaucaugaccaccaaaucagugagcuucagacgucucagucacuugaggaaacuuguuccuggguuugggaaggcauacaccauauucaacaagaccuuaauggaagcugaugcucauuacaagucaguuaagacuuggaacgaaguuaucccuucgaaagguugccuggaagucggagggagaugucauccccaugugaacgggguauucuucaaugguauaauuuuggguccagauggaaauguucugaucccugagaugcagucuucccugcuucaacaacauauggagcuguuagagucuucugucaucccucugaugcaucccuuggcagacccaucaacagucuucaaggaaggugaugaggcggaagacuuuguugagguucaucuuccagauguccacaagcaggucucggauguugaccuuggccuuccgaguugggggaaguaucuguugauuagugcaggugcuuuggcaauacugauucuggcgaucgucuuaauaauauguuguaagagggucaagaagacaggauccauacagagaggucauagggaaucaggaggaaaaaugucuguagugccucaaaacgggaagaucauauccucaugggaguuguacaaaagugaaagugagacugggcuguga

SEQ ID NO: 63609 - RNA, 1575 nt, Artificial Sequence
  derived and/or modified CDS sequence (wt) from glycoprotein__RABV__KJ174633.1
augauuccucaggcucuucuguuugugccucuccugauucccucucugugucuuggggaauuccccaucuacacgauaccagacaagcucggcccuuggagcccuaucgacauacaucaucucagcugucccaacaaucugguugcagaaaacgacgggugcaccagucugucaggguuuuccuauauggaacugaaggugggauacaucucugccauaaaggugaacggguucacuuguaccgguguugugacagaagcagagaccuacaccaacuuugucgguuaugucacuaccacauucaagaggaagcacuuccgcccgacgccagaugccugcagagccgcacacgacuggaagauggcuggugaucccagauaugaagcuucccuucaaaauccuuauccugauuaccauuggcuacggaccguaaaaaccaccaaggagucacuuguuauuauauccccgaguguugcugauuuggacccuuacgacaagucccuucauucaagagucuuccccagugggaaguguuuggggauaacagucucuuccaccuacugcucaaccaaccaugauuacaccaucuggaugcccguagaaccaagacuuggaacaucuugugauauuuuuaccaauagcagagggaagagagcaucuaaggggggcaggguuuguggauucguggaugaaaggggcuuauacaagucucucaaaggagcaugcagacucaagcugugcggaguccccgggauccggcuguuggacggaacauggguuucaauccagacaucagaagauaucaaguggugcccuccugaucgauuagugaaucuacacgacuuucacucggaugaaauagaacaucuuguuguagcggaauuaaucaagaggagggaaaauugucuagaugcacuggaguccaucaugaccaccaaaucagugagcuucagacgucucagucacuugaggaaacuuguuccuggguuugggaaggcauacaccauauucaacaaaaccuuaauggaagcugaugcucauuacaagucaguuaagacuuggaacgaaguuaucccuucgaaagguugccuggaagucggagggagaugucauccccaugugaacggaguauucuucaaugguauaauuuuggguccggauggaaauguucugaucccugagaugcagccuucccugcuucaacaacauauggagcuguuagagucuucugucaucccucugaugcaucccuuggcagacccaucaacagucuucaaggagggugaugaggcggaagacuuuguugagguucaucuuccagauguccacaagcagguuucggauguugaccuuggccuuccgaguugggggaaguaucuguugauuagugcaggugcuuuggcaauauugauucuggcgaucgucuuaaugauauguuguaggagggucaauaagacaggauccacacagagaggucauagggaaucaggagggaaaaugucuguaguaccucaaaacgggaagaucauauccucaugggaguuguacaaaagugaaagugagacugggcuguga

SEQ ID NO: 63610 - RNA, 1575 nt, Artificial Sequence
  derived and/or modified CDS sequence (wt) from glycoprotein__RABV__KJ174634.1
augauuccucaggcuauucuguuugugccucuccugauucccucucugugucuuggggaauuccccaucuacacgauaccagacaagcucggcccuuggagcccuaucgacauacaucaucucagcugucccaacaaucugguugcagaaaacgacgggugcaccagucugucaggguuuuccuauauggaacugaaggugggauacaucucugccauaaaggugaacggguucacuuguaccgguguugugacagaagcagagaccuacaccaacuuugucgguuaugucacuaccacauucaagaggaagcacuuccgcccgacgccagaugccugcagagccgcacacgacuggaagauggccggugaucccagauaugaagcuucccuucaaaaucccuauccugauuaccauuggcuacggaccguaaaaaccaccaaggagucacuuguuauuauauccccgaguguugcugauuuggacccuuacgacaaguuccuucauucaagaguuuuccccagugggaaguguuuggggauaacagucucuuccaccuacugcucaaccaaccaugauuacaccauuuggaugcccguagaaccaagacuuggaacaucuugugauauuuuuaccaauagcagagggaagagagcaucuaaggggggcaggguuuguggauucguggaugaaaggggcuuauacaagucucucaaaggagcaugcagacucaagcugugcggaguccccgggauccggcuguuggacggaacaugggucucaauccagacaucagaagauaucaaguggugcccuccugaucgauuagugaaucuacacgacuuucacucggaugaaauagaacaucuuguuguagcggaauuaaucaagaggagggaaaauugucuagaugcacuggaguccaucaugaccaccaaaucagugagcuucagacgucucagucauuugaggaaacuuguuccuggguuugggaaggcauacaccauauucaacaagaccuuaauggaagcugaugcucauuacaagucaguuaagacuuggaacgaaguuaucccuucgaaagguugccuggaaguuggagggagaugucauccccaugugaacggaguauucuucaaugguauaauuuuggguccggauggaaauguucugaucccugagaugcagucuucccugcuucaacaacauauggagcuguuagagucuucugucaucccucugaugcaucccuuggcagacccaucaacagucuucaaggagggugaugaggcagaagaauuuguugagguucaucuuccagauguccacaagcagguuucggauguugaccuuggccuuccgaguugggggaaguaucuguugauuagugcaggugcuuuggcaauacugauucuggcuaucgucuuaauaauauguuguaggagggucaauaagacaggauccacacagagaggucauagggaaucaggagggaaaaugucuguaguaccucaaaacgggaagaucauauccucaugggaguuguacaaaagugaaagugagacugggcuguga

SEQ ID NO: 63611 - RNA, 1575 nt, Artificial Sequence
  derived and/or modified CDS sequence (wt) from glycoprotein__RABV__KJ174635.1
augauuccucaggcucuucuguuugugccucuccugauucccucucugugucuuggggaauuccccaucuacacgauaccagacaagcucggcccuuggagcccuaucgacauacaucaucucagcugucccaacaaucugguugcagaaaacgacgggugcaccagucugucaggguuuuccuauauggaacugaaggugggauacaucucugccauaaaggugaacggguucacuuguaccgguguugugacagaagcagagaccuacaccaacuuugucgguuaugucacuaccacauucaagaggaagcacuuccgcccgacgccagaugccugcagagcugcacacgacuggaagauggccggugaucccagauaugaagcuucccuucaaaauccuuauccugauuaccauuggcuacggaccguaaaaaccaccaaggagucacuuguuauuauauccccgaguguugcugauuuggacccuuacgacaagucccuucauucaagaguuuucccuagugggaaguguuuggggauaacagucucuuccaccuacugcucaaccaaccaugauuacaccaucuggaugcccguagaaccaagacuuggaacaucuugugauauuuuuaccaauagcagagggaagagagcaucuaaggggggcaggguuuguggauucguggaugaaaggggcuuauacaagucucucaaaggagcaugcagacucaagcugugcggaguccccgggauccggcuguuggacggaacaugggucucaauccagacaucagaagauaucaaguggugcccuccugaucgauuagugaaucuacacgacuuucacucggaugaaauagaacaucucguuguagcggaauuaaucaagaggagggaaaauugucuagaugcacuggaguccaucaugaccaccaaaucagugagcuucagacgucucagucacuugaggaaacuuguuccuggguuugggaaggcauacaccauauucaacaagaccuuaauggaagcugaugcucauuacaagucaguuaagacuuggaacgaaguuaucccuucgaaagguugccuggaagucggagggagaugucauccccaugugaacggaguauucuucaaugguauaauuuuggguccggauggaaauguucugaucccugagaugcagucuucccugcuucaacaacauauggagcuguuagagucuucugucaucccucugaugcaucccuuggcagacccaucaacagucuucaaggagggugaugaggcagaagacuuuguugagguucaucuuccagauguccacaagcagguuucggauguugaccuuggccuuccgaguugggggaaguaucuguugauuagugcaggugcuuuggcaauacugauucuggcugucgucuugauaauauguuguaggagggucaauaagacaagauccacacagagaggucauagggaaucaggagggaaaaugucuguaguaccucaaaacgggaagaucauauccucaugggaguuauacaaaagugaaagugagacugggcuguga

SEQ ID NO: 63612 - RNA, 1575 nt, Artificial Sequence
  derived and/or modified CDS sequence (wt) from glycoprotein__RABV__KJ174636.1
augauuccucaggcucuucuguuugugccucuccugauucccucucugugucuuggggaauuccccaucuacacgauaccagacaagcucggcccuuggagcccuaucgacauacaucaucucagcugucccaacaaucugguugcagaaaacgacgggugcaccagucugucaggguuuuccuauauggaacugaaggugggauacaucucugccauaaaggugaacggguucacuuguaccgguguugugacagaagcagagaccuacaccaacuuugucgguuaugucacuaccacauucaagaggaagcacuuccgcccgacgccagaugccugcagagcugcacacgacuggaagauggccggugaucccagauaugaagcuucccuucaaaauccuuauccugauuaccauuggcuacggaccguaaaaaccaucaaggagucacuuguuauuauauccccgaguguugcugauuuggacccuuacgacaagucccuucauucaagaguuuucccuagugggaaguguuuggggauaacagucucuuccaccuacugcucaaccaaccaugauuacaccaucuggaugcccguagaaccaagacuuggaacaucuugugauauuuuuaccaauagcagagggaagagagcaucuaaggggggcaggguuuguggauucguggaugaaaggggcuuauacaagucucucaaaggagcaugcagacucaagcugugcggaguccccgggauccggcuguuggacggaacaugggucucaauccagacaucagaagauaucaaguggugcccuccugaucgauuagugaaucuacacgacuuucacucggaugaaauagaacaucuuguuguagcggaauuaaucaagaggagggaaaauugucuagaugcacuggaguccaucaugaccaccaaaucagugagcuucagacgucucagccacuugaggaaacuuguuccuggguuugggaaggcauacaccauauucaacaagaccuuaauggaagcugaugcucauuacaagucaguuaagacuuggaacgaaguuaucccuucgaaagguugccuggaagucggagggagaugucauccccaugugaacggaguauucuucaaugguauaauuuuggguccggauggaaauguucugaucccugagaugcagucuucccugcuucaacaacauauggagcuguuagagucuucugucaucccucugaugcaucccuuggcagacccaucaacagucuucaaggagggugaugaggcagaagacuuuguugagguucaucuuccagauguccacaagcagguuucggauguugaccuuggccuuccgaguugggggaaguaucuguugauuagugcaggugcuuugacaauacugauucuggcuaucgucuuaauaagauguuguaggagggucaauaagacaagauccacacagagaggucauagggaaucaggagggaaaaugucuguaguaccucaaaacgggaagaucauauccucaugggaguuauacaaaagugaaagugagacugggcuguga

SEQ ID NO: 63613 - RNA, 1575 nt, Artificial Sequence
  derived and/or modified CDS sequence (wt) from glycoprotein__RABV__KJ174637.1
augauuccucaggcucuucuguucaugccucuccugauucccucucugugucuuggggaauuccccaucuacacgauaccagacaagcucggcccuuggagcccuaucgacauacaucaucucagcugucccaacaaucugguugcagaaaacgacgggugcaccagucugucaggguuuuccuauauggaacugaaggugggauacaucucugccauaaaggugaacggguucacuuguaccgguguugugacagaagcagagaccuacaccaacuuugucgguuaugucacuaccacauucaagaggaagcacuuccgcccgacgccagaugccugcagagcugcacacgacuggaagauggccggugaucccagauaugaagcuucccuucaaaauccuuauccugauuaccauuggcuacggacuguaaaaaccaccaaggagucacuuguuauuauauccccgaguguugcugauuuggacccuuacgacaagucccuucauucaagaguuuuccccagugggaaguguuuggggauaacagucucuuccaccuacugcucaaccaaccaugauuacaccaucuggaugcccguagaaccaagacuuggaacaucuugugauauuuuuaccaauagcagagggaagagagcaucuaaggggggcaggguuuguggauucguggaugaaaggggcuuauacaagucucucaaaggagcaugcagacucaagcugugcggaguccccgggauccggcuguuggacggaacaugggucucaauccagacaucagaagauaucaaguggugcccuccugaucgauuagugaaucuacacgacuuucacucggaugaaauagaacaucuuguuguagcggaauuaaucaagaggagggaaaauugucuagaugcacuggaguccaucaugaccaccaaaucagugagcuucagacgucucagucacuugaggaaacuuguuccuggguuugggaaggcauacaccauauucaacaagaccuuaauggaagcugaugcucauuacaagucaguuaagacuuggaacgaaguuaucccuucgaaagguugccuggaagucggagggagaugucauccccaugugaacggaguauucuucaaugguauaauuuuggguccggauggaaauguucugaucccugagaugcagucuucccugcuucaacaacauauggagcuguuagagucuucugucaucccucugaugcaucccuuggcagacccaucaacagucuucaaggagggugaugaggcggaagacuuuguugagguucaucuuccagauguccacaagcagguuucggauguugaccuuggccuuccgaguugggggaaguaucuguugauuagugcaggugcuuuggcaauacugauucuggcgaucgucuuaauaauauguuguaggagggucaauaagacaguauccacacagagaggucauagggaaucaggagggaaaaugucuguaguaccucaaaacgggaagaucauauccucaugggaguuguacaaaagugaaagugagacugggcuguga

SEQ ID NO: 63614 - RNA, 1575 nt, Artificial Sequence
  derived and/or modified CDS sequence (wt) from glycoprotein__RABV__KJ174638.1
augauuccucaggcucuucuguuugugccucuccugauucccucucugugucuuggggaauuccccaucuacacgauaccagacaagcucggcccuuggagcccuaucgacauacaucaucucagcugucccaacaaucugguugcagaaaacgacgggugcaccagucugucaggguuuuccuauauggaacugaaggugggauacaucucugccauaaaggugaacggguucacuuguaccgguguugugacagaagcagagaccuacaccaacuuugucgguuaugucacuaccacauucaagaggaagcacuuccgcccgacgccagaugccugcagagccgcacacgacuggaagauggccggugaucccagauaugaagcuuccguucaaaauccuuauccugauuaccauuggcuacggaccguaaaaaccaccaaggagucacuuguuauuauauccccgaguguugcugauuuggacccuuacgacaagucccuucauucaagaguuuuccccagugggaaguguuuggggauaacagucucuuccaccuacugcucaaccaaccaugauuacaccaucuggaugcccguagaaccaagacuuggaacaucuugugauauuuuuaccaauagcagagggaagagagcaucuaaggggggcaggguuuguggauucguggaugaaaggggcuuauacaagucucucaaaggagcaugcagacucaagcugugcggaguccccgggauccggcuguuggacggaacaugggucucaauccagacaucagaagauaucaaguggugcccuccugaucgauuagugaaucuacacgacuuucacucggaugaaauagaacaucuuguuguagcggaauugaucaagaggagggaaaauugucuagaugcacuggaguccaucaugaccaccaaaucagugagcuucagacgucucagucacuugaggaaacuuguuccuggguuugggaaggcauacaccauauucaacaagaccuuaauggaagcugaugcucauuacaagucaguuaagacuuggaacgaaguuaucccuucgaaagguugccuggaagucggagggagaugucauccccaugugaacggaguauucuucaaugguauaauuuuggguccggauggaaauguucugaucccugagaugcagucuucccugcuucaacaacauauggagcuguuggagucuucugucaucccucugaugcaucccuuggcagacccaucaacagucuucaaggagggugaugaggcggaagacuuuguugagguucaucuuccagauguccacaagcagguuucggauguugaccuuggccuuccgaguugggggaaguaucuguugauuagugcaggugcuuuggcaauacugauucuggcgaucgucuuaauaauauguuguaggagggucaauaagacaggaucuacacagagaggucauagggaaucaggagggaaaaugucuguaguaccucaaaacgggaagaucauauccucaugggaguuguacaaaagugaaagugagacugggcuguga

SEQ ID NO: 63615 - RNA, 1575 nt, Artificial Sequence
  derived and/or modified CDS sequence (wt) from glycoprotein__RABV__KJ174639.1
augauuccucaggcucuucuguuugugccucuccugauucccucucugugucuuggggaauuccccaucuacacgauaccagacaagcucggcccuuggagcccuaucgacauacaucaucucagcugucccaacaaucugguugcagaaaacgacgggugcaccagucugucaggguuuuccuauauggaacugaaggugggauacaucucugccauaaaggugaacggguucacuuguaccgguguugugacagaagcagagaccuacaccaacuuugucgguuaugucacuaccacauucaagaggaagcacuuccgcccgacgccagaugccugcagagcugcacacgacuggaagauggccggugaucccagauaugaagcuucccuucaaaauccuuauccugauuaccauuggcuacggaccguaaaaaccaccaaggagucacuuguuauuauauccccgaguguugcugauuuggacccuuacgacaagucccuucauucaagaguuuucccuagugggaaguguuuggggauaacagucucuuccaccuacugcucaaccaaccaugauuacaccaucuggaugccuguagaaccaagacuuggaacaucuugugauauuuuuaccaauagcagagggaagagagcaucuaaggggggcaggguuuguggauucguggaugaaaggggcuuauacaagucucuuaaaggagcaugcagacucaagcugugcggaguccccgggauccggcuguuggacggaacaugggucucaauccagacaucagaagauaucaaguggugcccuccugaucgauuagugaaucuacacgacuuucacucggaugaaauagaacaucuuguuguagcggaauuaaucaagaggagggaaaauugucuagaugcacuggaguccaucaugaccaccaaaucagugagcuucagacgucucagucacuugaggaaacuuguucccggguuugggaaggcauacaccauauucaacaagaccuuaauggaagcugaugcucauuacaagucaguuaagacuuggaacgaaguuaucccuucgaaagguugccuggaagucggagggagaugucauccccaugugaacggaguauucuucaaugguauaauuuuggguccggauggaaauguucugaucccugagaugcagucuucccugcuucaacaacauauggagcuguuagagucuucugucaucccucugaugcaucccuuggcagacccaucaacaguuuucaaggagggugaugaggcagaagacuuuguugagguucaucuuccagauguccacaagcagguuucggauguugaccuuggccuuccgaguugggggaaguaucuguugauuagugcaggugcuuuggcaauacugauucuggcuaucgucuuaauaauauguuguagaagggucaauaagacaagauccacacagagaggucauagggaaucaggagggaaaaugucuguaguaccucaaaacgggaagaucauauccucaugggaguuauacaaaagugaaagugagacugggcuguga

SEQ ID NO: 63616 - RNA, 1575 nt, Artificial Sequence
  derived and/or modified CDS sequence (wt) from glycoprotein__RABV__KJ174640.1
augauuccucaggcucuucuguuugugccucuccugauucccucucugugucuuggggaauuccccaucuacacgauaccagacaagcucggcccuuggagcccuaucgacauacaucaucucagcugucccaacaaucugguugcagaaaacgacgggugcaccagucugucaggguuuuccuauauggaacugaaggugggauacaucucugccauaaaggugaacggguucacuuguaccgguguugugacggaagcagagaccuacaccaacuuugucgguuaugucacuaccacauucaagaggaagcacuuccgcccgacgccagaugccugcagagccgcacacgacuggaagauggccggugaucccagauaugaagcuucccuucaaaauccuuauccugauuaccauuggcuacggaccguaaaaaccaccaaggagucacuuguuauuauauccccgaguguugcugauuuggacccuuacgacaagucccuucauucaagaguuuuccccagugggaaguguuuggggauaacagucucuuccaccuacugcccaaccaaccaugauuacaccaucuggaugcccguagaaccaagacuuggaacaucuugugauauuuuuaccaauagcagagggaagagagcaucuaaggggggcaggguuuguggauucguggaugaaaggggcuuauacaagucucucaaaggagcaugcagacucaagcugugcggaguucccgggauccggcuguuggacggaacaugggucucaauccagacaucagaagauaucaaguggugcccuccugaucgauuagugaaucuacacgacuuucacucggaugaaauagaacaucuugucguagcggaauuaaucaagaggagggaaaauugucuagaugcacuggaguccaucaugaccaccaaaucagugagcuucagacgucucagucacuugaggaaacuuguuccuggguuugggaaggcauacaccauauucaacaagaccuuaauggaagcugaugcucauuacaagucaguuaagacuuggaacgaaguuaucccuucgaaagguugccuggaagucggagggagaugucauccccaugugaacggaguauucuucaauggcauaauuuuggguccggauggaaauguucugaucccugagaugcagucuucccugcuucaacaacauauggagcuguuagagucuucugucaucccucugaugcaucccuuggcagacccaucaacagucuucaaggagggugaugaggcagaagacuuuguugagguucaucuuccagauguccacaagcagguuuucggaguugaccuuggccuuccgaguugggggaaguaucuguugauuagugcaggugcuuuggcaauacugauucuggcuaucgucuuaauaauauguuguaggagggucaauaagacagaauccacaccgagaggucauagggaaucaggagggaaaaugucuguaguaccucaaaacgggaagaucauauccucaugggaguuguacaaaagugaaagugagacugggcuguga

SEQ ID NO: 63617 - RNA, 1575 nt, Artificial Sequence
  derived and/or modified CDS sequence (wt) from glycoprotein__RABV__KJ174641.1
augaucccucaggcucuucuguuugugccucuccugauucccucgcugugucucggggaauuccccaucuacacgauaccagacaaacucggcccuuggaccccuaucgacauacaucaucucagcugucccaacaaucugguugcagagaacgacgggugcaccagucugucaggguuuuccuauauggaacuaaaggugggauacaucucugccauaaaggugaacggguucacuuguaccgguguugugacagaagccgagaccuacacaaacuuuguagguuaugucacuaccacauucaagagaaagcacuuccgcccgaugccagaugccugcagagcugcacaugacuggaagauggccggugauccuagauaugaagauucccuucaaaauccuuauccugauuaccauugguuacggaccguaaagaccaccaaggagucgcucguuauuauauccccgaguguugcugauuuggaccccuacgacaagucccuucauucaagaguuuuccccagugggaaguguuuggggauaacagucucuuccaccuacugcucaaccaaccaugauuacaccaucuggaugcccguagaaccaagacuaggaacaucuugugauauuuuuaccaauagcagagggaagagagcaucuaagggaggcaggguuugcggauuuguggaugaaaggggcuuauacaaaucucucaaaggagcaugcaaacucaagcugugcggagucccugggauuaggcugauggauggaaccugggucucaauccagacaucagaagauauuaaguggugcccuccugaucgauuagugaaucuacacgacuuucauucggaugaacuagaacaucuuguuguagaggaauugaucaagaggagggaaaauugucuagaugcacuggaguccaucaugaccaccaaaucagugagcuucagacgucucagccacuugaggaagcuuguuccuggguuugggaaggcauacaccauauucaacaagaccuuaauggaagcugaugcucauuacaagucagucaagacuuggaacgaggucaucccuucgaaagguugccuggaaguuggagggaaaugucaccccccugugaacggaguauucuucaaugguauaauuuuggguccagauggaaauguucugaucccugagaugcaaucuucccugcuucaacaacauauggagcuguuagagucuucuguuaucccucugaugcaucccuuggcagacccaucaacagucuucaaggaaggugaugaggcggaagacuuugucgagguucaucuuccagauguccacaaacagguuucugauguugaccuuggucuuccgaguugggggaaguaucuguugaugagugcaggugcucuggcaauacugauucuggcgaucgucuuaauaauauguuguaggagggucaauaagacagggucaacacagagaggucauagggaaucaagagggaaaaugucaguagcaccucaaaaugggaagaucauauccucaugggaguuguacaaaagcgaaagugagacugggcuguga

SEQ ID NO: 63618 - RNA, 1575 nt, Artificial Sequence
  derived and/or modified CDS sequence (wt) from glycoprotein__RABV__KJ174642.1
auggucccucaggcucuucuguuugugccucuccugauucccucgcugugucucggggaauuccccaucuacacgauaccagacaaacucggcccuuggaccccuaucgacauacaucaucucagcugucccaacaaucugguugcagagaacgacgggugcaccagucugucaggguuuuccuauauggaacuaaaggugggauacaucuccgccauaaaggugaacggguucacuuguaccgguguugugacagaagccgagaccuacacaaacuuuguagguuaugucacuaccacauucaagagaaagcacuuccgcccgaugccagaugcuugcagagcugcacacgacuggaagauggccggugauccuagauaugaagauucccuucaaaauccuuauccugauuaccauugguuacggaccguaaagaccaccaaggagucgcucguuauuauauccccgaguguugcugauuuggaccccuacgacaagucccuucauucaagaguuuuccccagugggaaguguuuggggauaacagucucuuccaccuacugcucaaccaaccaugauuacaccaucuggaugcccguagaaccaagacuuggaacaucuugugauauuuuuaccaauagcagagggaagagagcaucuaagggaggcaggguuugcggauuuguggaugaaaggggcuuauacaaaucucucaaaggagcaugcaaacucaaacugugcggaguccccgggauuaggcuguuggauggaaccugggucucaauccagacaucagaagauauuaaguggugcccuccugaucgauuaguaaaucuacacgacuuucacucggaugaacuagaacaucuuguuguagaggaauugaucaagaggagggaaaauugucuagaugcacuggaguccaucaugaccaccaaaucagugagcuucagacgucucagccacuugaggaaacuuguuccgggguuugggaaggcauacaccauauucaacaagaccuuaauggaagcugaugcucauuacaagucagucaagacuuggaacgaggucauuccuucgaaagguugccuggaagucggagggaaaugucaccccccugugaacggaguauucuucaaugguauaauuuuggguccagauggaaauguucugaucccugagaugcaaucuucccugcuucaacaacauauggagcuguuagagucuucuguuaucccucugaugcaucccuuggcggacccaucaacagucuucaaggaaggugaugaggcggaagacuuuguugagguucaucuuccagauguccacaaacagguuucugauguugaccuuggucuuccgaguugggggaaguaucuguugaugagugcaggugcucuggcaauacugauucuggcgaucgucuuaauaauauguuguaggagggucaauaagacaggaucaacacagagaggucauagggaaucaagagggaaaaugucaguaucaccucaaaaugggaagaucauauccucaugggaguuguacaaaagagaaagugagacugggcuguga

SEQ ID NO: 63619 - RNA, 1575 nt, Artificial Sequence
  derived and/or modified CDS sequence (wt) from glycoprotein__RABV__KJ174643.1
augaucccucaggcucuucuguuugugccucuccugauucccucgcugugucucggggaauuccccaucuacacgauaccagacaaacucggcccuuggaccccuaucgacauacaucaucucagcugucccaacaaucugguugcagagaacgacgggugcaccagucugucaggguuuuccuauauggaacuaaaggugggauacaucucugccauaaaggugaacggguucacuuguaccgguguugugacagaagccgagaccuacacaaacuuuguagguuaugucacuaccacauucaagagaaagcacuuccgcccgaugccagaugcuugcagagcugcacacgacuggaagauggccggugauccuagauaugaagauucccuucaaaauccuuauccugauuaccauugguuacggaccguaaagaccaccaaggagucgcucguuauuauauccccgaguguugcugauuuggaccccuacgacaagucccuucauucaagaguuuuccccagugggaaguguuuggggauaacagucucuuccaccuacugcucaaccaaccaugauuacaccaucuggaugcccguagaaccaagacuuggaacaucuugugauauuuuuaccaauagcagagggaagagagcaucuaagggaggcaggguuugcggauuuguggaugaaaggggcuuauacaaaucucucaaaggagcaugcaaacucaaguugugcggaguccccgggauuaggcuguuggauggaaccugggucucaauccagacaucagaagauauuaaguggugcccuccugaucgauuagugaaucuacacgacuuucacucggaugaacuagaacaucuuguuguagaggaauugaucaagaggagggaaaauugucuagaugcacuggaguccaucaugaccaccaaaucagugagcuucagacgucucagccacuugaggaaacuuguuccgggguuugggaaggcauacaccauauucaacaagaccuuaauggaagcugaugcucauuacaagucagucaagacuuggaacgaggucauuccuucgaaagguugccuggaagucggagggaaaugucaccccccugugaacggaguauucuucaaugguauaauuuuggguccagauggaaauguucugaucccugagaugcaaucuucccuacuucaacaacauauggagcuguuagagucuucuguuaucccucugaugcaucccuuggcggacccaucaacagucuucaaggaaggugaugaggcggaagacuuuguugagguucaucuuccagauguccacaaacagguuucugauguugaccuuggucuuccgaguugggggaaguaucuguugaugagugcaggugcucuggcaauacugauucuggcgaucgucuuaauaauauguuguaggagggucaauaagacaggaucaacacagagaggucauagggaaucaagagggaaaaugucaguagcaccucaaaaugggaagaucauauccucaugggaguuguacaaaagagaaagugagacugggcuguga

SEQ ID NO: 63620 - RNA, 1575 nt, Artificial Sequence
  derived and/or modified CDS sequence (wt) from glycoprotein__RABV__KJ174644.1
augaucccucaggcucuucuguuugugccucuccugauucccucgcugugucucggggaauuccccaucuacacgauaccagacaaacucggcccuuggaccccuaucgacauacaucaucucagcugucccaacaaucugguugcagagaacgacgggugcaccagucugucaggguuuuccuauauggaacuaaaggugggauacaucucugccauaaaggugaacggguucacuuguaccgguguugugacagaagccgagaccuacacaaacuuuguagguuaugucacuaccacauucaagagaaagcacuuccgcccgaugccagaugcuugcagagcugcacacgacuggaagauggccggugauccuagauaugaagauucccuucaaaauccuuauccugauuaccauugguuacggaccguaaagaccaccaaggagucgcucguuauuauauccccgaguguugcugauuuggaccccuacgacaagucccuucauucaagaguuuuccccagugggaaguguuuggggauaacagucucuuccaccuacugcucaaccaaccaugauuacaccaucuggaugcccguagaaccaagacuuggaacaucuugugauauuuuuaccaauagcagagggaagagagcaucuaagggaggcaggguuugcggauuuguggaugaaaggggcuuauacaaaucucucaaaggagcaugcaaacucaagcugugcggaguccccgggauuaggcuguuggauggaaccugggucucaauccagacaucagaagauauuaaguggugcccuccugaucgauuagugaaucuacacgacuuucacucggaugaacuagaacaucuuguuguagaggaauugaucaagaggagggaaaauugucuagaugcacuggaguccaucaugaccaccaaaucagugagcuucagacgucucagccacuugaggaaacuuguuccgggguuugggaaggcauacaccauauucaacaagaccuuaauggaagcugaugcucauuacaagucagucaagacuuggaacgaggucauuccuucgaaagguugccuggaagucggagggaaaugucaccccccugugaacggaguauucuucaaugguauaauuuuggguccagauggaaauguucugaucccugagaugcaaucuucccugcuucaacaacauauggaacuguuagagucuucuguuaucccucugaugcaucccuuggcggacccaucaacagucuucaaggaaggugaugaggcggaagacuuuguugagguucaucuuccagauguccacaaacagguuucugauguugaccuuggucuuccaaguugggggaaguaucuguugaugagugcaggugcucuggcaauacugauucuggcgaucgucuuaauaauauguuguaggagggucaauaagacaggaucaacacagagaggucauagggaaucaagagggaaaaugucaguagcaccucaaaaugggaagaucauauccucaugggaguuguacaaaagagaaagugagacugggcuguga

SEQ ID NO: 63621 - RNA, 1575 nt, Artificial Sequence
  derived and/or modified CDS sequence (wt) from glycoprotein__RABV__KJ174645.1
augaucccucaggcucuuuugucuuugcuucuccugauuuccucguugugucucgggaaauucccgaucuacacgauaccagacaagcucggcccuuggaguccuauugacauacaucaucucagcuguccuaauaacuugguuguagaggacgaggggugcacuaguuugucaggguuuucuuacauggaacugaaggugggauacauuucugcuauuaaggugaacgguuucacuuguaccgguguagugacagaggcugagaccuauaccaacuucguugguuauguuaccacaacauucaagagaaagcacuuucgcccaaugccagaugcaugcagagcugcacacgaauggaaaauggccggugauccuagauaugaagauucucuucaaaaucccuauccugauuaccauuggcuacggaccguaaagaccaccaaagagucucuuauuauaauaucuccaaguguggcugauuuggacccguaugacaagucucuucacucaaggguuuuuccuggugggaauuguuugggaauaacaaucucuucuaccuacugcucaacuaaucaugauuacaccaucuggaugcccgaggaagcgagacuugggacaucuugugacauuuuuaccagcagcagagggaagagagcaucuaaggggggcaagauuugcggauucguggacgaaaggggcuuguacaagucucugaaaggagcauguaaacuuaagcuaugcggaguucccggacuuagacuuauggacggaaccuggguaucaauucaaacaucggaugaaaccaaaugguguccuccugaucaauuggugaauguacaugacuuucacucagacgagauagaacaucucauuguggaggagcuagucaagaaaagggaagaaugucuagaugcacuggagucuaucaugaccacuaaauccgugaguuucagacgucucagccacuuaaggaaacuuguuccuggguuuggaaaggcauauacuauauucaacaaaaccuuaauggaagcugaugcccacuacaagucgguucggacuuggaaugagaucaucccuuccaaggggugccuaaaagucggagguaugugccacccucaugugggcgggguguuuuuuaaugguauaauucuagguccagacgggacugucuugaucccugaaaugcaaucguccuugcuccaacaacauauggagcuguuggaguccucugugaucccccugaugcaccccuuagcggacccgucaacuguuuucaaggaaggugaugaggcagaagacuuuguugagauucaccuuccagauguucacaagcaaaucucagggguugaccuuggucucccuagcugggggaaguaucuguugauaagugcaggugcucuggcaacacugauucugacaaucuucuuaauaacauguugcaggaaggucaauagaacagaaucaauacagcgaggucauggagaaucagaaaggaaagugucuguaaguccccaaaacgggagagucauauccuccugggagcuguacaaaaguggaggagaaaccaaucuguaa

SEQ ID NO: 63622 - RNA, 1575 nt, Artificial Sequence
  derived and/or modified CDS sequence (wt) from glycoprotein__RABV__KJ174646.1
augaucccucaggcucuucuguuugugccucuccugauucccucgcugugucucgggaaauuccccaucuacacgauaccagacaagcuaggccccuggagcccgaucgacauacaucaucucagcugucccaacaaucugguugcagaagacgaagggugcaccagucugucaggguucuccuauauggaacugaaggugggauacaucucugccauaaaggugaacggguucacuuguaccgguguugugacagaagcugagaccuacaccaacuuugucgguuaugucaccaccacauuuaagagaaaacacuuccgcccgaugccagacgccugcagagcugcacacgacuggaagauggccggugauccuagauaugaagauucucuucagaauccuuauccugauuaccauuggcuacggaccguaaagaccaccaaggagucgcucguuauuauauccccgaguguggcugauuuggaccccuacgacaagucccuucauucaagaguuuuccccagugggaaguguuuggggauaacagucuccucuaccuacugcucaacuaaccaugauuacaccaucuggaugcccguagaagcaagacuugggacaucuugugauauuuuuaccaauagcaaagggaagaaagcaucuaaggggggcaggacuugcggauuuguagaugaaaggggcuuguacaagucucugaaaggagcaugcaaacucaagcuaugcggaguccccgggcucaggcuaauggacggaaccugggucucaauccagacaucagaugauauuaaauggugcccuccugaucaauuggugaaucuacaugacuuucacucagaugaaauagaacaucuugucguagaggaauugaucaagaaaagagaaggaugucuagaugcacuggaguccaucaugaccaccaaaucagugagcuucagacgucucagccacuugagaaagcuuguuccuggguuugggaaagcauacaccauauucaacaauaccuuaauggaagcugaugcucauuacaagucaguucggacuuggaacgaagucauccccucaaaagguugccuaaaggucggagggaggugucaucccccugugaauggaguauucuucaaugguauaauuuuggguccagaugggaauguucugaucccugagaugcaaucgucccugcuucaacaacauauggaacuguuggagucuucuguuaucccucugaugcauccccuggcagacccaucaacagucuucaaggacggugaugaggcggaagauuuuguugagguucaucucccggauguucacaaacaggucucggagauugaccuuggucucccgaguugggggaaguaucuguugaugagugcagguguuuuggcaacacugauucuggcgaucuucuugauaacaugcuguagaagggccaauaggacagaaucaacacagagaggucguagggagucaggagggaaagugucaguagccccucaaaacgggaaagucauauccucaugggaguuguacaaaagugaaagugagaccgggcuguga

SEQ ID NO: 63623 - RNA, 1575 nt, Artificial Sequence
  derived and/or modified CDS sequence (wt) from glycoprotein__RABV__KJ174647.1
augaucccucaggcucuucuguuugugccucuccugauucccucgcugugucucgggaaauuccccaucuacacgauaccagacaagcucggccccuggagcccgaucgacauacaucaucucagcugucccaacaaucugguugcagaagacgaagggugcacaagucugucaggguucuccuauauggaacugaaggugggauacaucucugccauaaaggugaacggguucacuuguaccgguguugugacagaagcugagaccuacaccaacuuugucgguuaugucaccaccacauuuaagagaaaacacuuccgcccgaugccagacgcuugcagagcugcacacgacuggaagauggccggugauccuagauaugaagauucucuucagaauccuuauccugauuaccauuggcuacggaccguaaagaccaccaaggagucgcucguuauuauauccccgaguguggcugauuuggaccccuacgacaagucccuucauucaagaguuuuccccagugggaaguguuuggggauaacagucuccucuaccuacugcucaacuaaccaugauuacaccaucuggaugcccguagaagcaagacuugggacaucuugugauauuuuuaccaauagcaaagggaagaaagcaucuaaggggggcaggacuugcggauuuguagaugaaaggggcuuguacaagucucugaaaggagcaugcaaacucaagcuaugcggaguccccgggcucaggcuaauggacggaaccugggucucaauccagacaucagaugauauuaaauggugcccuccugaucaauuggugaaucuacaugacuuucacucagaugaaauagaacaucuugucguagaggaauugaucaagaaaagagaaggaugucuagaugcacuggaguccaucaugaccaccaaaucagugagcuucagacgucucagccacuugagaaagcuuguuccuggguuugggaaggcauacaccauauucaacaauaccuuaauggaagcugaugcucauuacaagucaguucggacuuggaacgaagucauccccucaaaagguugccuaaaggucggagggaggugucaucccccuguaaauggaguauucuucaaugguauaauuuuggguccagaugggaauguucugaucccugagaugcaaucgucccugcuucaacaacauauggaacuguuggagucuucuguuaucccucugaugcaucccuuggcagacccaucaacagucuucaaggacggugaugaggcggaagauuuuguugagguucaucuuccggauguucacaaacaggucucggagauugaccuuggucucccgaguugggggaaguaucuguugaugagugcagguguuuuggcaacacugauucuggcgaucuucuugauaacaugcuguagaaggaccaauaggacagaaucaacacagagaggucguagggagucaggagggaaagugucaguagccccucaaaacgggaaaaucauauccuccugggaguuguacaaaagugaaagugaaaccgggcuguga

SEQ ID NO: 63624 - RNA, 1575 nt, Artificial Sequence
  derived and/or modified CDS sequence (wt) from glycoprotein__RABV__KJ174648.1
augaucccucaggcuuuuuuguuugugccucuccugauccccucgcugugucucggggaauuccccaucuacacgauaccagacaagcucggcccuuggagcccuauugacauacaucaucucagcugucccaacaaucugguugcagaaaacgacgggugcacaagucugucaggguuuuccuauauggaacugaaggugggauacaucucugccauaaaggugaauggauucacuuguaccgguguuaugacagaagccgagaccuacaccaacuuugucgguuaugucaccaccacauucaagagaaagcacuuccgcccgaugccagaugccugcagagcugcacacgacuggaaaauagccggugaucccagauaugaagauucccuucaaaauccuuauccugauuaccauuggcuacggacuguaaagaccaccaaggagucgcucguuauuauauccccgaguguugcugauuuggaccccuacgacaagucccuucauucaagaguuuuccccagugggaaguguuuggggauaacagucucuuccaccuacugcucaaccaaccaugauuacaccaucuggaugcccguagaaccaagacuuggaacaucuugugauauuuuuaccaacagcagagggaagagagcaucuaaggggggcaggguuugcggauuuguggaugaaaggggcuuauacaagucucucaaaggagcaugcaaacucaagcugugcggaguccccgggauuaggcugauggauggaaccugggucucaauccagacaucagaagagauuaaguggugcccuccugaucgauuagugaaucuacacgacuuucacucggaugaaauagaacaucuuguuguagaggaauugaucaagaggagggaaaauugucuagaugcacuggaguccaucaugaccaccaaaucagugagcuucagacgucucagccacuugagaaagcuuguuccuggguuugggaaggcauacaccauauucaacaagacuuuaauggaggcugaugcucauuacaagucaguuaagacuuggaacgaggucaucccuucgaaggguugccuggaagucggagggagaugucaucccccugugaacggaguauucuucaaugguauaauuuuggguccagauggaaauguucugaucccugagaugcaaucuucccugcuucaacaacauauggagcuguuagagucuucuguuaucccucugaugcaucccuuggcagacccaucaacagucuucaaggaaggugaugaggcggaagacuuuguugagguucaucuuccagauguccacaaacagguuucagauguugaccuuggucuuccgaguugggggaaguaucuguugaugagugcaggugcucuggcaauacugauucuggugaucgucuuaauaauauguuguaggagggucaauaagacaggaucaacacagagaggucauagggaaucaggagggaaaaugucaguagcaccucaaaaugggaagaucauauccucaugggaguuguacaaaagugaaagcgagaccggacuguga

SEQ ID NO: 63625 - RNA, 1575 nt, Artificial Sequence
  derived and/or modified CDS sequence (wt) from glycoprotein__RABV__KJ174649.1
augaucccucaggcuuuuuuguuugugccucuccugauucccucgcugugucucggggaauuccccaucuacacgauaccagacaagcucggcccuuggagcccuaucgacauacaucaucucagcugucccaacaaucugguugcagaaaacgacgggugcacaagucugucaggguuuuccuauauggaacugaaggugggauacaucucugccauaaaggugaacggauucacuuguaccgguguuaugacagaagccgagaccuacaccaacuuugucgguuaugucaccaccacauucaagagaaagcacuuccgcccgaugccagaugccugcagagcugcacacgacuggaagauagccggugaucccagauaugaagauucccuucaaaauccuuauccugauuaccauuggcuacggacuguaaagaccaccaaggagucgcucguuauuauauccccgaguguugcugauuuggaccccuacgacaagucccuucauucaagaguuuuccccagugggaaguguuuggggauaacagucucuuccaccuacugcucaaccaaccaugauuacaccaucuggaugcccguagaaccaagacuuggaacaucuugugauauuuuuaccaacagcagagggaagagagcaucuaaggggggcaggguuugcggauuuguggaugaaaggggcuuauacaagucucucaaaggagcaugcaaacucaagcugugcggaguccccgggauuaggcugauggauggaaccugggucucaauccagacaucagaagagauuaaguggugcccuccugaucgauuagugaaucuacacgacuuucacucggaugaaauagaacaucuuguuguagaggaauugaucaagaggagggaaaauugucuagaugcacuggaguccaucaugaccaccaaaucagugagcuucagacgucucagccacuugagaaagcuuguuccuggguuugggaaggcauacaccauauucaacaagaccuuaauggaggcugaugcucauuacaagucaguuaagacuuggaacgaggucaucccuucgaaggguugccuggaagucggagggagaugucaucccccugugaacggaguauucuucaaugguauaauuuuggguccagauggaaauguucugaucccugagaugcaaucuucccugcuucaacaacauauggagcuguuagagucuucuguuaucccucugaugcaucccuuggcagacccaucaacagucuucaaggaaggugaugaggcggaagacuuuguugagguucaucuuccagauguccacaaacagguuucggauguugaccuuggucuuccgaguugggggaaguaucuguugaugagugcaggugcucuggcaauacugauucuggugaucgucuuaauaauauguuguaggagggucaauaagacaggaucaacacagagaggucauagggaaucaggagggaaaaugucaguggcaccucaaaaugggaagaucauauccucaugggaguuguacaaaagugaaagcgagaccggacuguga

SEQ ID NO: 63626 - RNA, 1575 nt, Artificial Sequence
  derived and/or modified CDS sequence (wt) from glycoprotein__RABV__KJ174650.1
augauccuucaggcucuucuguuugugccucuccugauuuccccauugugucuagggaaauucccaaucuacacgauaccggacaaaaucggcccguggagucccaucgacauacaucaucucagcugucccaauaaucugguuguggaggaugaggggugcaccacucugucaggguuuucuuacauggaacugaaggugggauacaucucugccauaaaggugaacggguucacuuguaccgguguuguaacagaagccgagaccuacaccaacuucguagguuaugucacaacuacauucaagagaaaacacuuucgcccgacgccagaugcaugcagagcugcauacaacuggaagauagccggugaucccagauaugaagauucucuucaaaauccuuauccugauuaucauuggcuacggaccguaaagaccaccaaagagucucucauuaucauaucuccaaguguggcugaucuggacccauacgacaagucccuucauucaagaguuuucccuagugggaaauguuugggaauaacaauuucuuccaccuacugcucaacuaaccaugauuacaccaucuggaugccugaggaagcaagacucgggacaucuugugacauuuuugccaacagcaaagggaagagagcaucuaagggggguaagacuugcggauucguugaugaaagagguuuguauaagucucuaagaggagcaugcaaacuuaagcugugugggguucccggacuuaggcuuauggauggaacuugggucucaauucagacaacagaugagaccaaauggugcccuccggaucaauuggugaaucuacaugacuuucacucagaugagauagaacaucucgucguggaagaguuggucaagaagagggaagaaugucuggaugcacuagaguccaucaugaccaccaaaucuguaagcuucagacgucucagccacuugagaaaacuuguuccuggguuuggaaaggcguauacuauauucaacaagaccuuaauggaagcugaugcucauuacaagucaguucaaacuuggaacgagaucauccccucaaaagggugcuuaaaagucggagggaggugucauccucauguggacggaguguuuuucaaugguauaauuuugggucccgacgggaacgucuugauccccgagaugcaaucaucacuacuucaacaacauauggagcuguuggaguccucuguaaucccccuaaugcaucccuuggcagacccgucaacagucuucaaagacggugaugaggcagaagacuuuguugagguucaccuuccggauguucacaaacaggucucagggguugaccucggucucccagauugggggaaguaucugcugaugagugcaggugcucuugcaacacuacugcuaacaaucuucuuaaugacauguugcagaaaggucaacaaaacagaaucaacgcaucgagaccccggagagucaggaagaaaaguaucgguagcuccucgaaacgggaaagucauaucuucaugggaguuguacaagaguggaggcgagaccaggcuguga

SEQ ID NO: 63627 - RNA, 1575 nt, Artificial Sequence
  derived and/or modified CDS sequence (wt) from glycoprotein__RABV__KJ174651.1
augauccuucaggcucuucuguuugugccucuccugauuuccccauugugucuagggaaauucccaaucuacacgauaccagacaaaauuggcccguggagucccaucgacauacaucaucucagcugucccaauaaucugguuguggaggaugaggggugcacuacucugucaggguuuucuuacauggaacugaaggugggauacaucucugccauaaaggugaacggguucacuuguaccgguguuguaacagaagccgagaccuacaccaacuuuguagguuaugucacaacuacauucaagagaaaacacuuucgcccgacgccagaugcaugcagagcugcauacaacuggaagauagccggugaucccagauaugaagauucucuucaaaauccuuauccugauuaucauuggcuacggaccguaaagaccaccaaagagucucucauuaucauauccccaaguguggcugaucuggacccauacgacaagucccuucauucaagaguuuucccuagugggaaauguuugggaauaacaauuucuuccaccuacugcucaaccaaccaugauuacaccaucuggaugccugaggaagcaagacucgggacaucuugugacauuuuuaccaacagcaaagggaagagagcaucuaagggggguaagacuugcggauucguugaugaaagagguuuguauaagucucuaagaggagcaugcaaacuuaagcugugugggguucccggacucaggcuuauggauggaacuugggucucaauucagacaacagaugauaccaaauggugcccuccggaucaauuggugaaucuacaugacuuucacucagaugagauagaacaucucgucguggaagaguuggucaagaagagggaagaaugucuggaugcacuagaguccaucaugaccaccaaaucuguaagcuucagacgucucagccacuugagaaaacuuguuccgggguuuggaaaggcguauacuauauucaacaagaccuuaauggaagcugaugcucacuacaagucaguucaaacuuggaacgagaucauccccucaaaagggugcuuaaaagucggagggaggugucauccucauguggacggaguguuuuucaaugguauaauuuugggucccgacgggaacgucuugauccccgagaugcaaucaucacuacuucaacaacauauggagcuguuggaguccucuguaaucccccuaaugcaucccuuggcagacccgucaacagucuucaaagacggugaugaggcagaagacuuuguugagauucaccuuccggauguucacaaacaggucucagggguugaccuuggucucccagauugggggaaguaucugcugaugagugcaggugcucuugcaacacuacuacuaacaaucuucuuaaugacauguugcagaaaggucaacaaaacagaaucgacgcaucgagaccccggagagucaggaagaaaaguaucgguagcuccucgaaacgggaaagucauaucuucaugggaguuguacaagaguggaggcgagaccaggcuguga

SEQ ID NO: 63628 - RNA, 1575 nt, Artificial Sequence
  derived and/or modified CDS sequence (wt) from glycoprotein__RABV__KJ174653.1
augaucccucaggcucuucuguuugugccucuccugauuuccucguuguguuucggggaauuccccaucuacacgauaccagaaaaacucggcccuuggagucccaucgacauacaucaucucaguugcccuaacaauuugguuguggaggaugaaggaugcaacagucugucaggguuuucuuacauggaacugaaggugggauacaucuccuccauaaaagugaauggauucacuuguaccggugucgugacagaagcugagaccuacaccaacuuuguugguuaugucaccaccacauucaagagaaaacacuuccgcccuaugccagaugcaugcagagcugcauacagcuggaagauagcuggagauccuagauacgaagagucucuucacaaucccuacccugauuaccauugguuacgaacaguaaaaaccaccaaagagucucuuguuaucauaucuccaaguguggcugacuuggauccauacgacaaaucccuucauucaaggguauucucuggugggaaguguuugggaauaacaaucucuuccaccuacugcuccacuaaccaugauuacacuaucuggaugcccgaagaagcaagacucgggaccucuugugacauuuuuaccaacagcaaagggaagagagcaucuaagggaggcaagacuugcggguucguagaugaaaggggauuauauaagucucuaaaaggggcaugcaaacuuaaacugugcgggguuccuggacuuagacuuauggauggaacuugggucucaauucagacaucagaugagaccaaauggugcccuccugaucaacugguaaauauacaugauuuucgcucagaugagauagaacaucucguuguggaggaguuggucaagaagagggaagaaugccuggaugcacuggaguccauuaugaccaccaaaucaguaagcuucagacgucuuagccacuugagaaaacuuguuccuggguucggaaaggcauauaccauauucaacaaaaccuuaauggaggcugacgcucacuacaagucaguucggacuuggaaugagauuauccccucaaaagggugccuaagcgucggagggaggugccauccucauguaaacggaguguuuuucaaugguauaauuauggguccggacgggagugucuugaucccugagaugcaaucaucccugcuucaacagcauauggagcuguuggaguccucuguaaucccccuaaugcaucccuuggcaaacccaucaacagucuucaaggacggugaugaggcugaggacuuuauugagguucaccuuccggacguucaagaacaggucucagggguugaccucggucucccaaacugggggaaguaugugcugaugagugcaggugcucuggcuauccuaaugcugacaauuuucuuaaugacauuuugcagaaggaccaauagaacaaaaucaauacaacaagguccuggggagucaggaaggaaaguaucgguuccuccccaaaacgggaaagucauaucuucaugggagucguuuaagagcggaggcgaaaccgggcuguga

SEQ ID NO: 63629 - RNA, 1575 nt, Artificial Sequence
  derived and/or modified CDS sequence (wt) from glycoprotein__RABV__KJ174654.1
augaucccucaaucucuucuguuuuugccucuccugauuuccucuuuguguuucggggaauuccccaucuacacgauaccagaaaaacuaggcccuuggagucccaucgacauacaucaccucaguugcccuaacaauuugguuguggaggacgagggaugcaacagucugucaggguuuucuuacauggaacugaagguaggauacaucucuuccauaaaagugaauggguucacuuguaccggagucgugacagaagcugagaccuacaccaacuucguugguuaugucaccaccacauucaagagaaaacacuuccguccgaugccagaugcaugcagagcugcauacaguuggaagauggccggagauccuagauacgaagagucucuucacaauccuuacccugauuaccauuggcuacgaacaguaaaaaccaccaaagagucucuuguuauuauaucgccaaguguggcugaucuggauccauacgacaaaucccuucacucaagggucuucucuggugggaagugucugggaauaacaaucucuuccaccuacugcuccacuaaccaugauuacacuaucuggaugccugaagaggcaagacuuggaaccucuugugacauuuuuacuaacagcaaagggaagagagcauccaagggagguaggacuugcggauucguggaugaaaggggauuauauaagucucuaaaaggggcaugcaaacuuaaacugugcggaguuccuggacuuagacuuauggauggaacuugggucucaauucagacaucaaaugagaccaaauggugcccuccugaucaacugguaaauauacaugauuuccgcucagaugagauagaacaucucgucguggaggaguuggucaagaagagggaagaaugccuggaugcacuugaguccauuaugaccaccaaaucaguaagcuucagacgucuuagccacuugagaaaacuugucccuggguucggaaaggcauauacuauauucaacaaaaccuuaauggaggcugacgcucacuacaagucaguucggacuuggaaugaggucauccccucaaaagggugccuaagcgucggagggaggugcuacccucaugugagcggaguguuuuucaaugguauaauucuggguccggacgggaguguccugauccccgaaaugcaaucaucccugcuucaacagcauauggagcuguuggagucuucuguaaucccccuaaugcaucccuuggcaaacccaucaacagucuucaaggacggugaugaggcggaggacuuuguugagguucaccuuccggacguuaaagaacaggucucagggguugaccucggucucccaaacugggggaaguaugugcugaugagugcaggugcucuggcuauccuaaugcuggcaauauucuuaaugacauguugcagaagggccaauagaacaaaaucaauacaacaagguccuagggagucaggaaggaaaguaucaguuccuccccaaaacgggaaagucauaucuucaugggagucguuuaagaguggaggcgaaaccaggcuguga

SEQ ID NO: 63630 - RNA, 1575 nt, Artificial Sequence
  derived and/or modified CDS sequence (wt) from glycoprotein__RABV__KJ174655.1
augaucucucaagcucuucuguuugugccucuccugauuuccucguuguguuucggggaauuccccaucuacacgauaccagagaaacucggcccuuggagucccaucgacauacaucaccucaguugcccuaacaauuugguuguggaggaugagggaugcaacagucugucaggguuuucuuacauggaacugaaagugggauacaucucuuccauaaaagugaauggguucacuuguacaggugucgugacugaagcugagaccuacaccaacuuuguugguuaugucaccaccacauucaagagaaaacacuuccgcccgaugccagaugcaugcagagcugcauacaacuggaaaauguccggagauccuagauaugaagagucucuucacaauccuuacccugauuaccauuggcuacggacuguaaaaaccaccaaagagucucuugucaucauaucgccaaguguggcugauuuggauccauacgacaaaucccuucauucaagggucuucucuggugggaaguguuugggaauaacaaucucuuccaccuacugcuccacuaaccaugauuacacuaucuggaugcccgaagaagcaagacuugggaccucuugugacauuuuuaccaacagcaaagggaagaaggcaucuaaggggggcaggacuugcggauucguggaugaaaggggauuauauaagucucuaaaaggggcaugcaaacucaaacugugcggaguuccuggacuuagacuuauggauggaacuugggucucaauucagacaucagaugagaccaaauggugcccuccugaucaacugguaaauauacaugauuuucgcucagaugagauagaacaucucguaguggaggaguuggucaagaagagggaagaaugccuggaugcacuggaguccauuaugaccaccaaaucaguaagcuucagacgucuuagccacuugaggaaacucguuccuggguucggaaaggcauauacuauauucaacaaaacauuaauggaggcugaugcucacuacaagucaguucggaccuggaaugaaaucauccccucaaaagggugccuaagcgucggagggaggugccauccucauguggacggaguguucuucaaugguauaauucuggguccggaugggaguguccugaucccugagaugcaaucaucccuacuucaacagcauauggagcuguuggaguccucuguaaucccccuaaugcauccauuggcaaacccgucaacagucuucaaggacggugaugaggcggaggacuuuguugaaguucaccuuccggacguucaagaacaggucucagggguugaccucggucucccaaacugggggaaguaugugcuuaugagugcaggugcucuggcuauccuacugcugacaaucuuuuuaaugacauguugcagaagggccaauagaacaaaaucaauacgacaagguccuggggagucaggaaggaaaguauccguuccuccccaaaacgggagagucauaucuucaugggagucauucaagagcggggaugagaccggccuguga

SEQ ID NO: 63631 - RNA, 1575 nt, Artificial Sequence
  derived and/or modified CDS sequence (wt) from glycoprotein__RABV__KJ174656.1
augaucccucagacucuuuuguuugugccucuccugauucucccgucgugccucgggaaauucccaaucuacacgauaccagacaaaauuggcccauggagucccaucgacauacaucaucucagcuguccuaauaauuuggugguggaggaugaggggugcacuagucugucaggguuuucuuacauggaacugaaggugggauacaucucugccauaaaggugaacggguucacuuguaccgguguugugacggaagcagagaccuacaccaacuuuguggguuacgucaccacuacauucaagagaaaacacuuucgcccaacgccagaugcaugcagagcagcauacaacuggaagauggcuggugaucccagauaugaagauucucuucaaaauccuuauccugauuaucauuggcuacggaccgugaagaccaccaaagagucucucauuaucauaucuccaaguguggcugauuuagacccauaugacaagucccuucauucaagaguuuucccuagugggaaauguuugggaauaacagucucuucuacuuacugcucaacuaaccaugauuacaccaucuggaugcccgaggaggcaagacucgggacauccugugacauuuuuaccaacagcaaagggaagagagcaucuaaggggggcaagacuugcggauucguugaugaaagaggcuuguauaagucucuaagaggagcaugcaaacuuaagcugugugggguuccuggacuuaggcuuauggauggaaccugggucucaauccagacaacagaugagaccaaauggugcccuucggaucaguuggugaaucuacaugacuuucacucagaugagauagaacaucucguaguggaggaguuggucaagaaaagggaagaaugucuggaugcacuagaguccaucaugaccaccaaauccguaagcuucagacgucucagccaccugagaaaacuuguuccuggguuuggaaaggcauauacuauuuucaacaagaccuuaauggaagcugaugcucauuacaagucaguucagacuuggaacgagaucauccccucaaaagggugccuaaaagucggagggaggugucauccucauguggacggaguguuuuucaaugguauaauucuggguccagacgggaauguccugauccccgagaugcaaucgucacuacuucaacaacauauggagcuguuggaguccucuguaaucccccucaugcaucccuuggcagacccaucaacagucuucaaggacggugaugaggcagaggacuuuguugagguucaccuuccggauguccacaaacaggucucagggguugaccuuggucucccagacugggggaaguaucugcugaugagugcaggugcucuggcaacacuacugcuaacaaucuucuugaugacauguugcagaaagguuaacaaaacagaaucaacacagcgagauucuggagagucaggaagaaaaguaucgauagcuccccgaaacgggaaagucauaucuucaugggaguuguacaaaaguggaggcgauaccaggcuguga

SEQ ID NO: 63632 - RNA, 1575 nt, Artificial Sequence
  derived and/or modified CDS sequence (wt) from glycoprotein__RABV__KJ174657.1
augaucccucagacucuuuuguuugugccucuccugauucucccgucgugccucgggaaauucccaaucuacacgauaccagacaaaauuggcccauggagucccaucgacauacaucaucucagcuguccuaauaauuuggugguggaggaugaggggugcacuagucugucaggguuuucuuacauggaacugaaggugggauacaucucugccauaaaggugaacggguucacuuguaccgguguugugacggaagcagagaccuacaccaacuuuguggguuacgucaccacuacauucaagagaaaacacuuucgcccaacgccagaugcaugcagagcagcauacaacuggaagauggcuggugaucccagauaugaagauucucuucaaaauccuuauccugauuaucauuggcuacggaccgugaagaccaccaaagagucucucauuaucauaucuccaaguguggcugauuuagacccauaugacaagucccuucauucaagaguuuucccuagugggaaauguuugggaauaacagucucuucuacuuacugcucaacuaaccaugauuacaccaucuggaugcccgaggaggcaagacucgggacauccugugacauuuuuaccaacagcaaagggaagagagcaucuaaggggggcaagacuugcggauucguugaugaaagaggcuuguauaagucucuaagaggagcaugcaaacuuaagcugugugggguuccuggacuuaggcuuauggauggaacaugggucucaauccagacaacagaugagaccaaauggugcccuucggaucaguuggugaaucuacaugacuuucacucagaugagauagaacaucucguaguggaggaguuggucaagaaaagggaagaaugucuggaugcacuagaguccaucaugaccaccaaauccguaagcuucagacgucucagccaccugagaaaacuuguuccuggguuuggaaaggcauauacuauuuucaacaagaccuuaauggaagcugaugcucauuacaagucaguucagacuuggaacgagaucauccccucaaaagggugccuaaaagucggagggaggugucauccucauguggacggaguguuuuucaaugguauaauucuggguccagacgggaauguccugauccccgagaugcaaucgucacuacuucaacaacauauggagcuguuggaguccucuguaaucccccucaugcaucccuuggcagacccaucaacagucuucaaggacggugaugaggcagaggacuuuguugagguucaccuuccggauguccacaaacaggucucagggguugaccuuggucucccagacugggggaaguaucugcugaugagugcaggugcucuggcaacacuacugcuaacaaucuucuugaugacauguugcagaaagguuaacaaaacagaaucaacacagcgagauucuggagagucaggaagaaaaguaucgauagcuccccgaaacgggaaagucauaucuucaugggaguuguacaaaaguggaggcgauaccaggcuguga

SEQ ID NO: 63633 - RNA, 1575 nt, Artificial Sequence
  derived and/or modified CDS sequence (wt) from glycoprotein__RABV__KJ174658.1
augaucucucaaacucuucuguuugugacucuccugauuuccucguuguguuucggggaauuccccaucuacacgauaccagaaaaacucggcccuuggagcccuaucgacauacaucaucucaguugcccuaacaauuugguuguggaggacgaaggaugcaacagucugucaggguuuucuuacauggaacugaaggugggauacaucucuuccauaaaagugaauggguucacuuguaccggcgucgugacggaagcugagaccuacaccaacuuugucgguuaugucaccaccacauucaagagaaaacauuuccgcccgaugccagaugcaugcagagcugcauacaacuggaagauguccggagauccuagauaugaagagucucuucacaauccuuacccugauuaccauuggcuacggacaguaaaaaccaccaaagagucucuuguuaucauaucgccaaguguggcugauuuggauccauacgacaaaucccuccauucaagggucuucucuggugggaaguguuugggaauaacaaucucuuccaccuacugcuccacuaaccaugauuacacucucuggaugcccgaagaagcaagacuugggaccucuugugacauuuuuaccaacagcaaagggaagagagcaucuaaggggggcaggaccugcggauucguggaugaaaggggauuauauaagucucuaaaaggggcaugcaaacuuaaacugugcggaguuccuggacuuagacuuauggauggaacuugggucucaauucagacaucagaugagaccaaauggugcccuccugaucaacugguaaauauacaugauuuucgcucagaugagauagaacaucucguaguggaggaguuggucaagaagagggaagaaugccuagaugcacuggaguccauuaugaccaccaaaucaguaagcuucagacgucuuagccacuugagaaaacucguuccuggguucggaaaggcauauacuauauucaacaaaacauuaauggaggcugaugcucacuacaagucaguccggacuuggaaugaaguuauucccucaaaagggugccuaagcgucggggggaggugccauccucauguggacggaguguucuucaaugguauaauucuggguccggacgggaguguccugaucccugagaugcaaucauccuuacuucaacagcauauggagcuguuggaguccucuguaaucccccugaugcaccccuuggcaaacccaucaacagucuucaaggacggugaugaggcggaggacuuuguugaaguucaucuuccggacguucaagaacaggucucagggguugaccucggucucccaaacugggggaaguaugugcuuaugagugcaggugcucuagcuauccuacuacugacaaucuucuuaaugacauguugcagaagggccaauagaacaaaaucaauacgacaagguccugaggagucaggaaggagaguaucgguuccuccccaaaacgggaaagucauauccucaugggagucauuuaagagcgggggcgaaaccgggcuguga

SEQ ID NO: 63634 - RNA, 1575 nt, Artificial Sequence
  derived and/or modified CDS sequence (wt) from glycoprotein__RABV__KJ174659.1
augaucucucaaacucuucuguuugugccucuucugauuuccucguugugucucggggaauucccuaucuacacgauaccagaaaaacucggcccuuggagucccaucgacauacaucaucucaguugcccuaacaauuugguuguggaggacgagggaugcaacaguuugucgggguuuucuuacauggaacugaaggugggauacaucucuuccauaaaagugaauggguucacuuguaccggugucgugacggaagccgagaccuacaccaacuuuguugguuaugucaccaccacauucaagagaaaacacuuccgcccgaugccagaugcaugcagagcugcauacaacuggaagauguccggagauccuagauaugaagagucucuucacaauccuuacccugauuaccauugguuacgaacagugaaaaccaccaaagagucucuuguuaucauaucgccaaguguggcugauuuggauccauacgacaaaucccuucauucaagagucuuuucuggugggaaguguuugggaauaacaaucucuuccaccuauugcuccacuaaccaugauuacacucucuggaugcccgaagaagcaagacuagggaccucuugugacauuuuuaccaacagcaaagggaagagagcgucuaaggggggcaagaccugcggauucguggaugagaggggauuauauaagucucuaaaaggggcaugcaaacuuaaacuuugcggaguuccuggacuuagacuuauggauggaacuugggucucaauucagacaucagaugagaccaaauggugcccuccugaucaacugguaaauauacaugauuuucacucagaugagauagaacaucucguaguggaagaguuggucaagaagagggaagaaugccuggaugcacuggaguccauuaugaccaccaaaucaguaagcuucagacgucuuagccacuugagaaaacuuguuccuggguucggaaaggcauauacuauauucaacaaaacauuaauggaggcugaugcucacuacaagucaguucggacuuggaaugaggucauccccucaaaagggugccuaagcgucggggggaggugccauccucauguggacggaguauucuucaaugguauaauucuggguccggacgggaguguccugaucccugagaugcaaucauccuuacuucaacagcauauggagcuguuggaguccucuguaaucccccuaaugcauccccuggcaaacccaucaacagucuucaaggacggugaugaggcggaggacuuuguugaaguucaccuuccggacguucaagaacaggucucagggguugaccucggucucccaaacugggggaaguaugugcucaugagugcaggugcucuggcuauccuacugcugacaaucuucuuaaugacauguugcagaagggccaauagaacaaaaucaauacgacgagguccugaggagucaggaaggaaaguaucgguuccuccccaaaacgggaaagucauaucuucaugggagucauuuaagagcgggggcgaaaccaggcuguga

SEQ ID NO: 63635 - RNA, 1575 nt, Artificial Sequence
  derived and/or modified CDS sequence (wt) from glycoprotein__RABV__KJ174660.1
augaucccucaggcucuucuguuugugccucuucugauuucuucguugugucucgggaaauuccccaucuauacgauaccagaaaagcucggcccuuggagucccaucgacauacaucaucuuggcuguccuaacaauuugguuguggaagacgagggaugcgacagucugucaggguuuucuuacauggaacugaaggugggauacaucuccgccauaaaagugaacggguucacuuguaccggugucgugacagaagcugagaccuauaccaacuuuguugguuaugucaccaccacauucaagagaaaacacuuccgcccuaugccggaugcaugcagagcugcauacaacuggaagacagccggcgauccccgauaugaagagucucuucacaauccuuauccugauuaccauuggcuacggacuguaaaaaccaccaaagagucucuuauuaucauaucaccaaguguggcugauuuggacccauaugacaaaucccuucacucaagaguuuucccuggcgggaaguguuugggaauaacagucucuucuaccuacugcucaacuaaccaugauuacacuaucuggaugcccgaagaaacaagacucgggacaucuugugacauuuucaccaacagcagagggaagagagcaucuaaagggggcaagacuugcggauuuguggaugaaaggggcuuauauaagucucuaaaaggggcauguaaacuuaagcugugcggaguuccuggacuuagacuuauggauggaacuugggucucuauucagacaccagaugaaaccaaauggugcucuccugaucagcugguaaauuuacaugacuuccacucagaugagauagaacaucuuguuguggaggaguuggucaagaaaagggaagaaugucuagacgcacuggagucuaucaugaccaccaaaucaguaagcuucagacgucuuagccacuugagaaaacuuguuccuggguuugggaaagcauauacuauauucaacaaaacauuaauggaggcugaugcucacuacaagucaguucggaccugggacgagaucauccccucaaaagggugccuaagagucggagggaggugucauccucauguaaauggaguguuuuucaaugguauaauucuggguccggaugggcauguccugaucccggagaugcaaucuucccuccuccaacagcauauggagcuguuagaguccucugugaucccccuaaugcaucccguggcaaacccaucaacagucuucaaggacggugaugaggcagaggacuuuguugagguucaccuuccggauguucaugaacaggucucagggguugaucuuggucucccaaacugggggaaguauaugcugaugagugcaggugcucuggcgaccauaauacugacaaucuucuuaauagcauguugcagaaggguuaauagaaaagaaucaagacaacagggucuuggggagucaggaaggaaaguaucuguuacuccccaaaacgggaaaguccugucuucaugggagugguacaaaaguggaggugagaccaggcuguga

SEQ ID NO: 63636 - RNA, 1575 nt, Artificial Sequence
  derived and/or modified CDS sequence (wt) from glycoprotein__RABV__KJ174661.1
augaucccucaggcucuucuacuguugccucucaugaucuccucauugugucucgggaaauucccuaucuacacgauaccagacaagcucggcccuuggagucccaucgauauacaucaucucagcugucccaauaauuugguuguggaggacgaggggugcacuagucugucaggguuuucuuacauggaacugaagguaggauauaucucugccauaaaagugaacggguucacuuguaccgguguugugacagaagcugagacuuauaccaacuuuguugguuaugucaccaccacauucaagagaaaacacuuucgcccgaugccagaugcaugcagagcggcauacaacuggaagguggccggggauccuagauaugaagagucucuucaaaauccguauccugauuaccauuggcuucggacuguaaagaccaccaaagagucgcuuauuaucauaucuccaaguguggcugaccuggauccauacgacaaaucucugcggucaagaauuuucccuggagggaagugcuugggaauaacagucucuucuaccuacugcucaacuaaucaugauuacacuaucuggaugccagaagaagcaaggcucgggacaucuugugacauuuuuaccaacagcaaagggaagagagcuucuaagggagguaagauuugcggauucguggaugaaaggggguuguauaagucucuaaaaggagcauguaagcuuaagcugugcggaguuucuggacuuagacuuauggauggaaccugggucgcgauucagacgucggaggagaccaaauggugcccuucugaucaauuggugaaucuacaugacuuucacucagaugagauagaacaucucgucguggaggaguuggucaagaagagggaagaaugucuggacgcauuggaguccaucaugaccaccaaaucaguaaguuucagacgucucagccacuugagaaaacuuguucccggauuugggaaggccuauacuauauucaacaagacuuuaauggaagcugaugcccacuacaacucaguucggacuuggaaugagaucauccccucaaaagggugucuaaaagucggagggagaugucauccucauguggacggaguguuuuucaaugguauaauucuugguccggacgggaauguuuugaucccggagaugcaaucgucucuacuccaacaacauauggagcuguuggaguccucuguaaucccccuaaugcaucccuuggcagacccaucaacugucuucaaggaaggugaugaggcagagaacuucguugagguucacuugccagauauucacaaacaggucuccgggauugaccuuggucucccaaacugggggaaauauuugcugaugagugcaggugcucuggcggcucuaauacugacaaucuucuuaauuacauguugcagaagggucaauacaacgaaaucaauaaagcaagguccugaggagucaagaaggaaaguaucuguaacuccccaaagcgggagaguuguaucuucaugggagcuguacaaaaagggaggggagaccaagcuguga

SEQ ID NO: 63637 - RNA, 1575 nt, Artificial Sequence
  derived and/or modified CDS sequence (wt) from glycoprotein__RABV__KJ174662.1
augaucccucaggcucuucuacuguugccucucaugaucuccucauugugucucgggaaauucccuaucuacacgauaccagacaagcucggcccuuggagucccaucgauauacaucaucucagcugucccaauaauuugguuguggaggacgaggggugcacuagucugucaggauuuucuuacauggaacugaagguaggauauaucucugccauaaaagugaacggguucacuuguaccgguguugugacagaagcugagacuuauaccaacuuuguugguuaugucaccaccacauucaagagaaaacacuuucgcccgaugccagaugcaugcagagcugcauacaacuggaagguggccggcgauccuagauaugaagagucucuucaaaauccguauccugauuaccauuggcuucggacuguaaagaccaccaaagagucgcuuauuaucauaucuccaaguguggcugaccuggauccauacgacaaaucucugcggucaagaauuuucccuggagggaagugcuugggaauaacaguuucuucuaccuacugcucaacuaaucaugauuacacuaucuggaugccagaagaagcaaggcucgggacaucuugugacauuuuuaccaacagcaaagggaagagagcuucuaagggagguaagauuugcggauucguggaugaaaggggguuguauaagucucuaaaaggagcauguaagcuuaagcugugcggaguuucuggacuuagacuuauggauggaaccugggucgcgauucagacgucggaggagaccaaauggugcccuucugaucaauuggugaaucuacaugacuuucacucagaugagauagaacaucucgucguggaggaguuggucaagaagagggaagaaugucuggacgcauuggaguccaucaugaccaccaaaucaguaaguuucagacgucucagccacuugagaaaacuuguuccaggauuugggaaggccuauacuauauucaacaagacuuuaauggaagcugaugcccacuacaacucaguucggacuuggaaugagaucauccccucaaaagggugucuaaaagucggagggagaugucauccucauguggacggaguguuuuucaaugguauaauucuugguccggacgggaaugucuugaucccggagaugcaaucgucccuacuccaacaacauauggagcuguuggaguccucuguaaucccccuaaugcaucccuuggcagacccaucaacugucuucaaggaaggugaugaggcagagaacuucguugagguucacuugccagauauucacaaacaggucuccgggauugaccuuggucucccaaacugggggaaauauuugcugaugagugcaggugcucuggcggcucuaaugcugacaaucuucuuaauuacauguugcagacgggucaauacaacgaaaucaauaaagcaagguccugaggagucaagaaggaaaguaucuguaacuccccaaagcgggaggguuguaucuucaugggagcuguacaaaaagggaggggagaccaggcuguga

SEQ ID NO: 63638 - RNA, 1575 nt, Artificial Sequence
  derived and/or modified CDS sequence (wt) from glycoprotein__RABV__KJ174663.1
augaucccucaggcuauucugucagugccucuucugauuuccucgcuguguuuugggaaauuccccaucuacacgauaccagaaaaacuuggcccuuggagucccauugauauacaucaucucagcugcccuaacaaucuaguuguggaggacgagggaugcaccacuuugucaggguuuucuuacauagaacugaaggugggauacauuucugccauaaaagugaacggauucaccuguaccggugucgugacagaagcugagacuuacaccaacuuuguugguuaugucaccaccacauucaagagaaaacacuuccgcccgaugccagaugcaugcagagccgcuuacaacuggaagauugcaggcgauccuagauaugaagagucucuucacaacccuuauccugauuaccauuggcuacggaccguaaaaaccaccaaagagucucuugucaucauaucgccaaguguggcugauuuagauccauacgacaagucccuucauucgagaguuuuuccuggugggaaguguuugggaauaacgaucucuucuaccuacugcuccaccaaccaugauuacacuaucuggaugcccgaagaagcuagacucgggacaucuugugacauuuuuaccaacaguagagggaaaagagcaucuaaggggggcagaacuugcggauuuguggaugaaaggggcuuauauaagucucuaaagggggcauguaagcucaaacugugcggaguuccuggacuuagacuuauggauggaacauggguuucaauucaggcaucagaugagaccaaguggugcuccccugaucaacuggugaauguacaugauuuucacucagaugagauagaacaucuagucguagaggaguuggucaaaaggagggaagaaugucuggaugcacuggaguccauugugaccaccaaaucaauaaguuucaggcgucuuagccaccugagaaaacuuguuccgggguucggaaaggcauauacuauauucaacaaaaccuugauggaggcugacgcccacuacaaaucaguucggacuuggaacgagaucauacccucaaaagggugcuugagcgucggagggaggugucauccucaugugaacggaguguuuuucaaugguauaauucuggguccggacgggaacguauugaucccggagaugcaaucgucccuacuucaacagcauauggagcuguuagagucuucuguaaucccccuaaugcaucccuuggcagacccaucaacagucuuuaaggacggugaugaggcagaggacuuuguugagguucaccuuccagacguucaagaacaggucucaggggucgaccucggucucccaaacugggggaaguacgugcugaugagugcaggcgcucuggcaauucuuauacugacaaucuucuuaauaacauguuguagaagggcuaauaaaacaaaaucaacacaacaaggucuuggggggucgggaaggaaaguaucggucucuccccaaaacgggaaagucauaucuucaugggagucuuauaagaauggaggcgaaaccaggcuguga

SEQ ID NO: 63639 - RNA, 1575 nt, Artificial Sequence
  derived and/or modified CDS sequence (wt) from glycoprotein__RABV__KJ174664.1
augaucccucaggcuauucugucagugccucuucugauuuccucgcuguguuuugggaaauuccccaucuacacgauaccagaaaaacuuggcccuuggagucccauugauauacaucaucucagcugcccuaacaaucuaguuguggaggacgagggaugcaccacuuugucaggguuuucuuacauagaacugaaggugggauacauuucugccauaaaagugaacggauucaccuguaccggugucgugacagaagcugagacuuacaccaacuuuguugguuaugucaccaccacauucaagagaaaacacuuccgcccgaugccagaugcaugcagagccgcuuacaacuggaagauugcaggcgauccuagauaugaagagucucuucacaacccuuauccugauuaccauuggcuacggaccguaaaaaccaccaaagagucucuugucaucauaucgccaaguguggcugauuuagauccauacgacaagucccuucauucgagaguuuuuccuggugggaaguguuugggaauaacgaucucuucuaccuacugcuccaccaaccaugauuacacuaucuggaugcccgaagaagcuagacucgggacaucuugugacauuuuuaccaacaguagagggaaaagagcaucuaaggggggcagaacuugcggauuuguggaugaaaggggcuuauauaagucucuaaagggggcauguaagcucaaacugugcggaguuccuggacuuagacuuauggauggaacuuggguuucaauucaggcaucagaugagaccaaguggugcuccccugaucaacuggugaauguacaugauuuucacucagaugagauagaacaucuagucguagaggaguuggucaaaaggagggaagaaugucuggaugcacuggaguccauugugaccaccaaaucaguaaguuucaggcgucuuagccaccugagaaaacuuguuccgggguucggaaaggcauauacuauauucaacaaaaccuugauggaggcugacgcccacuacaaaucaguucggacuuggaacgagaucauacccucaaaagggugcuugagcgucggagggaggugucauccucaugugaacggaguguuuuucaaugguauaauucuggguccggacgggaacguauugaucccugagaugcaaucgucccuacuucaacagcauauggagcuguuagagucuucuguaaucccccuaaugcaucccuuagcagacccaucaacagucuuuaaggacggugaugaggcagaggacuuuguugagguucaccuuccagacguucaagaacaggucucaggggucgaccucggucucccaaacugggggaaguacaugcugaugagugcaggugcucuggcaauucuuauacugacaaucuucuuaauaacauguuguagaagggcuaauaaaacaaaaucaacacaacaaggucuuggggggucgggaaggaaaguaucggucucuccccaaaacgggaaagucaucucuucaugggagucuuauaagaauggaggcgaaaccaggcuguga

SEQ ID NO: 63640 - RNA, 1575 nt, Artificial Sequence
  derived and/or modified CDS sequence (wt) from glycoprotein__RABV__KJ174665.1
augaucccucaggcuauucugucagugccucuucugauuuccucgcuguguuuugggaaauuccccaucuacacgauaccagaaaaacuuggcccuuggagucccauugauauacaucaucucagcugcccuaacaaccuaguuguggaggacgagggaugcaccacuuugucaggguuuucuuacauagaacugaaggugggauacauuucugccauaaaagugaacggauucaccuguaccggugucgugacagaagcugagacuuacaccaacuuuguugguuaugucaccaccacauucaagagaaaacacuuccgcccgaugccagaugcaugcagagccgcuuacaacuggaagauugcaggcgauccuagauaugaagagucucuucacaacccuuauccugauuaccauuggcuacggaccguaaaaaccaccaaagagucucuugucaucauaucgccaaguguggcugauuuagauccauacgacaagucccuucauucgagaguuuuuccuggugggaaguguuugggaauaacgaucucuucuaccuacugcuccaccaaccaugauuacacuaucuggaugcccgaagaagcuagacucgggacaucuugugacauuuuuaccaacaguagagggaaaagagcaucuaaggggggcagaacuugcggauuuguggaugaaaggggcuuauauaagucucuaaagggggcauguaagcucaaacugugcggaguuccuggacuuagacuuauggauggaacuuggguuucaauucaggcaucagaugagaccaaguggugcuccccugaucaacuggugaauguacaugauuuucacucagaugagauagaacaucuagucguagaggaguuggucaaaaggagggaagaaugucuggaugcacuggaguccauugugaccaccaaaucaauaaguuucaggcgucuuagccaccugagaaaacuuguuccgggguucggaaaggcauauacuauauucaacaaaaccuugauggaggcugacgcccacuacaaaucaguucggacuuggaacgagaucauacccucaaaagggugcuugagcgucggagggaggugucauccucaugugaacggaguguuuuucaaugguauaauucuggguccggacgggaacguauugaucccggagaugcaaucgucccuacuucaacagcauauggagcuguuagagucuucuguaaucccccuaaugcaucccuuggcagacccaucaacagucuuuaaggacggugaugaggcagaggacuuuguugagguucaccuuccagacguucaagaacaggucucaggggucgaccucggucucccaaacugggggaaguacgugcugaugagugcaggugcucuggcaauucuuauacugacaaucuucuuaauaacauguuguagaagggcuaauaaaauaaaaucaacacgacaaggucuuggggggucgggaaggaaaguaucggucucuccccaaaacgggaaagucauaucuucaugggagucuuauaagaauggaggcgaaaccaggcuguga

SEQ ID NO: 63641 - RNA, 1575 nt, Artificial Sequence
  derived and/or modified CDS sequence (wt) from glycoprotein__RABV__KJ174666.1
augaucccccaggcucuucuguuugugccucuccugauucccucgcugugucucgggaaguuccccaucuacacgauaccagauaagcuuggccccuggagcccgauagacauacaucaucucagcugucccaacaauuugguuguggaagacgaagggugcaccagucugucaggguucuccuauauggagcugaaggugggauacaucucagccauaaaggugaacggguucacuuguaccgguguugugacagaagccgagaccuacaccaacuuugucgguuaugucaccaccacauuuaagagaaaacacuuccgcccgaugccagaugccugcagagcugcacacgacuggaagauagccggcgauccuagauaugaagauucucuucaaaauccuuauccugauuaccauuggcuacggaccguaaagaccaccaaggagucucucguuauuauaucuccgaguguggcugaguuggaccccuacgacaaaucccuucauucaagaguuuuccccagugggaaguguuuggggauaacagucuccucuaccuacugcucaacuaaccacgauuacaccaucuggaugcccguagaagcaagacuugggacaucuugugauauuuucaccaauagcagagggaagaaagcaucuaaggggggcaggacuugcggauuuguagaugaaaggggcuuguacaagucucugaaaggagcaugcaaacucaagcuaugcggaguccccgggcuccggcugauggauggaaccugggucucaauccagacaucagaugauauuaaauggugcccuccugaucaauuggugaaucuacaugacuuucacucagaugaaauagaacaucucgucguagaggaauugaucaagaaaagggaaggauguuuagaugcacuggagucaauaaugaccacuaaaucagugagcuucagacgucucagccacuugagaaagcuuguuccuggguuugggaaggcauacaccauauucaauaauaccuuaauggaagcugaugcucauuacaagucaguucggacuuggaacgaagucauccccucaaaagguugccuaaaagucggagggaggugucaucccccugugaacggaguauucuucaaugguauaauuuuggguccagaugggaaaguucugaucccugagaugcaaucgucccugcuucaacaacauauggaacuguuggaguccucuguuaucccucugaugcaccccuuggcagacccaucaacagucuucaaagacggugaugaggcggaagacuuuguugagguucaucuuccggauguucacaaacaggucucggauguugaccuuggucuuccgaguugggggaaguaucuguugaugagcgcaggugcucuggcgacacugauucuggcgaucuucuuaauaacauguuguaggagggccaauaggacagaaucaacacagagaggucauagagagucaggagggaaaaugucaguagccccucaaaacgggaaaaucauauccucaugggaguuguacaaaagugaaagugagaccgggauguga

SEQ ID NO: 63642 - RNA, 1575 nt, Artificial Sequence
  derived and/or modified CDS sequence (wt) from glycoprotein__RABV__KJ174667.1
augauauuucaggcucuucuauuugugccucuccuaauuucuucguugugucuugggaaauuccccaucuacacgauaccagacaagcucgguccuuggagccccaucgacauacaucaccucagcuguccaaacaauuugguuguggaagacgaggggugcaccagccugucaggguuuucuuacauggaacuaaaggugggauacaucucugccauaaaggugaacggguuuaccuguaccgguguugugacagaagcugagaccuauacuaacuuuguugguuaugucaccaccacauucaagaggaaacauuuucgcccuauaccagaugcauguagggcugcauacaacuggaagauagcuggugaucccagauacgaggagucucuucaaaauccuuauccugauuaucauuggcuacggacaguaaagaccaccaaggagucucuuaucaucauaucuccaaguguggcugauuuggacccauaugacaaaucccuucauucuagguuguucccuggugggaaguguuugggaauaacaauuucuucuaccuacugcuccaccaaccaugauuacacuaucuggaugccugaagaaccaagacucggaacaucuugugacauuuuuacuaauagcaaagggaaaaaggcaucuaaggggggcaagguuugcggauuuguggaugaaaggggcuuguauaagucucuaaagggagcauguaaacucaagcugugcggaguuuccggacuuagacuuauggauggaaccuggguuacaauucagacgucagaugagaccaaauggugcccuccagaucaauugguaaaucuacaugacuuucacucagaugaaauagagcaucucgucguggaggaauugguuaagaagagggaggaguguuuggaugcauuagaguccaucaugaccaccaaaucuguaaguuuuagacgucuaagcuauuugagaaaacuuguccccggguuuggaaaggcauauacuauauucaacaagacuuugauggaagcugacgcccacuacaagucaguucggacuuggaacgagaucauccccucaaaaggauguuugaaagucagugauaggugucauccucauguggacggaguguucuucaauggcauaauucuggguccugacgggaaugucuugauaccugaaaugcaaucgucccuacuucaacaacauauggagcuguuggaguccucuguaauccccuugaugcaucccuuggcagacccaucaacaguauuuaaggauggagacgaagcggaggacuuuguugaaguucaccucccggauguucacaaacagaucucagggguugaccucggucucccuaguugggggaaguaucuccucaugauugcagguggucuagcgacacuaguucugauaaucuucuugauggcauguuguagaagaaccaagagaacagaaccaagacggcgaggcucuggggaaucaggagagaagguauuggcaacuccccaacccaagaaagucguaucuucaugggaguuguacaagagagaaggcgaugccaggcuguga

SEQ ID NO: 63643 - RNA, 1575 nt, Artificial Sequence
  derived and/or modified CDS sequence (wt) from glycoprotein__RABV__KJ174668.1
augaucuuucaggcucuucuauuugugccucuccuaauuucuucguugugucuugggaaauuccccaucuacacgauaccagacaagaucgguccuuggagccccaucgacauacaucaccucagcuguccaaacaauuugguuguggaggacgaggggugcaccagccugucaggguuuucuuacauggaacuaaaagugggauacaucucugccauaaaggugaacggguuuaccuguacagguguugugacagaagcugagaccuauacuaacuuuguugguuaugucaccaccacauucaagaggaaacauuuucgcccuauaccagaugcauguagggcugcauacaacuggaagauagcuggugaucccagauacgaggagucucuucaaaauccuuauccugauuaucauuggcuacggacaguaaagaccaccaaggagucucuuaucaucauaucuccaaguguggcugauuuggacccauaugacaaaucccuucauucuagguuguucccuggugggaaguguuugggaauaacaauuucuucuaccuacugcuccaccaaccaugauuacacuaucuggaugccugaagaaccaagacucgggacaucuugugacauuuuuacuaauagcaaagggaaaaaggcaucuaaggggggcaagguuugcggauuuguggaugaaaggggcuuguauaagucucuaaagggagcauguaaacucaagcugugcggaguuuccggacuuagacuuauggauggaaccuggguuacaauucagacgucagaugagaccaaauggugcccuccagaucaauugguaaaucuacaugacuuucacucagaugaaauagagcaucucgucguggaggaauugguuaagaagagggaggaguguuuggaugcauuagaguccaucaugaccaccaaaucuguaaguuucagacgucuaagcuauuugagaaaacuuguccccggguuuggaaaggcauauacuaucuucaacaagacuuugauggaagcugacgcccacuacaagucaguucggacuuggaaugagaucauccccucaaaaggauguuugaaagucagugauaggugucauccucauguggacggaguguucuucaacggcauaauucuggguccugacgggaaugucuugauaccugaaaugcaaucgucccuacuucaacaacauauggagcuguuggaguccucuguaauccccuugaugcaucccuuggcagacccaucaacaguauucaaggauggagacgaagcggaggacuuuguugaaguucaccucccagauguucacaaacagaucucagggguugaccucggucucccuaguugggggaaguaucuccucaugauugcagguggucuagcgacacuaguucugauaauuuucuugauggcauguuguagaagaaccaagagaacagaaucaagacggcgaggcucuggggaaucaggagagaagguauuggcaacuccccaacccaagaaagucgugucuucaugggaguuguacaagagagaaggcgaugccaggcuguga

SEQ ID NO: 63644 - RNA, 1575 nt, Artificial Sequence
  derived and/or modified CDS sequence (wt) from glycoprotein__RABV__KJ174669.1
augaucuuucaggcucuucuauuuguaccucuccuaauuucuucguugugucuuggaaaauuccccaucuacacgauaccagacaagaucgguccuuggagccccaucgacauacaucaccucagcuguccaaacaauuugguuguggaggacgaggggugcaccagccugucaggguuuucuuacauggaacuaaaggugggauacaucucugccauaaaggugaacggguuuaccuguaccgguguugugacagaagcugagaccuauacuaacuuuguugguuaugucaccaccacauucaagaggaaacauuuucgcccuauaccagaugcauguagggcugcauacaacuggaagauagcuggugaucccagauacgaggagucucuucaaaauccuuauccugauuaucauuggcuacggacaguaaagaccaccaaggagucucuuaucaucauaucuccaaguguggcugauuuggacccauaugacaaaucccuucauucuagguuguucccuggugggaaguguuugggaauaacaauuucuucuaccuacugcuccaccaaccaugauuacacuaucuggaugccugaagaaccaagacucgggacaucuugugacauuuuuacuaauagcaaagggaaaaaggcaucuaaggggggcaagguuugcggauuuguggaugaaaggggcuuguauaagucucuaaagggagcauguaaacucaagcugugcggaguuuccggacuuagacuuauggauggaaccuggguuacaauucagacgucagaugagaccaaauggugcccuccagaucaauugguaaaucuacaugacuuucacucagaugaaauagagcaucucgucguggaggaauugguuaagaagagggaggaguguuuggaugcauuagaguccaucaugaccaccaaaucuguaaguuucagacgucuaagcuauuugagaaaacuuguccccggguuuggaaaggcauauacuauauucaacaagacuuugauggaagcugacgcccacuacaagucaguucggacuuggaaugagaucauccccucaaaaggauguuugaaagucagugauaggugucauccucauguggacggaguguucuucaauggcauaauucuggguccugacgggaaugucuugauaccugaaaugcaaucgucccuacuucaacaacauauggagcuguuggaguccucuguaauccccuugaugcaucccuuggcagacccaucaacaguauucaaggauggagacgaagcggaggacuuuguugaaguccaccucccagauguucacaaacagaucucagggguugaccucggucucccuaguugggggaaguaucuccucaugauugcagguggucuagcgacacuaguucugauaauuuucuugauggcauguuguagaagaaccaagagagcagaaucaagacggcgaggcucuggggaaucaggagagaagguauuggcaacuccccaacccaagaaagucgugucuucaugggaguuguacaagagagaaggcgaugccaggcuguga

SEQ ID NO: 63645 - RNA, 1575 nt, Artificial Sequence
  derived and/or modified CDS sequence (wt) from glycoprotein__RABV__KJ174670.1
augaucuuucaggcucuucuauuugugccucuccuaauuucuucguugugucuugggaaauuccccaucuacacgauaccagacaagaucgguccuuggagccccaucgacauacaucaccucagcuguccaaacaauuugguuguggaggacgaggggugcaccagccugucaggguuuucuuacauggaacuaaaggugggauacaucucugccauaaaggugaacggguuuaccuguaccgguguugugacagaagcugagaccuauacuaacuuuguugguuaugucaccaccacauucaagaggaaacauuuucgcccuauaccagaugcauguagggcugcauacaacuggaagauagcuggugaucccagauacgaggagucucuucaaaauccuuauccugauuaucauuggcuacggacaguaaagaccaccaaggagucucuuaucaucauaucuccaaguguggcugauuuggacccauaugacaaaucccuucauucuagguuguucccuggugggaaguguuugggaauaacaauuucuucuaccuacugcuccaccaaccaugauuacacuaucuggaugccugaagaaccaagacucgggacaucuugugacauuuuuacuaauagcaaagggaaaaaggcaucuaagggggguaagguuugcggauuuguggaugaaaggggcuuguauaagucucuaaagggagcauguaaacucaagcugugcggaguuuccggacuuagacuuauggauggaaccuggguuacaauucagacgucagaugagaccaaauggugcccuccagaucaauugguaaaucuacaugacuuucacucagaugaaauagagcaucucgucguggaggaauugguuaagaagagggaggaguguuuggaugcauuagaguccaucaugaccaccaaaucuguaaguuucagacgucuaagcuauuugagaaaacuuguccccggguuuggaaaggcauauacuauauucaacaagacuuugauggaagcugacgcccacuacaagucaguucggacuuggaaugagaucauccccucaaaaggauguuugaaagucagugauaggugucauccucauguggacggaguguucuucaauggcauaauucuggguccugacgggaaugucuugauaccugaaaugcaaucgucccuacuucaacaacauauggagcuguuggaguccucuguaauccccuugaugcaucccuuggcagacccaucaacaguauucaaggauggagacgaagcggaggacuuuguugaaguucaccucccagauguucacaaacagaucucagggguugaccucggucucccuaguugggggaaguaucuccucaugauugcagguggucuagcgacacuaguucugauaauuuucuugauggcauguuguagaagaaccaagagaacagaaucaagacggcgaggcucuggggaaucaggagagaagguauuggcaacuccccaacccaagaaagucgugucuucaugggaguuguacaagagagaaggcgaugccaggcuguga

SEQ ID NO: 63646 - RNA, 1575 nt, Artificial Sequence
  derived and/or modified CDS sequence (wt) from glycoprotein__RABV__KJ174671.1
augaucuuucaggcucuucuauuugugccucuccuaauuucuucguugugucuugggaaauuccccaucuacacgauaccagacaagcucggucccuggagccccaucgacauacaucaccucagcuguccaaacaauuugguuguggaggacgaggggugcaccagccugucaggguuuucuuacauggaacuaaaggugggauacaucucugcuauaaaggugaacggguuuacuuguaccgguguugugacagaagcugagaccuauacuaacuuuguugguuaugucaccaccacauucaagaggaaacauuuucgcccuauaccagaugcauguagggcugcauacaacuggaagauagcuggugaucccagauacgaggagucucuucaaaauccuuauccugauuaucauuggcuacggacagugaagaccaccaaggagucucuuaucaucauaucuccaaguguggcugauuuggacccauaugacaaaucccuucauucuagguuguucccuggugggaaguguuugggaauaacaauuucuucuaccuacugcuccaccaaccaugauuacacuaucuggaugccugaagaaccaagacucgggacaucuugugacauuuuuacuaauagcaaagggaaaaaggcaucuaaggggggcaagguuugcggauuuguggaugaaaggggcuuguauaagucucuaaagggagcauguaaacucaagcugugcggaguuuccggacuuagacuuauggauggaacuuggguuacaauucagacgucagaugagaucaaauggugcccuccagaucaauugguaaaucuacaugacuuucacucagaugaaauagagcaucucgucguggaggaauugguuaagaagagggaggaguguuuggaugcauuagaguccaucaugaccaccaaaucuguaaguuucagacgucuaagcuauuugagaaaacuuguccccggguuuggaaaggcauauacuauauucaacaagacuuugauggaagcugacgcccacuacaagucaguucggacuuggaaugagaucauccccucaaaaggauguuugaaagucagugauaggugucauccucauguagacggaguguucuucaauggcauaauucuggguccugacgggaaugucuugauaccugaaaugcaaucgucccuacuucaacaacauauggagcuguuggaguccucuguaauccccuugaugcaucccuuggcagacccaucaacaguauucaaggauggagacgaagcggaggacuuuguugaaguucaccucccggauguucacaaacaaaucucagggguugaccucggucucccuaguugggggaaguaucuccucaugauugcagguggucuagcgacacuaguucugauaaucuucuugauggcauguuguagaagaaccaagagaacagaaucaagacggcgaggcucuggggaaucaggagagaagguauuggcaacuccccaacccaagaaagucguaucuucaugggaguuguacaagagagaaggcgaugccaggcuguga

SEQ ID NO: 63647 - RNA, 1575 nt, Artificial Sequence
  derived and/or modified CDS sequence (wt) from glycoprotein__RABV__KJ174672.1
augaucuuucaggcucuucuauuugugccucuccuaauuucuucguugugucuugggaaauuccccaucuacacgauaccagacaagcucgguccuuggagccccaucgacauacaucaccucagcuguccaaacaauuugguuguggaggacgaggggugcaccagccugucaggguuuucuuacauggaacuaaaggugggguacaucucugccauaaaggugaacggguuuaccuguaccgguguugugacagaagcugagaccuauacuaacuuuguugguuaugucaccaccacauucaagaggaaacauuuucgcccuauaccagaugcauguagggcugcauacaacuggaagacagcuggugaucccagauacgaggagucucuucaaaauccuuauccugauuaucauuggcuacggacagugaagaccaccaaagagucucuuaucaucauaucuccaaguguggcugauuuggacccauaugacaaaucccuucauucuagguuguucccuggugggaaguguuugggaauaacaauuucuucuaccuacugcuccaccaaccaugauuacacuaucuggaugccugaagaaccaagacucgggacaucuugugacauuuuuacuaauagcaaagggaaaaaggcaucuaaggggggcaagguuugcggauuuguagaugaaaggggcuuguauaagucucuaaagggagcauguaaacucaagcugugcggaguuuccggacuuagacuuauggauggaacuuggguuacaauucagacgucagaugagaccaaauggugcccuccagaucaauugguaaaucuacaugacuuucacucagaugaaauagagcaucucgucguggaggaauugguuaagaagagggaggaguguuuggaugcauuagaguccaucaugaccaccaaaucuguaaguuucagacgucuaagcuauuugagaaaacuuguccccggguuuggaaaggcauauacuauauucaacaagacuuugauggaagcugacgcccacuacaagucaguucggacuuggaaugagaucauccccucaaaaggauguuugaaagucagugauaggugucauccucauguagacggaguguuuuucaauggcauaauucuggguccugacgggaaugucuugauaccugaaaugcaaucgucccuacuucaacaacauauggagcuguuggaguccucuguaauccccuugaugcaucccuuggcagacccaucaacaguauucaaggauggagacgaagcggaggacuuuguugaaguucaccucccggauguucacaaacagaucucagggguugaccucggucucccuaguugggggaaguaucuccucaugauugcagguggucuagcgacacuaguucugauaaucuucuugauggcauguuguagaagaaccaagagaacagaaucaagacggcgaggcucuggggaaucaggagagaagguauuggcaacuccccaacccaagaaagucguaucuucaugggaguuguacaagagagaaggcgaugccaggcuguga

SEQ ID NO: 63648 - RNA, 1575 nt, Artificial Sequence
  derived and/or modified CDS sequence (wt) from glycoprotein__RABV__KJ174673.1
augaucuuucaggcucuucuauuugugccucuccuaauuucuucguugugucuugggaaauuccccaucuacacgauaccagacaagcucgguccuuggagccccaucgacauacaucaccucagcuguccaaacaauuugguuguggaggacgaggggugcaccagccugucaggguuuucuuacauggaacuaaagguaggauacaucucugccauaaaggugaacggguuuaccuguaccgguguugugacagaagcugagaccuauacuaacuuuguugguuaugucaccaccacauucaagaggaaacauuuucgcccuauaccagaugcauguagggcugcauacaacuggaagauagcuggugaucccagauacgaggagucucuucaaaauccuuauccugauuaucauuggcuacggacaguaaagaccaccaaggagucucuuaucaucauaucuccaaguguggcugauuuggacccauaugacaaaucccuucauucuagguuguucccuggugggaaguguuugggaauaacaauuucuucuaccuacugcuccaccaaccaugauuacacuaucuggaugccugaagaaccaagacucggaacaucuugugacauuuuuacuaauagcaaagggaaaaaggcaucuaaggggggcaagguuugcggauuuguggaugaaaggggcuuguauaagucucuaaagggagcauguaaacucaagcugugcggaguuuccggacucagacuuauggauggaaccuggguuacaauucagacgucagaugagaccaaauggugcccuccagaucaauugguaaaucuacaugacuuucacucagaugaaauagagcaucucgucguggaggaauugguuaagaagagggaggaguguuuggaugcauuagaguccaucaugaccaccaaaucuguaaguuuuagacgucuaagcuauuugagaaaacuuguccccggguuuggaaaggcauauacuauauucaacaagacuuugauggaagcugacgcccacuacaagucaguucggacuuggaacgagaucauccccucaaaaggauguuugaaagucagugauaggugucauccucauguggacggaguguucuucaauggcauaauucuggguccugacgggaaugucuugauaccugaaaugcaaucgucccuacuucaacaacauauggagcuguuggaguccucuguaauccccuugaugcaucccuuggcagacccaucaacaguguucaaggauggagacgaagcggaggacuuuguugaaguucaccucccggauguucacaaacagaucucagggguugaccucggucucccuaguugggggaaguaucuccucaugauugcagguggucuagcgacacuaguucugauaaucuucuugauggcauguuguagaagaaccaagagaacagaaccaagacggcgaggcucuggggaaucaggagagaagguauuggcaacuccccaacccaagaaagucguaucuucaugggaguuguacaagagagaaggcgaugccaggcuguga

SEQ ID NO: 63649 - RNA, 1575 nt, Artificial Sequence
  derived and/or modified CDS sequence (wt) from glycoprotein__RABV__KJ174674.1
augaucuuucaggcucuucuauuugugccucuccuaauuucuucguugugucuugggaaauuccccaucuacccgauaccagacaagcucgguccuuggagccccaucgacauacaucaccucagcuguccaaacaauuugguuggggaggacgaggggugcaucagccugucaggguuuucuuacauggaacuaaaggugggauacaucucugccauaaaggugaacggguuuaccuguaccgguguugugacagaagcugagaccuauacuaacuuuguugguuaugucaccaccacauucaagaggaaacauuuucgcccuauaccagaugcauguagggcugcauacaacuggaagauagcuggugaucccagauacgaggagucucuucaaaauccuuauccugauuaucauuggcuacggacaguaaagaccaccaaggagucucuuaucaucauaucuccaaguguggcugauuuggacccauaugacaaaucccuucauucuagguuguucccuggugggaaguguuugggaauaacaauuucuucuaccuacugcuccaccaaccaugauuacacuaucuggaugccugaagaaccaagacucgggacaucuugugacauuuuuacuaauagcaaagggaaaaaggcaucuaaggggggcaagguuugcggauuuguggaugaaaggggcuuguauaagucucuaaaaggagcauguaaacucaagcugugcggaguuuccggacuuagacuuauggauggaaccuggguuacaauucagacgucagaugagaccaaauggugcccuccagaucaauugguaaaucuacaugacuuucacucagaugaaauagagcaucucgucguggaggaauugguuaagaagagggaggaguguuuggaugcauuagaguccaucaugaccaccaaaucuguaaguuucagacgucuaagcuauuugagaaagcuuguccccggguuuggaaaggcauauacuauauucaacaagacuuugauggaagcugacgcccacuacaagucaguucggacuuggaaugagaucauccccucaaaaggauguuugaaagucagugauaggugucauccucauguggacggaguguucuucaauggcauaauucuggguccugacgggaaugucuugauaccugaaaugcaaucgucucuacuucaacaacauauggagcuguuggaguccucuguaauccccuugaugcaucccuuggcagacccaucaacaguauucaaggauggagacgaagcggaggacuuuguugaaguucaccucccggauguucacaaacagaucucagggguugaccucggccucccuaguugggggaaguaucuccucaugauugcagguggucuagcgacacuaguucugauaaucuucuugauggcauguuguagaagaaccaagagaacagaaucgagacggcgaggcucuggggaaucaggagagaagguauuggcaacuccccaacccaagaaagucguaucuucaugggaguuguacaagagagaaggcgaugccaggcuguga

SEQ ID NO: 63650 - RNA, 1575 nt, Artificial Sequence
  derived and/or modified CDS sequence (wt) from glycoprotein__RABV__KJ174675.1
augaucccucaggcucuucuguaugugccucuccugauccccucguuguguuucgggggauuccccaucuacacgauaccagacaagcucggccccuggagucccauugacauacaucaucucagcugccccaacaauuugguuguggaggacgaggggugcaccagucugucaggguuuucuuacauggaacugaaggugggguacaucucugccauaaaggugaacggguucacuuguacuggugucgugacagaagccgagaccuacaccaacuuuguugguuaugucaccaccacauucaagagaaaacacuuccgcccuaugccagaugcaugcagagcugcauacaauuggaagauggccggugauccuagauaugaagaaucucuucaaaauccuuauccugacuauaguuggcuacgaaccguaaagaccaccaaagagucucuuauuaucauaucuccaaguguagcggauuuggacccauacgacaaaucccuucauucaagaguuuucccuggugggaaguguuugggaauaacaaucucuucuaccuacugcucaacuaaccaugauuacaccaucuggaugccugaagaggcaagacucgggacaucuugugacauuuuuaccaacagcagagggaagagagcauccaaggggggcaagaccugcggauucguggacgaaaggggcuuguacaagucucuaaaaggagcauguaaacucaagcugugcggaguccccggacucagacuuauggauggaaccugggucacaauucagacaucagaugaaaccaaauggugcccuucugaucaauuggugaaucuacaugacuuucacucagacgagauagaacaucuugucguggaggaguuggucaagaagagggaagaaugucuagaugcacuggaguccaucaugaccaccaaauccguaagcuucagacgucuuagccacuugagaaaacuuguuccuggguuuggaaaggcauauacuauauucaacaagaccuuaauggaagcugaugcucauuacaagucaauucggaccuggaacgagaucauccccucaaaagggugccuaaaagucggagggaggugucauccucauguggacggaguguucuucaaugguauaauucuggguccugacgggaauguccugaucccugagaugcaaucgucccuacuucaacaacauguggaguuguuggaguccucuguaaucccucuaaugcaucccuuggcagacccaucaacagucuuuaaggacggugaugaagcggaggacuuuguugagguucaccuuccggauguucacaaacaggucucaggggucgaccuuggucucccaaacuggggaaaguaucugcuaaugagugcaggugcucuggcaacacuaaugcugacaaucuucuuaaugacauauugcagaagagcuaaucgagcagaaucgauacaacgagaucccggggagucaggaaggaaaguaucgauaacuucccaagacgggaaagucauaucuucaugggaguuguacaagaguggaggcgaggcuaggcuguga

SEQ ID NO: 63651 - RNA, 1575 nt, Artificial Sequence
  derived and/or modified CDS sequence (wt) from glycoprotein__RABV__KJ174676.1
augaucccucaggcucuucuauuugugccucuccugauuuccucguuguguuucgggagauuccccaucuacacgauaccagacaagcucggccccuggagucccauugacauacaucaucucagcuguccuaacaauuugguuguggaggacgaggggugcaccagucugucaggguuuucuuacauggaacugaaggugggauacauuucugccauaaaagugaacggguucacuuguaccggugucgugacagaggccgagaccuacaccaacuuuguugguuaugucaccaccacauucaagagaaaacacuuucgcccgaugccagaugcaugcagaacugcauacaacuggaagauagccggugauccuagauaugaagagucucuucaaaauccuuauccugauuacaauuggcuacggaccguaaagaccaccaaagagucccuuauugucauaucuccaaguguagcggauuuggacccauacgacaaaucccuucauucaagaguuuucccuggugggaaguguuugggaauaacaaucucuucuacuuacugcucaacuaaccaugauuacaccaucuggaugccugaagaagcaagacucgggacaucuugugacauuuuuaccaacagcagagggaagagagcauccaaggggggcaagaccugcggauucguggacgagaggggccuguauaagucucuaaaaggagcaugcaaacuuaagcugugcggaguucccggacuuagacuuauggauggaaccugggucacaauucagacaucagaugaaaccaaauggugcccuucugaucaauugguaaaucuacaugacuuucacucagaugagauagaacaucucgucguggaggaguuggucaagaagagggaagaaugucuggaugcacuggaguccaucaugaccaccaaaucuguaagcuucagacgucuuagccacuugagaaaacuuguuccuggguuuggaaaggcauauacuauauucaacaagaccuuaauggaagcugaugcucacuauaaaucaauucggacuuggaacgaggucauccccucaaaagggugccuaaaagucggagggaggugucauccucauguggacggaguguuuuucaaugguaucauucuggguccggacgggaauguccugauccccgagaugcaaucgucccuacuucaacaacauguggagcuguuggaguccucuguaaucccucuaaugcaucccuuggcagacccaucaacagucuucaaggacggugaugaagcggaggacuuuguugagguucacuuuccggauauucacaaacaggucucagggguugaccuuggucucccaaacugggggaaguaucugcugaugagugcaggugcucuagcagcacuaaugcuggcaaucuucuuaaugacauguugcagaagaguuaaucgaacagaaucaauacaacgaggucccggggagucaggaaggaaaguaucgauaacuucccaaaacgggaaagucauaucuucgugggaguuguacaaaaguggaggcgagaccgggcuguga

SEQ ID NO: 63652 - RNA, 1575 nt, Artificial Sequence
  derived and/or modified CDS sequence (wt) from glycoprotein__RABV__KJ174677.1
augaucccucaggcucuucucuuugugccucuccugauuuccucguuguguuucgggggauuccccaucuacacgauaccugacaagcuuggaccuuggagucccaucgacauacaucaucucagcuguccuaacaauuuggucguggaagacgaggggugcaccagucugucgggguuuucuuacauggaacugaaggugggauacaucuccgccauaaaagugaacggguucacuuguaccggugucgugacagaagccgaaaccuacaccaacuuuguugguuaugucaccaccacauucaagagaaaacacuuucgcccgaugccggauucaugcagagcugcauacaacuggaagacggccggugauccucgauaugaagagucucuucaaaauccuuauccagauuaccauuggcuacggaccguaaagaccaccaaagagucucucauuaucauaucucccaguguagcggauuuggacccauacgacaaaucccuucauucaagaguuuucccuggugggaaguguuugggaauaacagucucuucuaccuacuguucaacuaaccaugauuacacuaucuggaugccugaagaagcaagacucgggacaucuugugauauuuuuaccaacagcagagggaagagagcauccaaggggggcaggacuugcggauucguggacgaaagggguuuguauaagucucuaaaaggggcauguaagcuuaagcugugcggaguucucggacuuagacuuauggauggaaccugggucacaauucauacuucaaaugaaaccaaauggugcccuucugaucaauugguaaaucuacaugacuuucacucagaugagauagaacaucuugucguggaggaguuggucaagaagagggaagaaugucuggaugcacuagaguccaucaugaccacuaaauccguaagcuucagacgucucagccacuugagaaaacuuguuccuggguuuggaaaggcauauacuauauucaacaagaccuuaauggaagcugaugcucacuacaagucaauucggacuuggaacgagaucauccccucaaaagggugccuaaaagucggagggaggugucauccucauguggacggaguguuuuucaaugguauaauucuagguccggacgggaauguuuugaucccugagaugcaaucgucccuacuucaacaacauguggagcuguuggagucuucuguaaucccucuaaugcaucccuuggcagacccaucaacagucuucaaggacggugaugaagcggaggacuuuguugagguucaccuuccagauguucacaaacaagucucagggguugaccuuggucucccaaacugggggaaguaucugcugaugagugcagguguucuggcuacacuaaugcugacgaucuucuuaauaacauguugcagaagagucgauagaacagaaucaauacaacgaggucccggagaguuaggaagggaagugucggugacuucccaaaacgggaaagucguaucuucaugggaguuguacaagaguggaggcgagaccaggcuguga

SEQ ID NO: 63653 - RNA, 1575 nt, Artificial Sequence
  derived and/or modified CDS sequence (wt) from glycoprotein__RABV__KJ174678.1
augaucccucaggcucuucucuuugugccucuccugauuuccucguuguguuucgggggauuccccaucuacacgauaccugacaagcucggacccuggagucccaucgacauacaucaucucagcuguccuaacaauuuggucguggaagacgaggggugcaccagucugucgggguuuucuuacauggaacugaaggugggauacaucuccgccauaaaggugaacggguucacuuguaccggugucgugacagaagccgaaaccuacacaaacuuuguugguuaugucaccaccacauucaagagaaaacacuuucgcccgaugccggaugcaugcagagcugcauacaacuggaagacggccggugauccucgauaugaagagucucuucaaaauccuuauccagauuaccauuggcuacggaccguaaagaccaccaaagagucucucauuaucauaucucccaguguagcggauuuggacccauacgacaaaucccuucauucaagaguuuucccuggugggaaguguuugggaauaacagucucuucuaccuacuguucaacuaaccaugauuacacuaucuggaugccugacgaagcaagacucgggacaucuugugauauuuuuaccaacagcagagggaagagagcauccaaggggggcaggacuugcggauucguggacgaaagggguuuguauaagucucuaaaaggggcauguaaacuuaagcugugcggaguucucggacuuagacuuauggauggaaccugggucacaauucagacuucaaaugaaaccaaauggugcccuucugaucaauugguaaaucuacaugacuuucacucagaugagauagaacaucuuguaguggaggaguuggucaagaagagggaagaaugucuggaugcacuagaguccaucaugaccacuaaauccguaagcuucagacgucucagccacuugagaaaacuuguuccuggguuuggaaaggcauauacuauauucaacaagaccuuaauggaagcugaugcucacuacaagucaauucggacuuggaacgagaucauccccucaaaagggugccuaaaagucggagggaggugucauccucauauggacggaguguuuuucaaugguauaauucuagguccggacgggaauguuuugaucccugagaugcaaucgucccuacuucaacaacauguggagcuguuggaguccucuguaaucccucuaaugcaucccuuggcagacccaucaacagucuucaaggacggugaugaagcggaggacuuuguugagguucaccuuccagauguucacaaacaagucucagggguugaccuuggucucccaaacugggggaaguaucugcugaugagugcaggugcucuggcuacacuaaugcugaugaucuucuuaauaacauguugcagaagagucgauagaacagaaucaauacaacgaggucccggggaguuaggaagggaagugucggugacuucccaaaacgggaaagucauaucuucaugggaguuguacaagaguggaggcgagaccaggcuguga

SEQ ID NO: 63654 - RNA, 1575 nt, Artificial Sequence
  derived and/or modified CDS sequence (wt) from glycoprotein__RABV__KJ174679.1
augaucccucaggcucuuuucuuugugccucuccugauuuccucguugugugucgggggauuccccaucuacacgauaccugacaagcuuggaccuuggagucccaucgacauacaucaucucagcuguccuaacaauuuggucguggaagacgaggggugcaccagucugucgggguuuucuuacauggaacugaaggugggauacaucuccgccauaaaagugaacggguucacuuguaccggugucgugacagaagccgaaaccuacaccaacuuuguugguuaugucaccaccacauucaagagaaaacacuuucgcccgaugccggauucaugcagagcugcauacaacuggaagacggccggugauccucgauaugaagagucucuucaaaauccuuauccagauuaccauuggcuacggaccguaaagaccaccaaagagucucucauuaucauaucucccaguguagcggauuuggacccauacgacaaaucccuucauucaagaguuuucccuggugggaaguguuugggaauaacagucucuucuaccuacuguucaacuaaccaugauuacacuaucuggaugccugaagaagcaagacucgggacaucuugugauauuuuuaccaacagcagagggaagagagcauccaaggggggcaggacuugcggauucguggacgaaagggguuuguauaagucucuaaaaggggcauguaaacuuaagcugugcggaguucucggacuuagacuuauggauggaaccugggucacaauucauacuucaaaugaaaccaaauggugcccuucugaucaauugguaaaucuacaugacuuucacucagaugagauagaacaucuugucguggaggaguuggucaagaagagggaagaaugucuggaugcacuagaguccaucaugaccacuaaauccguaagcuucagacgucucagccacuugagaaaacuuguuccuggguuuggaaaggcauauacuauauucaacaagaccuuaauggaagcugaugcucacuacaagucaauucggacuuggaacgagaucauccccucaaaggggugccuaaaagucggagggaggugucauccucauguggacggaguguuuuucaaugguauaauucuagguccggacgggaauguuuugaucccugagaugcaaucgucccuacuucaacaacauguggagcuguuggagucuucuguaaucccucuaaugcaucccuuggcagacccaucaacagucuucaaggacggugaugaagcggaggacuuuguugagguucaccuuccagauguucacaaacaagucucagggguugaccuuggucucccaaacugggggaaguaucugcugaugagugcagguguucuggcuacacuaaugcugacgaucuucuuaauaacauguugcagaagagucgauagaacagaaucaauacaacgaggucccggagaguuaggaagggaagugucggugacuucccaaaacgggaaagucauaucuucaugggaguuguacaagaguggaggcgagaccaggcuguga

SEQ ID NO: 63655 - RNA, 1575 nt, Artificial Sequence
  derived and/or modified CDS sequence (wt) from glycoprotein__RABV__KJ174680.1
augaucccucaggcucuucucuuugugccucuccugauuuccucguuguguuucgggggauuccccaucuacacgauaccugacaagcucggacccuggagucccaucgacauacaucaucucagcuguccuaacaauuuggucguggaagacgaggggugcaccagucugucgggguuuucuuacauggaacugaaggugggauacaucuccgccauaaaagugaacggguucacuuguaccggugucgugacagaagccgaaaccuacacaaacuuuguugguuaugucaccaccacauucaagagaaaacacuuucgcccgaugccggaugcaugcagagcugcauacaacuggaagacggccggugauccucgauaugaagagucucuucaaaauccuuauccagauuaccauuggcuacggaccguaaagaccaccaaagagucucucauuaucauaucucccaguguagcggauuuggacccauacgacaaaucccuucauucaagaguuuucccuggugggaaguguuugggaauaacagucucuucuaccuacuguucaacuaaccaugauuacacuaucuggaugccugaagaagcaagacucgggacaucuugugauauuuuuaccaacagcagagggaagagagcauccaagggggguaggacuugcggauucguggacgaaagggguuuguauaagucucuaaagggggcauguaaacuuaagcugugcggaguucucggacuuagacuuauggauggaaccugggucacaauucagacuucaaaugaaaccaaauggugcccuucugaucaauugguaaaucuacaugacuuucacucagaugagauagaacaucucguaguggaggaguuggucaagaagagggaagaaugucuggaugcacuagaguccaucaugaccacuaaauccguaagcuuccgacgucucagccacuugagaaaacuuguuccuggguuuggaaaggcauauacuauauucaacaagaccuuaauggaagcugaugcucacuacaagucaauucggacuuggaacgagaucauccccucaaaagggugccuaaaagucggagggaggugucauccucauguggacggaguguuuuucaaugguauaauucuagguccggacgggaauguuuugaucccugagaugcaaucgucccuacuucaacaacauguggagcuguuggaguccucuguaaucccucuaaugcaucccuuggcagacccaucaacagucuucaaggacggugaugaagcggaggacuuuguugagguucaccuuccagauguucacaaacaagucucagggguugaccuuggucucccaaacugggggaaguaucugcugaugagugcaggugcucuggcuacauuaaugcugaugaucuucuuaauaacauguugcagaagagucgauagaacagaaucaauacaacgaggucccggggaguuaggaagggaagugucggugacuucccaaaacgggaaagucauaucuucaugggaguuguacaagaguggaggcgagaccaggcuguga

SEQ ID NO: 63656 - RNA, 1575 nt, Artificial Sequence
  derived and/or modified CDS sequence (wt) from glycoprotein__RABV__KJ174681.1
augaucccucaggcucuccucuuugugccucuccugauuuccucguuguguuucgggggauuccccaucuacacgauaccugacaagcuuggaccuuggagucccaucgacauacaucaucucagcuguccuaacaauuuggucguggaagacgaggggugcaccagucugucgggguucucuuacauggaacugaaggugggauacaucuccgccauaaaagugaacggguucacuuguaccggugucgugacagaagccgaaaccuacaccaacuuuguugguuaugucaccaccacauucaagagaaaacacuuucgcccgaugccggauucaugcagagcugcauacaacuggaagacggccggugauccucgauaugaagagucucuucaaaauccuuauccagauuaccauuggcuacggaccguaaagaccaccaaagagucucucauuaucauaucucccaguguagcggauuuggacccauacgauaaaucccuucauucaagagucuucccuggcgggaaguguuugggaauaacagucucuucuaccuacuguucaacuaaccaugauuacacaaucuggaugccugaagaagcaagacucgggacaucuugugauauuuuuaccaacagcagagggaagagagcauccaaggggggcaggacuugcggauucguggacgaaagggguuuguauaagucucuaaaaggggcauguaaacuuaagcugugcggaguucucggacuuagacuuauggauggaaccugggucacaauucauacuucaaaugaaaccaaauggugccccucugaucaauugguaaaucuacaugacuuucacucagaugagauagaacaucuugucguggaagaguuggucaagaagagggaagaaugucuggaugcacuagaguccaucaugaccacuaaauccguaagcuucagacgucucagccacuugagaaaacuuguuccuggguuuggaaaggcauauacuauauucaacaagaccuuaauggaagcugaugcucacuacaagucaauucggacuuggaacgaaaucauccccucaaaagggugccuaaaagucggagggaggugucauccucauguggacggaguguuuuucaaugguauaauucuagguccggaugggaauguuuugaucccugagaugcaaucgucccuacuucaacaacauguggagcuguuagagucuucuguaaucccucuaaugcaucccuuggcagacccaucaacagucuucaaggacggugaugaagcggaggacuuuguugagguucaccuuccagauguucacaaacaagucucagggguugaccuuggucucccaaacugggggaaguaucugcuggugagugcagguguucuggcuacacuaaugcugacgaucuucuuaauaacauguugcagaagagucgauagaacagaaucaauacaacgaggucccggggaguuaggaaggaaagugucggugacuucccaaaacgggaaagucauaucuucaugggaguuguacaagaguggaggcgagaccaggcuguga

SEQ ID NO: 63657 - RNA, 1575 nt, Artificial Sequence
  derived and/or modified CDS sequence (wt) from glycoprotein__RABV__KJ174682.1
augaucgcucaggcucuucuguuugugccucuucugauuuccccuuuguguuucgggaaauuccccaucuacacgauaccagacaagcucggccccuggagucccaucgacauacaucaccucagcuguccuaacaauuugguuguggaggacgaggaguguaccagucugucaggguuuucuuauauggaacugaaggugggauacaucucugccauaaaagugaacggguucacuuguaccgguguugugacagaagcugaaaccuacaccaacuuuguggguuaugucaccaccacguuuaagagaaaacacuuucgcccgacgccagaugcaugcagagcugcauacaacuggaagauggccggugaucccagauaugaagagucucuucacaauccuuauccugauuaccauuggcuacggacuguaaagaccaccaaagagucucuuauuaucauaucucccaguguggcugauuuggacccauacgacaaaucccuucauucaagaguuuucccuggugggaaauguuugggaauaacaaucucuuccaccuacugcucaacuaaccaugauuacacuaucuggaugcccgaagaagcaagacucgggacgucuugugauauuuuugccaacagcagagggaagagagcaucuaaggggggcaggacuugcggauucguggaugaaaggggccuguacaagucucuaaaaggagcaugcaaacuuaagcugugcggaguucccggacuuagacuuauggacggaaccugggucacaauucagacaucaaaugagaccaaauggugcccuccugaucgauuggugaaucuacaugacuuucacucagaugagauagaacaucucgucguggaggaguuggucaagaagagagaagaaugucuggaugcacuggaguccaucaugaccaccaaauccguaagcuucagacgucucagcuacuugagaaaacuuguuccuggguuuggaaaggcauauacuauauucaacaagaccuugauggaagcugaugcucacuacaagucaguucggacuuggaacgagaucauccccucgaaagggugccuaaaagucggagggaggugucauccucauguggacggaguguuuuucaaugguauaauucuugguccggacgggaauguccugauccccgagaugcaaucgucccuacuucaacagcauauggagcuguuggaguccucuguaaucccccuaaugcaucccuuggcagacccaucaacagucuucaaggacggugaugaggcggaggacuuuguugagguucaccuuccggauauucauaaacaggucucagggguugaccuuggucucccagacugggggaaguaucugcugaugagugcaggugcucuggcaacacuaaugcugacaaucuucuuaaugacauguugcagaagggcuaauagaacagaaucaauacaacgagguccaggggagucaggaaggaaagugucaguaacuccccaaaacgggaaagucauaucuucaugggaguuguacaagaguggaggggagaccaagcuguga

SEQ ID NO: 63658 - RNA, 1575 nt, Artificial Sequence
  derived and/or modified CDS sequence (wt) from glycoprotein__RABV__KJ174683.1
augaucgcucaggcucuucuguuugugccucuucugauuuccccuuuguguuuagggaaauuccccaucuacacgauaccagacaagcucggccccuggagucccaucgacauacaucaccucagcuguccuaacaauuugguuguggaggacgaggaguguaccagucugucaggguuuucuuauauggaacugaaggugggauacaucucugccauaaaagugaacggguucacuuguaccgguguugugacagaagcugaaaccuacaccaacuuuguggguuaugucaccaccacguuuaagagaaaacacuuucgcccgacgccagaugcaugcagagcugcauacaacuggaagauggccggugaucccagauaugaagagucucuucacaauccuuauccugauuaccauuggcuacggacuguaaagaccaccaaagagucucuuauuaucauaucucccaguguggcugauuuggacccauacgacaaaucccuucauucaagaguuuucccuggugggaaauguuugggaauaacaaucucuuccaccuacugcucaacuaaccaugauuacacuaucuggaugcccgaagaagcaagacucgggacgucuugugauauuuuugccaacagcagagggaagagagcaucuaaggggggcaggacuugcggauucguggaugaaaggggccuguacaagucucuaaaaggagcaugcaaacuuaagcugugcggaguucccggacuuagacuuauggacggaaccugggucacaauucagacaucaaaugagaccaaauggugcccuccugaucgauuggugaaucuacaugacuuucacucagaugagauagaacaucucgucguggaggaguuggucaagaagagagaagaaugucuggaugcacuggaguccaucaugaccaccaaauccguaagcuucagacgucucagcuacuugagaaaacuuguuccuggguuuggaaaggcauauacuauauucaacaagaccuugauggaagcugaugcucacuacaagucaguucggacuuggaacgagaucauccccucgaaagggugccuaaaagucggagggaggugucauccucauguggacggaguguuuuucaaugguauaauucuugguccggacgggaauguccugauccccgagaugcaaucgucccuacuucaacagcauauggagcuguuggaguccucuguaaucccccuaaugcaucccuuggcagacccaucaacagucuucaaggacggugaugaggcagaggacuuuguugagguucaccuuccggauauucauaaacaggucucagggguugaccuuggucucccagacugggggaaguaucugcugaugagugcaggugcucuggcaacacuaaugcugacaaucuucuuaaugacauguugcagaagggcuaauagaacagaaucaauacaacgagguccaggggagucaggaaggaaagugucaguaacuccccaaaacgggaaagucauaucuucaugggaguuguacaagaguggaggggagaccaagcuguga

SEQ ID NO: 63659 - RNA, 1575 nt, Artificial Sequence
  derived and/or modified CDS sequence (wt) from glycoprotein__RABV__KJ466147.1
augauuccucaagcucuguuguuuguaccucuucugguuuuuccauuguguuucgggaaauuccccauuuacacgauaccagacaaacucggccccuggagucccaucgauauacaucaccucagcuguccgaacaaucugguuguggaggacgaaggauguaccaaucugucaggauucucauacauggagcuuaaaguaggauauauuucggccauaaaggugaacggguucacuuguacgggugugguaacggaagcagaaaccuacacuaacuuugucgguuaugucaccaccacguuuaagagaaagcacuuccgaccaacaccggaugcaugcagaucagcauacaauuggaagauggcaggugaccccagauaugaagagucucugcacaaucccuauccugauuaucauuggcuccggacuguaaaaaccaccaaagagucuguuguuaucauaucuccaaguguggcagacuuagacccguacgaugaaucacuucauucgagaguuuuuccuagaggaaaaugcucaggaauaacggugucuucugccuacugcucuaccaaccaugauuauaccaucuggaugccugaaaauccuagacuggggaccucuugugauauuuucaccaacagcagagggaagagagcauccaaagggagcaagaccuguggauuuguggaugagagaggcuuguacaaaucucuaaaaggagcaugcaaacugaagcuguguggaguucuuggacuuaggcuuauggacggaaccugggucgcgauucagacaucaaacgagaccaaguggugcccuccugaucaacuagugaaucuacaugacuuucauucagaugagauugaacaucuuguuguggaggaguugguuaagaagagggaggagugucuagaugcacuggaguccaucaugaccaccaaguccgugaguuucagacgucucagucacuugaggaagcuugugccuggauuuggaaaagcauacaccauauucaacaagaccuuaauggaggcugaugcucacuacaaaucgguccaaacuuggaaugagaucauccccucgaaaggguguuuaagagucggggggagaugucauccucaugugaacggaguauuuuucaaugguaucauccuaggcccugacggccaugucuuaaucccggaaaugcagucaucccuccuccagcagcauauggaguuguugaaauccucggucauccccuuaaugcaucccuuggcagauccaucaacgguuuuuaaagauggugacgagguggaggauuuuguugagguucaccuucaggaugugcauaagcaggucucagggguugaucucggucucccaaacugggggaaggauguguugaugggcgcaggcguuuugacggcacugauguugaugauuuuccuaaugacguguugccgaaggacuaauagagcagaaucaauacaacacagucuuggagagacagggaggaaagugucggugaccccccaaagcgggagggucauaucuucaugggagucauauaaaagcggaggugagaccaagcuguaa

SEQ ID NO: 63660 - RNA, 1575 nt, Artificial Sequence
  derived and/or modified CDS sequence (wt) from glycoprotein__RABV__KJ476819.1
augguuccucaggcucuccugcucguaccucuucugguuuuuucaauguguuucgggaaauuccccaucuacacgauaccagacaaacuugguccuuggagcccaauugacauacaucaucucagcuguccaaacaacuugguuguagaggaugaaggaugcaccaacuugucaggauuuuccuacauggaacuuaaagugggacacauuucggccauaaaagugaacggguucacgugcacaggaguggugacagaggcagaaacuuauacuaacuuuguugguuaugucaccacuacguucaaaagaaagcauuuccgcccgacaccggaugcaugucgagccgcuuacaacuggaaaauggccggugaccccagauaugaagaaucucugcacaauccuuacccugacuaccacuggcuucgaacugucaaaaccacgaaggaaucccuagucaucauauccccaaguguagcggaccuggacccauacgauaaaucccuucacucuagagucuuuccuaacggaaagugcucaggaauaacgauauccucuaccuacugcccuaccaaccaugauuacacuaucuggcucccugagaauccaagacuggggacaucuugugacaucuuuaccaauaguagagggaagagagcauccaaagggagcaagacuugcggguuuguugaugaaagagguuuguauaagucauugaaaggggcaugcaaacuuaaguugugugggguccuuggacuuagacuuauggauggaacgugggucgcaaugcaagcgucggacgagaccaaauggugccccccagaucagcugguaaaucuacacgacuuucgcucggacgagaucgaacaucucguuguggaggaguuggucaagaagagagaagagugucuggaugcacuagaguccaucaugacuacuaagucagugaguuucagacgucucagccacuugagaaagcuugucccuggguucggaaaagcauacaccauauucaacaaaaccuugauggaagcugaugcucacuacaagucaguccgaaccuggaaugagaucauccccucaaaaggguguuugagagucggggggaggugucauccucauguaaacgggguguuuuucaacgguauaauccuggguccugauggccauguucuaaucccagagaugcaaucgucccuccuucagcaacauauggaguuguuggaauccucaguuaucccccugaugcacccuuuagcagacccgucuacaguuuucaaggauggugaugaagcagagaauuuuguggagguucaccuuccggauguacacaaacagaucucgggaguugaccugggucucccuaacugggggaaguauguuuuaguaagugcagggguccugaucgccuugauguugauaauuuuucuaaugacauguugcggaagagucaaucgaccaaaguccacacaacacaaucuuggcgggacagggagggaggugucagugacuccccaaagcggaaagguuauaucuucaugggagucauacaaaagcggaggugagaccagacuguga

SEQ ID NO: 63661 - RNA, 1575 nt, Artificial Sequence
  derived and/or modified CDS sequence (wt) from glycoprotein__RABV__KJ476820.1
augguuccucaggcucuccuguuuguaccucuucugguuuuuucaauguguuucgggaaauuccccaucuacacgauaccagacaaacuugguccuuggagcccaauugacauacaucaucucagcuguccaaacaacuugguuguagaggaugaaggaugcaccaacuugucagguuuuuccuacauggaacuuaaagugggauacauuucggccauaaaagugaacggguucacgugcacagguguggugacagaggcagaaacuuauacuaacuuuguugguuaugucaccacuacguucaaaagaaagcauuuccgcccgacaccggaugcaugucggaccgcuuacaacuggaaaauggccggugaccccagauaugaagaaucucugcacaauccuuacccugacuaccacuggcuucgaacugucaaaaccacgaaggaaucccuagucaucauauccccaaguguagcggaccuggacccauacgauaaaucccuucacucuagagucuuuccuaacggaaagugcucaggaauaacgauauccucuaccuacugcccuaccaaccaugauuacacuaucuggcucccugagaauccaagacuggggacaucuugugacaucuuuaccaauaguagagggaagagagcauccaaagggagcaagacuugcggguuuguugaugaaagagguuuguauaagucauugaaaggggcaugcaaacuuaaguugugugggguccuuggacuuagacuuauggauggaacgugggucgcaaugcaagcgucggacgagaccaaauggugccccccagaucagcugguaaaucuacacgacuuucgcucggacgagaucgaacaucucguuguggaggaguuggucaagaagagagaagagugucuggaugcacuagaguccaucaugacuacuaagucagugaguuucagacgucucagccacuugagaaagcuugucccuggguucggaaaagcauacaccauauucaacaaaaccuugauggaagcugaugcucacuacaagucaguccgaaccuggaaugagaucauccccucaaaaggguguuugagagucggggggaggugucauccucauguaaacgggguguuuuucaacgguauaauccuggguccugauggccauguucuaaucccagagaugcaaucgucccuccuucagcaacauauggaguuguuggaauccucaguuaucccccugaugcacccuuuagcagacccgucuacaguuuucaaggauggugaugaagcagagaauuuuguggagguucaccuuccugauguacacaaacagaucucgggaguugaccugggucucccuaacugggggaaguauguuuuaguaagugcagggguccugaucgccuugauguugauaauuuuucuaaugacauguugcggaagagucaaucgaccaaaguccacacaacacaaucuuggcgggacagggagggaggugucaguaacuccccaaagcggaaaggugauaucuucaugggagucauacaaaagcggaggugagaccagacuguga

SEQ ID NO: 63662 - RNA, 1575 nt, Artificial Sequence
  derived and/or modified CDS sequence (wt) from glycoprotein__RABV__KJ564280.1
augguuccucaggcucuccuguuuguuccccuucuaguuuucucgucguguuuugggaaauuccccauuuacacgauaccagacaaacuugguccauggagucccaucgauauacaucaucucagcuguccgaacaaucugguuguggaagaugaaggaugcaccaauuugucuggauuuuccuacauggaacucaaggugggauauauuucagccauaaaagugaacggauucaccuguacagguguggugaccgaagcagaaaccuacacuaacuuuguugguuaugucaccaccacguuuaagagaaagcacuuucgcccuaugccggaugcgugcagagccgcauacaacuggaagauggcuggugaccccagguaugaagagucucugcacaauccguaccccgacuaccacuggcuccgaacugucaagaccaccaaggagucccuugucaucauaucuccgagcguugcagauuuggacccguacgauaaaucccuucacucgagaguuuuuccuggcggaaaaugcucaggaauaaccguguccuccacuugcugcucuacuaaccacgacuacaccaucuggaugccugaaaauccuagacugggaacuucaugugacauuuucaccaauaguagagggaagagggcaucaaaagggggcaagacuuguggauuuguggaugaaagaggcuuguacaagucucuaaagggagcaugcaagcugaagcuaugugggguucuaggacuuagacuuauggauggaacaugggucgcgauucagacaucagaugagaucaaauggugcucuccugaucagcuaguaaaucuacacgacuuucacucggaugagauugaacaucuuguuguggaggaguuggucaaaaagagggaagagugucuggacgcacuggagacuauuaugaccacaaaguccgugaguuucagacgucuuagucauuugaggaagcuagucccuggguuuggaaaggcguauaccauauucaacaaaaccuugauggaggcugaugcucacuacaaaucaauccggacuuggaaugaaaccauccccuccaaaggguguuuaagaguugggggaagaugucauccucaugugaacgggguguucuucaacggcauuauacuggguccugacggacauguucuaaucccagagaugcagucgucccuccuccaccagcauauggaauuguuggaguccucagucaucccuuugaugcaucccuuagcagacccgucaacagucuuuaaagacggcgacgaggcagaggacuuuguugagguucaccuuccggaugugcacaagcagaucucggggguugaucuuggucucccaaacugggggaaguaugugcugauaagugcaggugcuuugacugcauuaauguugacgauuuucuuaaugacguguugcagaaagacuaauagagcagggucaauacaacacaguccuggagagacagggaggaaagugucggugacuucucacaacggaagggucauaucuucaugggaaucauauaagagcgggggugagaccggacuguga

SEQ ID NO: 63663 - RNA, 1575 nt, Artificial Sequence
  derived and/or modified CDS sequence (wt) from glycoprotein__RABV__KM016899.1
augguuccucuaguuccuuuguuuguaccccuucugguuuuuccauuguguucugggaaauucccuauuuacacgauaccagacaaacuggguccuuggagcccgauugacauacaucaucuuagcugcccaaacaauuugguuguggaggacgaaggaugcgccaaccugucaggguucucauacauggaacuuaaaguuggauauaucucagccauaaaagugaacggguuuacuugcacgggcguugugacagaggcagaaacuuacacuaacuuuguugguuaugucaccaccacguucagaagaaagcauuuccguccaacaccagaugcauguagagccgcguacaacuggaagauggccggugaccccagauaugaggagucccuacacaauccguacccugacuaccauuggcuucgaacuguaaaaaccaccaaggagucucucguuaucauauccccaaguguggcagauuuggacccauaugacaaaucccuucacucgagggucuucccuaguggaaaguguucagggauaacagugucuucuaccuauugcucaacuaaccacgauuacacuauuuggaugcccgagaaucugagacuagggacaucuugugacauuuuuaccaauaguagaggaaagagagcauccaaagggaguaagaccugcggcuuuguagaugagagaggccuguauaagucucuaaaaggagcaugcaaacucaaguuauguggaguucuuggacuuagacuuauggauggaacaugggucgcgaugcaaacaucaggugagaccaaauggugcccuccugaucaguuggugaaucugcacgacuuucgcucugaugaaauugagcaucuuguuguagaggaguuggucaagaaaagagaggagugucuggaugcacuagaguccaucaugaccaccaagucagugaguuucagacgucucagucauuugagaaaacuuguucccggguuuggaaaagcauauaccauauucaacaagaccuugauggaggcugaugcucacuacaagucaguccggacuuggaaugagaucauccccucaaaagguuguuuaagagucggagggaggugucauccucaugugaacgggguguuuuucaauggcauaauauuagggccugauggccauguucuaaucccagagaugcaaucaucccuccuccagcaacauauggagcuguuggaauccucaguuauuccccugaugcacccccuggcagacccaucuacaguuuuuaaggacggugaugaggcagaggauuuuguugagguucaccuuccagaugugcacaaacaggucucaggaguugaccugggccucccaaacugggggaaguauauauuacugagugcaggggcccugauugccuugauguugaugaucuuucuaaugacguguuguagaaaauucaaucgaccagaaucuacgcagcgcagucucggagggacagggaggaaggugucaaucacaucccaaggcgggaagguuauaucuucgugggagucauauaagagugggggugagacuagacuguga

SEQ ID NO: 63664 - RNA, 1575 nt, Artificial Sequence
  derived and/or modified CDS sequence (wt) from glycoprotein__RABV__KM093868.1
augauuccucaaguucuuuuguuuguuccccuucuaguuuuuucgucguguuuugggaaauuccccauuuacacgauaccagacaaacuugguccauggagucccaucgauauacaucaucucagcuguccgaacaaucugguuguggaagaugaaggaugcaccaauuugucuggauuuuccuacauggaacucaaagugggauauauuucagccauaaaagugaacggauucaccuguacagguguggugaccgaagcagaaaccuacacuaacuuuguugguuaugucaccaccacguuuaagagaaagcacuuucgcccuaugccggaugcgugcagagccgcauacaacuggaagauggcuggugaccccagguaugaagagucucugcacaauccguaccccgacuaccacuggcuccgaacugucaagaccaccaaggagucccuugucaucauaucuccgagcguugcagauuuggacccguacgauaaaucccuucacucgagaguuuuuccuggcggaaaaugcucaggaauaaccguguccuccacuugcugcucuacuaaccacgacuacaccaucuggaugccugaaaauccuagacugggaacuucaugugacauuuucaccaauaguagagggaagagggcaucaaaagggggcaagacuuguggauuuguggaugaaagaggcuuguacaagucucuaaagggagcaugcaagcugaagcuaugugggguucuaggacuuagacuuauggacggaacaugggucgcgauucagacaucagaugagaucaaauggugcccuccugaucagcuaguaaaucuacacgacuuucacucggaugagauugaacaucuuguuguggaggaguuggucaaaaagagggaagagugucuggacgcacuggagacuauuaugaccacaaaguccgugaguuucagacgucuuagucauuugaggaagcuagucccuggguuuggaaaggcguauaccauauucaacaaaaccuugauggaggcugaugcccacuacaaaucaauccggacuuggaaugaaaucauccccuccaaaggguguuuaagaguuggggggagaugucauccucaugugaacgggguguucuucaacggcauuauacuggguccugacggacauguucuaaucccagagaugcagucgucccuccuccaccagcauauggaauuguuggaguccucagucaucccuuugaugcaucccuuagcagacccgucaacagucuuuaaagacggcgacgaggcagaggacuuuguugagguucaccuuccggaugugcacaagcagaucucggggguugaucuuggucucccaaacugggggaaguaugugcugauaagugcaggugcuuugacugcauuaauguugacgauuuucuuaaugacguguugcagaaagacuaauagagcagggucaauacaacacaguccuggagagacagggaggaaagugucggugacuucucacaacggaagggucauaucuucaugggaaucauauaaaagcggaagugagaccaagcuguga

SEQ ID NO: 63665 - RNA, 1575 nt, Artificial Sequence
  derived and/or modified CDS sequence (wt) from glycoprotein__RABV__KM278992.1
augguuccucaaguucuuuuguuuguaccccuucugguuuucucaauguguuucgggaaauucccuaucuauacgauaccagacaaacuuggucccuggagcccgauugacauacaucaucucagcuguccaaacaaccugguuguggaggaugaaggaugcacuaacuugucggguuucuccuacauggaacuuaaggugggauacauaucggccauaaaaguaaacggguucacgugcacagguguggugacagaggcagagacuuacacuaacuuugucgguuauguuaccaccacguucaaaagaaagcauuuccgcccaacaccagaugccugucgagcugcuuacaacuggaagauggccggugaccccagauaugaggaaucgcugcacaacccguacccugacuaccacuggcuucgaaccguuaaaaccacaaaagagucccucgucaucauaucuccaaguguaacggaccuggacccauacgacaaaucccuucauucgagggucuuuccuagcgggaagugcuuggggauaacaauaucauccacuuacugcucuacuaaccaugauuacacaaucuggaugcccgagaauccgagacuggggacaucuugugacaucuuuaccaacaguagagggaagagagcauccaaagggggcaaaacuugcggauuuguugaugaaagaggcuuguauaaguccuugaaaggggcuugcaaacucaagcuguguggaguucuuggccuuagacuuauggauggaacguggguugcgaugcaagcaucggacgaaaccaagugguguccuccugaucaguugguaaaucuacacgacuuucgcucggacgagaucgaacaucuuguuguggaggaguuggucaagaagagagaggagugucuggaugcacuagaguccaucaugacuaccaagucggugaguuucagacgucucagccacuugagaaaacuugucccuggguucggaaaagcauacaccauauucaacaaaaccuugauggaagcagaugcccauuacaagucaguccgaaccuggaaugaaaucauccccuccaaaggguguuuaagaguuggagggaggugucauccucacgugaaagggguguucuuuaacgguauaauacuggguccugacggccauguucuaaucccagagaugcaaucaucccuccuucagcagcauauggaguuguuggaauccucaguuaucccccugaugcaccccuuagcagacccaucuacaguuuucaaggacggugaugaagcagaggauuuuguugagguccaccuucccgacgugcacaaacaaguuucagguguugaccugggucuccccagcuggggaaaguauguucuggugagugcaggggucuugguuguccugauguugacaauuuucauaauaacauguugcggaagaguccaucgacccaagucuacacaacacagucucgggggaacggggaggaaggugucggucacuucccaaagcgggaaggucauaucuucaugggagucauauaagagugggggugagaccagacuguaa

SEQ ID NO: 63666 - RNA, 1575 nt, Artificial Sequence
  derived and/or modified CDS sequence (wt) from glycoprotein__RABV__KM278993.1
augguuccucaaguucuuuuguuuguaccccuucugguuuucucaauguguuucgggaaauucccuaucuauacgauaccagacaaacuuggucccuggagcccgauugacauacaucaucucagcuguccaaacaaccugguuguggaggaugaaggaugcacuaacuugucggguuucuccuacauggaacuuaaggugggauacauaucggccauaaaaguaaacggguucacgugcacagguguggugacagaggcagagacuuacacuaacuuugucgguuauguuaccaccacguucaaaagaaagcauuuccgcccaacaccagaugccugucgagcugcuuacaacuggaagauggccggugaccccagauaugaggaaucgcugcacaacccguacccugacuaccacuggcuucgaaccguuaaaaccacaaaagagucccucgucaucauaucuccaaguguaacggaccuggacccauacgacaaaucccuucauucgagggucuuuccuagcgggaagugcuuggggauaacaauaucauccacuuacugcucuacuaaccaugauuacacaaucuggaugcccgagaauccgagacuggggacaucuugugacaucuuuaccaacaguagagggaagagagcauccaaagggggcaaaacuugcggauuuguugaugaaagaggcuuguauaaguccuugaaaggggcuugcaaacucaagcuguguggaguucuuggccuuagacuuauggauggaacguggguugcaaugcaagcaucggacgaaaccaagugguguccuccugaucaguugguaaaucuacacgacuuucgcucggacgagaucgaacaucuuguuguggaggaguuggucaagaagagagaggagugucuggaugcacuagaguccaucaugacuaccaagucggugaguuucagacgucucagccacuugagaaaacuugucccuggguucggaaaagcauacaccauauucaacaaaaccuugauggaagcagaugcccauuacaagucaguccgaaccuggaaugaaaucauccccuccaaaggguguuuaagaguuggagggaggugucauccucacgugaaagggguguucuuuaacgguauaauacuggguccugacggccauguucuaaucccagagaugcaaucaucccuccuucagcagcauauggaguuguuggaauccucaguuaucccccugaugcaccccuuagcagacccaucuacaguuuucaaggacggugaugaagcagaggauuuuguugagguccaccuucccgacgugcacaaacaaguuucagguguugaccugggucuccccagcuggggaaaguauguucuggugagugcaggggucuugguuguccugauguugacaauuuucauaauaacauguugcggaagaguccaucgacccaagucuacacaacacagucucgggggaacggggaggaaggugucggucacuucccaaagcgggaaggucauaucuucaugggagucauauaagagugggggugagaccagacuguaa

SEQ ID NO: 63667 - RNA, 1575 nt, Artificial Sequence
  derived and/or modified CDS sequence (wt) from glycoprotein__RABV__KM408747.1
augguuccucagguucuuuuguuuguaccccuucugguuuucucaauguguuucgggaaauuuccuaucuauacgauaccagacaaacuuggucccuggagcccgauugacauacaucaucucagcuguccaaacaaccugguuguggaggaugaaggaugcacuaacuugucggguuucucuuacauggaacuuaaggugggauacaucucggccauaaaaguaaacggguucacuugcacagguguggugacagaggcagagacuuacacuaacuuugucgguuauguuaccaccacguucaaaagaaagcauuuucgcccaacaccagaugcaugucgagcugcuuacaacuggaagauggccggugaccccagauaugaagaaucgcugcacaauccguacccugacuaccacuggcuucgaaccguuaaaaccacaaaggagucccucgucaucauauccccaaguguagcggaccuggacccauacgacaaaucccuucauucgagggucuuuccuagcgggaagugcucgggaauaacaauaucaucuacuuacugcucuacuaaccaugauuacacaaucuggaugcccgagaauccgagacuggggacaucuugugacaucuuuaccaacaguagagggaagagagcauccaaagggggcaaaacuugcggauuuguugaugaaagaggcuuguauaagucuuugaagggggcaugcaaacucaaguuguguggaguucuuggccuuagacuuauggauggaacguggguugcgaugcaaacaucggacgaaaccaagugguguccuccugaucaguugguuaaucuacacgacuuucgcucggacgagaucgagcaucuuguuguggaggaguuggucaagaaaagagaggagugucuggaugcacuagaguccaucaugacuaccaagucggugaguuucagacgucucagccauuugagaaaacuugucccuggguucggaaaagcauacaccauauucaacaaaacccugauggaagcagaugcccauuacaagucaguccgaaccuggaaugaaaucauccccuccaaagggugucugagaguuggagggaggugucauccucacgugaaggggguguuuuuuaacgguauaauacuggguccugacggccauguucuaaucccagagaugcaaucaucccuccuucagcagcauauggaguuguuggaauccucaguuaucccccugaugcacccuuuagcagacccgucuacaguuuucaaggaaggugaugaagcagaggauuuuguugagguucaccuucccgacguacacaaacaaauuucagguguugaccugggucuccccagcuggggaaaguauguuuuggugagugcaggggucuugguuguccugauguugacaauuuucauaauaacauguugcggaagaauccaucgacccaaguuuacacaacacggucucggggggacagggaggaaggugucggucacuucccaaagugggaaggucauauccucaugggagucauauaagagugggggugagaccagacuguga

SEQ ID NO: 63668 - RNA, 1575 nt, Artificial Sequence
  derived and/or modified CDS sequence (wt) from glycoprotein__RABV__KM492745.1
augguuccucagguucuuuuguuugugccccuucugguuuucucaauguguuucgggaaauuuccuaucuauacgauaccagacaaacuuggucccuggagcccgauugacauacaucaucucagcuguccaaacaaccugguuguggaggaugaaggaugcacuaacuugucggguuucuccuacauggaacucaaggugggauacaucucggccauaaaaguaaacggguucacuugcacagguguggugacagaggcagagacuuacaccaacuuugucgguuauguuaccaccacguucaaaagaaagcauuuccgcccaacaccagaugcaugucgagcugcuuacaacuggaagauggccggugaccccagauaugaagaaucgcugcacaauccguacccugacuaccacuggcuucgaaccguuaaaaccacaaaggagucccucgucaucauauccccaaguguagcggaccuggacccauacgacaaaucccuucauucaagggucuuuccuagcgggaagugcucgggaauaacaauaucaucuacuuacugcucuacuaaccaugauuacacaaucuggaugcccgagaauccgagacuggggacaucuugugacaucuuuaccaacaguagagggaagagagcauccaaagggggcaaaacuugcggauuuguugaugaaagaggcuuguauaagucuuugaagggggcaugcaaacucaaguuguguggaguucuuggccuuagacuuauggauggaacguggguugcgaugcaaacaucggacgaaaccaagugguguccuccugaucaguugguaaaucuacacgacuuucgcucggacgagaucgaacaucuuguuguggaggaguuagucaagaaaagagaggagugucuggaugcacuagaguccaucaugacuaccaagucggugaguuucagacgucucagccacuugagaaaacuugucccuggguucggaaaagcauacaccauauucaacaaaaccuugauggaagcagaugcccauuacaagucaguccgaaccuggaaugaaaucauccccuccaaaggguguuugagaguuggagggaggugucauccucacgugaaggggguguuuuuuaacgguauaauacuggguccugacggccauguucugaucccagagaugcaaucaucccuccuucagcagcauauggaguuguuggaauccucaguuauccccuugaugcacccuuuagcagacccgucuacaguuuucaaggacggugaugaagcagaggauuuuguugagguucaucuucccgacgugcacaaacaaauuucagguguugaucugggucuccccagcuggggaaaguauguuuuggugagugcaggggucuugguuguccugauguugacaacuuuuauaauaacauguugcggaagaauccgucgacccaagucuacacaacacggucucggggggacagggaggaaggugucggucacuucccaaagcgggaaggucauaucuucaugggagucauauaagagugggggugagaccagacuguga

SEQ ID NO: 63669 - RNA, 1575 nt, Artificial Sequence
  derived and/or modified CDS sequence (wt) from glycoprotein__RABV__KM492746.1
augguuccucagguucuuuuguuugugccccuucugguuuucucaauguguuucgggaaauucccuaucuauacgauaccagacaaacuuggucccuggagcccuauugacauacaucaucucagcuguccaaacaaccugguuguggaggaugaaggaugcacuaacuugucggguuucuccuacauggaacuuaaggugggauacaucucggccauaaaaguaaacggguucacuugcacagguguggugacagaggcagagacuuacaccaacuuugucgguuauguuaccaccacguucaaaagaaagcauuuccgcccaacaccagaugcaugucgagcugcuuacaacuggaagauggccggugaccccagauaugaagaaucgcugcacaauccguacccugacuaccacuggcuucgaaccguuaaaaccacaaaggagucccucgucaucauauccccaaguguagcagaccuggacccauacgacaaaucccuucauucaagggucuuuccuagcgggaagugcucgggaauaacaauuucaucuacuuacugcucuacuaaccaugauuacacaaucuggaugcccgagaauccgagacuggggacaucuugugacaucuuuaccaacaguagagggaagagagcauccaaagggggcaaaacuugcggauuuguugaugaaagaggcuuguauaagucuuugaagggggcaugcaaacucaaguuguguggaguucuuggccuuagacuuauggauggaacguggguugcgaugcaaacaucggacgaaaccaagugguguccuccugaucaguugguaaaucuacacgacuuucgcucggacgagaucgaacaucuuguuguggaggaguuggucaagaaaagagaggagugucuggaugcacuagaguccaucaugacuaccaagucggugaguuucagacgucucagccacuugagaaaacuugucccuggguucggaaaagcauacaccauauucaacaaaaccuugauggaagcagaugcccauuacaagucaguccgaaccuggaaugaaaucauccccuccaaaggguguuugagaguuggagggaggugucauccucacgugaaggggguguuuuuuaacgguauaauacuggguccugacggccauguucuaaucccagagaugcaaucaucccuccuucagcagcauauggaguuguuggaauccucagucaucccccugaugcacccuuuagcagacccgucuacaguuuucaaggacggugaugaagcagaggauuuuguugagguucaucuucccgaugugcacaaacaaauuucagguguugaccugggucuccccagcuggggaaaguauguuuuggugagugcaggggucuugguuguccugauguugacaauuuucauaauaacauguugcggaagaauccaucgacccaagucuacacaacacggucucggggggacagggaggaaggugucggucacuucccaaagcgggaaggucauaucuucaugggagucauauaagagugggggugagaccagacuguga

SEQ ID NO: 63670 - RNA, 1575 nt, Artificial Sequence
  derived and/or modified CDS sequence (wt) from glycoprotein__RABV__KM492747.1
augguuccucagguucuuuuguuuguaccccuucugguuuucucaauguguuucgggaaauucccuaucuauacgauaccagacaaacucggucccuggagcccgauugacauacaucaccucagcuguccaaacaaccugguuguggaagaugaaggaugcacuaacuugucgggguucuccuacauggaacuuaaggugggguacaucucggccauaaaaguaaacggguucacgugcacggguguggugacagaggcagagacuuacacuaacuuugucgguuauguuaccaccacguucaaaagaaagcauuuccgcccaacaccagaugcaugucgagcugcuuacaacuggaagauggccggugaccccagauaugaagagucgcugcacaauccguacccugacuaccacuggcuucgaaccguuaaaaccacaaaggagucccucgucaucauauccccaaguguagcggaccuggacccauacgacaaaucccuucacucgagggucuuuccuagcgggaagugcucgggaauaacaauaucaucuacuuacugcucuacuaaccaugauuacacaaucuggaugcccgagaauccgagacuggggacaucuugugacaucuuuaccaacaguagagggaagagagcauccaaagggggcaaaacuugcggauuuguagaugaaagaggcuuguauaagucuuugaaaggggcaugcaaacucaaauugugugguguucuuggccuuagacuuauggauggaacguggguugcgaugcaaacaucggacgaaaccaagugguguccuccugaucaguugguaaaucuacacgacuuucgcucggacgagaucgaacaucuuguuguggaggaguuggucaagaaaagagaggaaugucuggaugcacuagaguccaucaugacuaccaagucggugaguuucagacgucucagccacuugagaaagcuugucccuggguucggaaaagcauacaccauauuuaacaaaaccuugauggaagcagaugcccauuacaagucuguccgaaccuggaaugagauaauccccuccaaaggguguuugagaguuggggggaggugucauccucacgugaacgggguguuuuuuaacgguauaauacuggguccugacggccauguucuaaucccagagaugcaaucaucccuccuucagcagcauauggaguuguuggaauccucaguuaucccccugaugcacccuuuagcagacccgucuacaguuuucaaggacggugaugaagcagaggauuuuguugagguccaccuucccgaugugcacaaacaaauuucagguguugaccugggucuccccagcuggggaaaguauguuuuggugagugcaggagucuugguuguccugauguugacaauuuucauaaugacauguuguggaagaguccgucgacccaagucuacacaacacgguuucggagggacagggaggaaggugucggucacuucccaaagcgggaaggucauaucuucaugggagucauauaagagcgggggugagaccagacuguga

SEQ ID NO: 63671 - RNA, 1575 nt, Artificial Sequence
  derived and/or modified CDS sequence (wt) from glycoprotein__RABV__KM492748.1
augguuccucagguucuuuuguuggugccccuucugguuuucucaauguguuucgggaaauuuccuaucuauacgauaccagacaaacuuggucccuggagcccuauugacauacaucaucucagcuguccaaacaaccugguuguggaggaugaaggaugcacuaacuugucggguuucuccuacauggaacuuaaggugggauacaucucggccauaaaaguaaacggguucacuugcacagguguggugacagaggcagagacuuacaccaacuuuguugguuauguuaccaccacguucaaaagaaagcauuuccgcccuacaccagaugcaugucgagcugcuuacaacuggaagauggccggugaccccagauaugaagaaucgcugcacaauccguacccugacuaccacuggcuucgaaccguuaaaaccacaaaggagucccucgucaucauauccccaaguguagcggaccuggacccauacgacaaaucccuucauucgagggucuuuccuagcgggaagugcucgggaauaacaauaucaucuacuuacugcucuacuaaccaugauuacacaaucuggaugcccgagaauccgagacuggggacaucuugugacaucuuuaccaacaguagagggaagagagcauccaaagggggcaaaacuugcggauuuguugaugaaagaggcuuguauaagucuuugaaaggggcaugcaaacucaaauuguguggaguucuuggccuuagacuuauggauggaacguggguugcgaugcaaacaucggacgaaaccaagugguguccuccugaucaguugguaaaucuacacgacuuucgcucggacgagaucgaacaucuuguuguggaggaguuggucaagaaaagagaggaaugucuggaugcacuagaguccaucaugacuaccaagucggugaguuucagacgucucagccacuugagaaagcuugucccuggguucggaaaagcauacaccauauucaacaaaaccuugauggaagcagaugcccauuacaagucuguccgaaccuggaaugagaucauccccuccaaaggguguuugagaguuggggggaggugucauccucacgugaacgggguguuuuuuaacgguauaauacuggguccugacggccauguucuaaucccagagaugcaaucaucccuccuucagcagcauauggaguuguuggaauccucaguuaucccccugaugcacccuuuagcagacccgucuacaguuuucaaggacggugaugaagcagaggauuuuguugaaguucaucuucccgacgugcacaaacaaauuucagguguugaccugggucuccccagcuggggaaaguauguuuuggugagugcaggggucuugguuguccugauguugacaauuuucaugauaacauguugcggaagaauccaucgacccaagucuacacaacacggucucggggggacagggaggaaggugucggucacuucccaaagcgggaaggucauaucuucaugggagucauauaagagugggggugagaccagacuguga

SEQ ID NO: 63672 - RNA, 1575 nt, Artificial Sequence
  derived and/or modified CDS sequence (wt) from glycoprotein__RABV__KM492750.1
augguuccucagguucuuuuguuuguaccccuucugguuuucuccguguguuucgggaaauuuccuaucuauacgauaccagacaaacuuggucccuggagcccgauugacauacaucaucucaucuguccaaacaaccugguuguggaggaugaaggaugcacuaacuugacggguuucuccuacauggaacuuaagguaggauacaucucggccauaaaaguaaacggguucucuugcacagguguggugacagaggcauacacuuacccuaacuuugucgguuauguuaccuccacguucaaaagaaagcacuuccgcccaaccccagaugcaugucgagcugcuuacaacuggaagauggccggugaccccagauuugaagaaucgcugcacuauccguacccugacuaccacuggcuucgaaccguuaaaaccacuaaggagucccucgucaucauauccccaaguguagcggaccuggacccauacgacaaaucccuucauucgagggucuuuccuagcgggaagugcucgggaauaacaauaucaucuacuuacugcucuacuaaccaugauuacacaaucuggaugcccgagaauccgagacuggggacaucuugugacauuuucaccaacaguagagggaagagagcauccaaagggggcaagaccugcggauuuguugaugaaagaggcuuguauaagucuuugaagggggcaugcaaacucaaguuguguggaguucuuggccuuagacuuauggauggaacguggguugcgaugcaaacaucggacgaaaccaagugguguccuccugaucaguugguuaaucuacacgacuuucgcucggacgagaucgaacaucuuguuguggaggaguuggucaagaaaagagaggagugucuggaugcacuagaguccaucaugacuaccaagucagugaguuucagacgucucagccacuugagaaaacuugucccuggguucggaaaagcauacaccauauucaacaaaacccugauggaagcagaugcccauuacaagucaguccgaaccuggaaugaaaucauccccuccaaggggugucugagaguuggagggaggugucauccucacgugaaggggguguuuuuuaacgguauaauacuggguccugacggccauguucuaaucccagagaugcaaucaucccuccuucagcagcauauggaguuguuggaauccucaguuaucccccugaugcacccuuuagcagacccgucuacaguuuucaaggacggcgaugaagcagaggauuuuguugagguucaccuucccgacguacacaaacaaauuucagguguugaccugggucuccccagcuggggaaaguauguuuuggugagugcaggggucuugguuguccugauguugacaauuuucauaauaacauguugcggaagaauccaucgacccaagucuacacaacacggucucggggggacagggaggaaggugucggucacuucccaaagcgggaaggucauauccucaugggagucauauaagagugggggugagaccagacuguga

SEQ ID NO: 63673 - RNA, 1575 nt, Artificial Sequence
  derived and/or modified CDS sequence (wt) from glycoprotein__RABV__KM492751.1
augguuccucagguucuuuuguuugugccccuucugguuuucucaauguguuucgggaaauuuccuaucuauacgauaccagacaaacuuggucccuggagcccgauugacauacaucaucucagcuguccaaacaaccugguuguggaggaugaaggaugcacuaacuugucggguuucuccuacauggaacucaaggugggauacaucucggccauaaaaguaaacggguucacuugcacagguguggugacagaggcagagacuuacaccaacuuugucgguuauguuaccaccacguucaaaagaaagcauuuccgcccaacaccagaugcaugucgagcugcuuacaacuggaagauggccggugaccccagauaugaagaaucgcugcacaauccguacccugacuaccacuggcuucgaacuguuaagaccacgaaggagucccucgucaucauauccccaaguguagcagaccuggacccauacgacaaaucccuucauucaagggucuuuccuagcgggaagugcucgggaauaacaauaucaucuacuuacugcucuacuaaccaugauuacacaaucuggaugcccgagaauccgagacuggggacaucuugugacaucuuuaccaacaguagagggaagagagcauccaaagggggcaaaacuugcggauuuguugaugaaagaggcuuguauaagucuuugaagggggcaugcaaacucaaguuguguggaguucuuggccuuagacuuauggauggaacguggguugcgaugcaaacaucggacgaaaccaagugguguccuccugaucaguugguaaaucuacacgacuuucgcucggacgagaucgaacaucuuguuguggaggaguuagucaagaaaagagaggagugucuggaugcacuagaguccaucaugacuaccaagucggugaguuucagacgucucagccacuugagaaaacuugucccuggguucggaaaagcauacaccauauucaacaaaaccuugauggaagcagaugcccauuacaagucaguccgaaccuggaaugaaaucauccccuccaaaggguguuugagaguuggagggaggugucauccucacgugaaggggguguuuuucaacgguauaauacuggguccugacggccauguucuaaucccagagaugcaaucaucccuccuucagcagcauauggaguuguuggaauccucaguuauccccuugaugcacccuuuagcagacccgucuacaguuuucaaggacggugaugaagcagaggauuuuguugagguucaucuucccgacgugcacaaacaaauuucagguguugaccugggucuccccagcuggggaaaguauguuuuggugagugcaggggucuugguuguccugauguugacaauuuucauaauaacauguugcagaagaauccgucgacccaggucuacacaacacggucucggggggacagggaggaaggugucggucacuucccaaagcgggaaggucauaucuucaugggagucauauaagagugggggugagaccagacuguga

SEQ ID NO: 63674 - RNA, 1575 nt, Artificial Sequence
  derived and/or modified CDS sequence (wt) from glycoprotein__RABV__KM492752.1
augguuccucagguucuuuuguuugugccccuucugguuuucucaauguguuucgggaaauuuccuaucuauacgauaccagacaaacuuggucccuggagcccgauugacauacaucaucucagcuguccaaacaaccugguuguggaggaugaaggaugcacuaacuugucggguuucuccuacauggaacucaaggugggauacaucucggccauaaaaguaaacggguucacuugcacagguguggugacagaggcagagacuuacaccaacuuugucgguuauguuaccaccacguucaaaagaaagcauuuccgcccaacaccagaugcaugucgagcugcuuacaacuggaagauggcuggugaccccagauaugaagaaucgcugcacaauccguacccugacuaccacuggcuucgaaccguuaagaccacaaaggagucccucgucaucauauccccaaguguagcggaccuggacccauacgacaaaucccuucauucaagggucuuuccuagcgggaagugcucgggaauaacaauaucaucuacuuacugcucuacuaaccaugauuacacaaucuggaugcccgagaauccgagacuggggacaucuugugacaucuuuaccaacaguagagggaagagggcauccagagggggcaaaacuugcggauuuguugaugaaagaggcuuguauaagucuuugaagggggcaugcaaacucaaguuguguggaguucuuggccuuagacuuauggacggaacguggguugcgaugcaaacaucggacgaaaccaagugguguccuccugaucaguugguaaaucuacacgacuuucgcucggacgagaucgaacaucuuguuguggaggaguuagucaagaaaagagaggagugucuggaugcacuagaguccaucaugacuaccaagucggugaguuucagacgucucagccacuugagaaaacuugucccuggguucggaaaagcauacaccauauuuaacaaaaccuugauggaagcagaugcccauuacaagucaguccgaaccuggaaugaaaucauccccuccaaaggguguuugagaguuggagggaggugucauccucacgugaaggggguguuuuucaacgguauaauacuggguccugacggccauguucuaaucccagagaugcaaucaucccuccuucagcagcauauggaguuguuggaauccucaguuauccccuugaugcacccuuuagcagacccgucuacaguuuucaaggacggugaugaagcagaggauuuuguugagguucaucuucccgacgugcacaaacaaauuucagguguugaccugggucuccccaacuggggaaaguauguuuuggugagugcaggggucuugguuguccugauguugacaauuuucauaauaacauguugcggaagaauccgucgacccaggucuacacaacacggucucggggggacagggaggaaggugucggucacuucccaaagcgggaaggucauaucuucaugggagucauauaagagugggggugagaccagacuguga

SEQ ID NO: 63675 - RNA, 1575 nt, Artificial Sequence
  derived and/or modified CDS sequence (wt) from glycoprotein__RABV__KM492753.1
augguuccucagguucuuuuguuuguaccccuucugguuuucucaauguguuucgggaaauucccuaucuauacgauaccagauaaacuuggucccuggagcccgauugacauacaucaucucagcuguccaaacaaccugguuguggaagaugaaggaugcacuaacuugucggguuucuccuacauggaacuuaaggugggauacaucucggccauaaaaguaaacggguucacgugcacggguguggugacagaggcagagacuuacacuaacuuugucgguuaugucaccaccacguucaaaagaaagcauuuccgcccaacaccagaugcaugucgagcugcuuacaacuggaagauggccggugaccccagauaugaagaaucgcugcacaauccguacccugacuaccacuggcuucgaaccguuaaaaccacaaaggagucccucgucaucauauccccaaguguagcggaccuggacccauacgacaaaucccuucauucgagggucuuucccagcgggaagugcucgggaauaacaauaucaucuacuuacugcucuacuaaccaugauuacacaaucuggaugcccgagaauccgagacuggggacaucuugugacaucuuuaccaacaguagagggaagagagcauccaaagggggcaaaacuugcggauuuguugaugaaagaggcuuguacaagucuuugaaaggggcaugcaagcucaaauugugugguguucuuggccuuagacuuauggauggaacguggguugcaaugcaaacaucggacgaaaccaagugguguccuccugaucaguuaguaaaucuacacgacuuucgcucagacgagaucgaacaucuuguuguggaggaguuggucaagaaaagagaggagugucuggaugcacuagaguccaucaugacuaccaagucggugaguuucagacgucucagccacuugagaaaacuugucccuggguucggaaaagcauacaccauauucaacaaaaccuugauggaagcagaugcccauuacaagucaguccgaaccuggaaugaaaucauccccuccaaaggguguuugagaguuggagggaggugucauccucacgugaacgggguguuuuuuaacgguauaauacuggguccugacggccauguucuaaucccagagaugcaaucaucccuccuucagcagcauauggaguuguuggaauccucaguuaucccccugaugcauccuuuagcagacccgucuacaguuuucaaagacggugaugaagcagaggauuuuguugagguccaccuucccgacgugcacaaacaaauuucagguguugaccugggucuccccagcuggggaaaguauguuuugguuagugcagggguucugguuguccugauguugacaauuuucauaaugacauguuguggaagaguccaucgacccaagucuacacaacacggucucggagggacagggaggaaggugucggucacuucccaaagcgggaaggucauaucuucaugggagucauauaagagcgggggugagaccagacuguga

SEQ ID NO: 63676 - RNA, 1575 nt, Artificial Sequence
  derived and/or modified CDS sequence (wt) from glycoprotein__RABV__KM492754.1
augguuccucagguucuuuuguuuguaccccuucugguuuucucaauguguuucgggaaauucccuaucuauacgauaccagauaaacuuggucccuggagcccgauugacauacaucaucucagcuguccaaacaaccugguuguggaagaugaaggaugcacuaacuugucggguuuuuccuacauggaacuuaaggugggauacaucucggccauaaaaguaaacggguucacgugcacggguguggugacagaggcagagacuuacacuaacuuugucgguuaugucaccaccacguucaaaagaaagcauuuccgcccaacaccagaugcaugucgagcugcuuacaacuggaagauggccggugaccccagauaugaagaaucgcugcacaauccguacccugacuaccacuggcuucgaaccguuaaaaccacaaaggagucccucgucaucauauccccaaguguagcggaccuggacccauacgacaaaucccuucauucgagggucuuucccagcgggaagugcucgggaauaacaauaucaucuacuuacugcucuacuaaccaugauuacacaaucuggaugcccgagaauccgagacuggggacaucuugugacaucuuuaccaacaguagagggaagagagcauccaaaggaggcaaaacuugcggauuuguugaugaaagaggcuuguacaagucucugaaaggggcaugcaagcucaaauugugugguguucuuggccuuagacuuauggauggaacguggguugcaaugcaaacaucggacgaaaccaagugguguccuccugaucaguuaguaaaucuacacgacuuucgcucagacgagaucgaacaucuuguuguggaggaguuggucaagaaaagagaggagugucuggaugcacuagaguccaucaugacuaccaagucggugaguuucagacgucucagccacuugagaaaacuugucccuggguucggaaaagcauacaccauauucaacaaaaccuugauggaagcagaugcccauuacaagucaguccgaaccuggaaugaaaucauccccuccaaaggguguuugagaguuggagggaggugucauccucacgugaacgggguguuuuuuaacgguauaauacuggguccugacggccauguucuaaucccagagaugcaaucaucccuccuucagcagcauauggaguuguuggaauccucaguuaucccccugaugcauccuuuagcagacccgucuacaguuuucaaagacggugaugaagcagaggauuuuguugagguccaccuucccgacgugcacaaacaaauuucagguguugaccugggucuccccagcuggggaaaguauguuuugguuagugcagggguuuugguuguccugauguugacaauuuucauaaugacauguuguggaagaguccaucgauccaagucuacacaacacggucucggagggacagggaggaaggugucggucacuucccaaagcgggaaggucauaucuucaugggagucauauaagagcgggggugagaccagacuguga

SEQ ID NO: 63677 - RNA, 1575 nt, Artificial Sequence
  derived and/or modified CDS sequence (wt) from glycoprotein__RABV__KM492755.1
augguuccucagguucuuuuguuuguaccccuucugguuuucucaauguguuucgggaaauucccuaucuauacgauaccagacaaacuuggucccuggagcccgauugacauacaucaucucagcuguccaaacaaccugguuguggaagaugaaggaugcacuaacuugucggguuucuccuacauggaacuuaaggugggauacaucucggccauaaaaguaaacggguucacgugcacggguguggugacagaggcagagacuuacacuaacuuugucgguuauguuaccaccacguucaaaagaaagcauuuccgcccaacaccagaugcaugucgagcugcuuacaacuggaagauggccggugaccccagauaugaagaaucacugcacaauccauacccugacuaccacuggcuucgaaccguuaaaaccacaaaggagucccucgucaucauauccccaaguguagcggaucuggacccauacgacaaaucccuucauucgagggucuuuccuagcgggaagugcucgggaauaacaauaucaucuacuuacugcucuacuaaccaugauuacacaaucuggaugcccgagaauccgagacuggggacaucuugugacaucuuuaccaacaguagagggaagagagcauccaaggggggcaaaacuugcggauuuguugaugaaagaggcuuguacaagucuuugaaaggggcaugcaagcucaaauugugugguguucuuggccuuagacuuauggauggaacguggguugcaaugcaaacaucggacgaaaccaagugguguccuccugaucaguuaguaaaucuacacgauuuucgcucggacgagaucgaacaucuuguuguggaggaguuggucaagaaaagagaggagugucuggaugcacuagaguccaucaugacuaccaagucggugaguuucagacgucucagccacuugagaaaacuugucccuggguucggaaaagcauacaccauauucaacaaaaccuugauggaagcagaugcccauuacaagucaguccgaaccuggaaugaaaucauccccuccaaaggguguuugagaguuggagggaggugucauccucacgugaacggaguguuuuuuaacgguauaauacuggguccugacggccauguucuaaucccagagaugcaaucaucccuccuucagcagcauauggaguuguuggaauccucaguuaucccccugaugcauccuuuagcggacccgucuacaguuuucaaagacggugaugaagcagaggauuuuguugagguccaccuucccgacgugcacaaacagauuucagguguugaccugggucuccccagcuggggaaaguauguuuugguuagugcagggguuuugguuguccugauguugacaauuuucauaaugacauguuguggaagaguccaucgacccaagucuacacaacacggucucggagggacagagaggaaggugucggucacuucccaaagugggaaggucauaucuucaugggagucauauaagagcgggggugagaccagacuguga

SEQ ID NO: 63678 - RNA, 1575 nt, Artificial Sequence
  derived and/or modified CDS sequence (wt) from glycoprotein__RABV__KM492758.1
augguuccucagguucuuuuguuuguaccccuucugguuuucucaauguguuucgggaaauucccuaucuauacgauaccagacaaacuuggucccuggagcccgauugacauacaucaucucagcuguccaaacaacuugguuguagaagaugaaggaugcacuaacuugucggguuucucuuacauggaacuuaaggugggauacaucucggccauaaaaguaaacggguucacgugcacggguguggugacagaggcagagacuuacacuaacuuugucgguuauguuaccaccacguucaaaagaaagcauuuccgcccaacaccagaugcaugucgagcugcuuacaacuggaagauggccggugaccccagauaugaagaaucgcugcacaauccguacccugacuaccacuggcuucgaaccguuaaaaccacaaaggagucccucgucaucauauccccaaguguagcggaucuggacccauacgacaaaucccuucauucgagggucuuuccuagcgggaagugcucgggaauaacaauaucaucuacuuacugcucuacuaaccaugauuacacaaucuggaugcccgagaauccgagacuggggacaucuugugacaucuuuaccaacaguagagggaagagagcauccaaggggggcaaaacuugcggauuuguugaugaaagaggcuuguacaagucuuugaaaggggcgugcaagcucaaauugugugguguucuuggccuuagacuuauggauggaacguggguugcaaugcaaacaucggaugaaaccaagugguguccuccugaucaguuaguaaaucuacacgacuuucgcucggacgagaucgaacaucuuguuguggaggaguuggucaagaaaagagaggagugucuggaugcacuagaguccaucaugacuaccaagucggugaguuucagacgucucagccacuugagaaaacuugucccuggguucggaaaagcauacaccauauucaacaaaaccuugauggaagcagaugcccauuacaagucaguccgaaccuggaaugaaaucauccccuccaaaggguguuugagaguuggagggaggugucauccucacgugaacggaguguuuuuuaacgguauaauacuggguccugacggccauguucuaaucccagagaugcaaucaucccuccuucagcagcauauggaguuguuggaauccucaguuaucccccugaugcauccuuuagcagacccgucuacaguuuucaaagacggugaugaagcagaggauuuuguugagguccaccuucccgacgugcacaaacagauuucagguguugaccugggucuccccagcuggggaaaguauguuuugguuagugcagggguuuugguuguccugauguugacaauuuucauaaugacauguuguggaagaguccaucgacccaagucuacacaacacggucucggagggacagagaggaaggugucggucacuucccaaagcgggaaggucauaucuucaugggagucauauaagagcgggggugagaccagacuguga

SEQ ID NO: 63679 - RNA, 1575 nt, Artificial Sequence
  derived and/or modified CDS sequence (wt) from glycoprotein__RABV__KM492759.1
augguuccucagguucuuuuguuuguaccccuucugguuuucucaauguguuucgggaaauucccuaucuauacgauaccagacaaacuuggucccuggagcccgauugacauacaucaucucagcuguccaaacaacuugguuguagaagaugaaggaugcacuaacuugucggguuucucuuacauggaacuuaaggugggauacaucucggccauaaaaguaaacggguucacgugcacggguguggugacagaggcagagacuuacacuaacuuugucgguuauguuaccaccacguucaaaagaaagcauuuccgcccaacaccagaugcaugucgagcugcuuacaacuggaagauggccggugaccccagauaugaagaaucgcugcacaauccguacccugacuaccacuggcuucgaaccguuaaaaccacaaaggagucccucgucaucauauccccaaguguagcggaucuggacccauacgacaaaucccuucauucgagggucuuuccuagcgggaagugcucgggaauaacaauaucaucuacuuacugcucuacuaaccaugauuacacaaucuggaugcccgagaauccgagacuggggacaucuugugacaucuuuaccaacaguagagggaagagagcauccaaggggggcaaaacuugcggauuuguugaugaaagaggcuuguacaagucuuugaaaggggcgugcaagcucaaauugugugguguucuuggccucagacuuauggauggaacguggguugcaaugcaaacaucggaugaaaccaagugguguccuccugaucaguuaguaaaucuacacgacuuucgcucggacgagaucgaacaucuuguuguggaggaguuggucaagaaaagagaggagugucuggaugcacuagaguccaucaugacuaccaagucggugaguuucagacgucucagccacuugagaaaacuugucccuggguucggaaaagcauacaccauauucaacaaaaccuugauggaagcagaugcccauuacaagucaguccgaaccuggaaugaaaucauccccuccaaaggguguuugagaguuggagggaggugucauccucacgugaacggaguguuuuuuaacgguauaauacuggguccugacggccauauucuaaucccagagaugcaaucaucccuccuucagcagcauauggaguuguuggaauccucaguuaucccccugaugcauccuuuagcagacccguccacaguuuucaaagacggugaugaagcagaggauuuuguugagguccaccuucccgacgugcacaaacagauuucagguguugaccugggucuccccagcuggggaaaguauguuuugguuagugcagggguuuugguuguccugauguugacaauuuucauaaugacauguuguggaagaguccaucgacccaagucuacacaacacggucucggagggacagagaggaaggugucggucacuucccaaagcgggaaggucauaucuucaugggagucauauaagagcgggggugagaccagacuguga

SEQ ID NO: 63680 - RNA, 1575 nt, Artificial Sequence
  derived and/or modified CDS sequence (wt) from glycoprotein__RABV__KM492760.1
augguuccucagguucuuuuguuuguaccccuucugguuuucucaauguguuucgggaaauucccuaucuauacgauaccagacaaacuuggucccuggagcccgauugacauacaucaucucagcuguccaaacaacuugguuguagaagaugaaggaugcacuaacuugucggguuucucuuacauggaacuuaaggugggauacaucucggccauaaaaguaaacggguucacgugcacggguguggugacagaggcagagacuuacacuaacuuugucgguuauguuaccaccacguucaaaagaaagcauuuccgcccaacaccagaugcaugucgagcugcuuacaacuggaagauggccggugaccccagauaugaagaaucgcugcacaauccguacccugacuaccacuggcuucgaaccguuaaaaccacaaaggagucccucgucaucauauccccaaguguagcggaucuggacccauacgacaaaucccuucauucgagggucuuuccuagcgggaagugcucgggaauaacaauaucaucuacuuacugcucuacuaaccaugauuacacaaucuggaugcccgagaauccgagacuggggacaucuugugacaucuuuaccaacaguagagggaagagagcauccaaggggggcaaaacuugcggauuuguugaugaaagaggcuuguacaagucuuugaaaggggcgugcaagcucaaauugugugguguucuuggccuuagacuuauggauggaacguggguugcaaugcaaacaucggaugaaaccaagugguguccuccugaucaguuaguaaaucuacacgacuuucgcucggacgagaucgaacaucuuguuguggaggaguuggucaagaaaagagaggagugucuggaugcacuagaguccaucaugacuaccaagucggugaguuucagacgucucagccacuugagaaaacuugucccuggguucggaaaagcauacaccauauucaacaaaaccuugauggaagcagaugcccauuacaagucaguccgaaccuggaaugaaaucauccccuccaaaggguguuugagaguuggagggaggugucauccucacgugaacggaguguuuuuuaacgguauaauacuggguccugacggccauguucuaaucccagagaugcaaucaucccuccuucagcagcauauggaguuguuggaauccucaguuaucccccugaugcauccuuuagcagacccgucuacaguuuucaaagacggugaugaagcagaggauuuuguugagguccaccuucccgacgugcacaaacagauuucagguguugaccugggucuccccagcuggggaaaguauguuuugguuagugcagggguuuugguuguccugauguugacaauuuucauaaugacauguuguggaagaguccaucgacccaagucuacacaacacagucucggagggacagagaggaaggugucggucacuucccaaagcgggaaggucauaucuucaugggagucauauaagagcgggggugagaccagacuguga

SEQ ID NO: 63681 - RNA, 1575 nt, Artificial Sequence
  derived and/or modified CDS sequence (wt) from glycoprotein__RABV__KM492761.1
augguuccucagguucuuuuguuuguaccccuucugguuuucucaauguguuucgggaaauucccuaucuauacgauaccagacaaacuuggucccuggagcccgauugacauacaucaucucagcuguccaaacaaccugguuguggaagaugaaggaugcacuaacuugucggguuucuccuacauggaacuuaaggugggauacaucucggccauaaaaguaaacggguucacgugcacggguguggugacagaggcagagacuuacacuaacuuugucgguuaugucaccaccacguucaaaagaaagcauuuccgcccaacaccagaugcaugucgagcugcuuacaacuggaagauggccggugaccccagauaugaagaaucgcugcacaauccguacccugacuaccacuggcuucggaccguuaaaaccacaaaggagucccucgucaucauaucccuaaguguagcggaccuggacccauacgacaaaucccuucauucgagggucuuuccuagcgggaagugcucgggaauaacaauaucaucuacuuacugcucuacuaaccaugauuacacaaucuggaugcccgagaauccgagacuggggacaucuugugacaucuuuaccaacaguagagggaagagagcauccaaagggggcaaaacuugcggauuuguugaugaaagaggcuuguacaagucuuugaaaggggcaugcaagcucaaauugugugguguucuuggccuuagacuuauggauggaacguggguugcaaugcaaacaucggaugaaaccaagugguguccuccugaucaguuaguaaaucuacacgacuuucgcucggacgagaucgaacaucuuguuguggaggaguuggucaagaaaagagaggagugucuggaugcacuagaguccaucaugacuaccaagucggugaguuucagacgucucagccacuugagaaaacuugucccuggguucggaaaagcauacaccauauucaacaaaaccuugauggaagcagaugcccauuacaagucaguccgaaccuggaaugaaaucauccccuccaaaggguguuugagaguuggagggaggugucauccucacgugaacgggguguuuuucaacgguauaauacuggguccugacggccauguucuaaucccagagaugcaaucaucccuccuucagcagcauauggaguuguuggaauccucaguuaucccccugaugcauccuuuagcagacccgucuacaguuuucaaagacggugaugaagcagaggauuuuguugagguccaccuucccgacgugcacaaacaaauuucagguguugaccugggucuccccagcuggggaaaguauguuuugguuagugcagggguuuugguuguccugauguugacaauuuucauaaugacauguuguggaagaguccaucgacccaagucuacacaacacggucucggagggacagggaggaaggugucggucacuucccaaagcgggaaggucauaucuucaugggagucauauaagagcgggggugagaccagacuguga

SEQ ID NO: 63682 - RNA, 1575 nt, Artificial Sequence
  derived and/or modified CDS sequence (wt) from glycoprotein__RABV__KM492762.1
augguuccucagguucuuuuguuuguaccccuucugguuuucucaauguguuucgggaaauucccuaucuauacgauaccagacaaacuuggucccuggagccugauugacauacaucaucucagcuguccaaacaacuugguuguagaagaugaaggaugcacuaacuugucggguuucucuuacauggaacuuaaggugggauacaucucggccauaaaaguaaacggguucacgugcacggguguggugacagaggcagagacuuacacuaacuuugucgguuauguuaccaccacguucaaaagaaagcauuuccgcccaacaccagaugcaugucgagcugcuuacaacuggaagauggccggugaccccagauaugaagaaucgcugcacaauccguacccugacuaccacuggcuucgaaccguuaaaaccacaaaggagucccucgucaucauauccccaaguguagcggaucuggacccauacgacaaaucccuucauucgagggucuuuccuagcgggaagugcucgggaauaacaauaucaucuacuuacugcucuacuaaccaugauuacacaaucuggaugccagagaauccgagacuggggacaucuugugacaucuuuaccaacaguagagggaagagagcauccaaggggggcaaaacuugcggauuuguugaugaaagaggcuuguacaagucuuugaaaggggcgugcaagcucaaauugugugguguucuuggccuuagacuuauggauggaacguggguugcaaugcaaacaucggaugaaaccaagugguguccuccugaucaguuaguaaaucuacacgacuuucgcucggacgagaucgaacaucuuguuguggaggaguuggucaagaaaagagaggagugucuggaugcacuagaguccaucaugacuaccaagucggugaguuucagacgucucagccacuugagaaaacuugucccuggguucggaaaagcauacaccauauucaacaaaaccuugauggaagcagaugcccauuacaagucaguccgaaccuggaaugaaaucauccccuccaaaggguguuugagaguuggagggaggugucauccucacgugaacggaguguuuuuuaacgguauaauacuggguccugacggccauguucuaaucccagagaugcaaucaucccuccuucagcagcauauggaguuguuggaauccucaguuaucccccugaugcauccuuuagcagacccgucuacaguuuucaaagacggugaugaagcagaggauuuuguugagguccaccuucccgacgugcacaaacagauuucagguguugaccugggucuccccagcuggggaaaguauguuuugguuagugcagggguuuugguuguccugauguugacaauuuucauaaugacauguuguggaagaguccaucgacccaagucuacacaacacggucucggagggacagagaggaaggugucggucacuucccaaagcgggaaggucauaucuucaugggagucauauaagagcgggggugagaccagacuguga

SEQ ID NO: 63683 - RNA, 1575 nt, Artificial Sequence
  derived and/or modified CDS sequence (wt) from glycoprotein__RABV__KM492763.1
augguuccucagguucuuuuguuuguaccccuucugguuuucucaauguguuucgggaaauucccuaucuauacgauaccagauaaacuuggucccuggagcccgauugacauacaucaucucagcuguccaaacaaccugguuguggaagaugaaggaugcacuaacuugucggguuucuccuacauggaacuuaaggugggauacaucucggccauaaaaguaaacggguucacgugcacggguguggugacagaggcagagacuuacacuaacuuugucgguuaugucaccaccacguucaaaagaaagcauuuccgcccaacaccagaugcaugucgagcugcuuacaacuggaagauggccggugaccccagauaugaagaaucgcugcacaauccguacccugacuaccacuggcuucgaaccguuaaaaccacaaaggagucccucgucaucauauccccaaguguagcggaccuggacccauacgacaaaucccuucauucgagggucuuucccagcgggaagugcucgggaauaacaauaucaucuacuuacugcucuacuaaccaugauuacacaaucuggaugcccgagaauccgagacuggggacaucuugugacaucuuuaccaacaguagagggaagagagcauccaaagggggcaaaacuugcggauuuguugaugaaagaggcuuguacaagucuuugaaaggggcaugcaagcucaaauugugugguguucuuggccuuagacuuauggauggaacguggguugcaaugcaaacaucggacgaaaccaagugguguccuccugaucaguuaguaaaucuacacgacuuucgcucagacgagaucgaacaucuuguuguggaggaguuggucaagaaaagagaggagugucuggaugcacuagaguccaucaugacuaccaagucggugaguuucagacgucucagccacuugagaaaacuugucccuggguucggaaaagcauacaccauauucaacaaaaccuugauggaagcagaugcccauuacaagucaguccgaaccuggaaugaaaucauccccuccaaaggguguuugagaguuggagggaggugucauccucacgugaacgggguguuuuuuaacgguauaauacuggguccugacggccauguucuaaucccagagaugcaaucaucccuccuucagcagcauauggaguuguuggaauccucaguuaucccccugaugcauccuuuagcagacccgucuacaguuuucaaagacggugaugaagcagaggauuuuguugagguccaccuucccgacgugcacaaacaaauuucagguguugaccugggucuccccagcuggggaaaguauguuuugguuagugcagggguuuugguuguccugauguugacaauuuucauaaugacauguuguggaagaguccaucgacccaagucuacacaacacggucucggagggacagggaggaaggugucggucacuucccaaagcgggaaggucauaucuucaugggagucauauaagagcgggggugagaccagacuguga

SEQ ID NO: 63684 - RNA, 1575 nt, Artificial Sequence
  derived and/or modified CDS sequence (wt) from glycoprotein__RABV__KM492764.1
augguuccucagguucuuuuguuuguaccccuucugguuuucucaauguguuucgggaaauucccuaucuauacgauaccagacaaacuuggucccuggagcccgauugacauacaucaucucagcuguccaaacaacuugguuguagaagaugaaggaugcacuaacuugucggguuucucuuacauggaacuuaaggugggauacaucucggccauaaaaguaaacggguucacgugcacggguguggugacagaggcagagacuuacacuaacuuugucgguuauguuaccaccacguucaaaagaaagcauuuccgcccaacaccagaugcaugucgagcugcuuacaacuggaagauggccggugaccccagauaugaagaaucgcugcacaauccguacccugacuaccacuggcuucgaaccguuaaaaccacaaaggagucccucgucaucauauccccaaguguagcggaucuggacccauacgacaaaucccuucauucgagggucuuuccuagcgggaagugcucgggaauaacaauaucaucuacuuacugcucuacuaaccaugauuacacaaucuggaugccagagaauccgagacuggggacaucuugugacaucuuuaccaacaguagagggaagagagcauccaaggggggcaaaacuugcggauuuguugaugaaagaggcuuguacaagucuuugaaaggggcgugcaagcucaaauugugugguguucuuggccuuagacuuauggauggaacguggguugcaaugcaaacaucggaugaaaccaagugguguccuccugaucaguuaguaaaucuacacgacuuucgcucggacgagaucgaacaucuuguuguggaggaguuggucaagaaaagagaggagugucuggaugcacuagaguccaucaugacuaccaagucggugaguuucagacgucucagccacuugagaaaacuugucccuggguucggaaaagcauacaccauauucaacaaaaccuugauggaagcagaugcccauuacaagucaguccgaaccuggaaugaaaucauccccuccaaaggguguuugagaguuggagggaggugucauccucacgugaacggaguguuuuuuaacgguauaauacuggguccugacggccauguucuaaucccagagaugcaaucaucccuccuucagcagcauauggaguuguuggaauccucaguuaucccccugaugcauccuuuagcagacccgucuacaguuuucaaagacggugaugaagcagaggauuuuguugagguccaccuucccgacgugcacaaacagauuucagguguugaccugggucuccccagcuggggaaaguauguuuugguuagugcagggguuuugguuguccugauguugacaauuuucauaaugacauguuguggaagaguccaucgacccaagucuacacaacacggucucggagggacagagaggaaggugucggucacuucccaaagcgggaaggucauaucuucaugggagucauauaagagcgggggugagaccagacuguga

SEQ ID NO: 63685 - RNA, 1575 nt, Artificial Sequence
  derived and/or modified CDS sequence (wt) from glycoprotein__RABV__KM492765.1
augguuccucagguucuuuuguuuguaccccuucugguuuucucaauguguuucgggaaauucccuaucuauacgauaccagacaaaguuggucccgggagcccgauugacauacaucaucucagcuguccaaacaacuugguuauagaagaugaaggaugcacuaacuugucggguuucucuuacauggaacuuaaggugggauacaucucggccauaaaaguaagcggguucacgugcacggguguggagacagaggcagagacuuacacuaacuuugucgguuauguuaccaccacguucaaaagaaagcauuuccgcccaacaccaaaugcaugucgagcugcuuacaacaggaagauggccggugaccccagauaugaagaaucgcugcacaaucggugcccugaguaccacuggcuucgaaccguuaaaaccacaaaggagucccucgucaucauauccccaaguguagcggaucuggacccauacgacaaaucccuucauucgagggucuuuccuagcgggaagugcucgggaauaacaauaucaucuacuuacugcucuacuaaccaugauuacacaaucuggaugccagagaauccgagacuggggacaucuugugacaucuuuaccaacaguagagggaagagagcauccaaggggggcaaaacuugcggauuuguugaugaaagaggcuuguacaagucuuugaaaggggcgugcaagcucaaauugugugguguucuuggccuuagacuuauggauggaacguggguugcaaugcaaacaucggaugaaaccaagugguguccuccugaucaguuaguaaaucuacacgacuuucgcucggacgagaucgaacaucuuguuguggaggaguuggucaagaaaagagaggagugucuggaugcacuagaguccaucaugacuaccaagucggugaguuucagacgucucagccacuugagaaaacuugucccuggguucggaaaagcauacaccauauucaacaaaaccuugauggaagcagaugcccauuacaagucaguccgaaccuggaaugaaaucauccccuccaaaggguguuugagaguuggagggaggugucauccucacgugaacggaguguuuuuuaacgguauaauacuggguccugacggccauguucuaaucccagagaugcaaucaucccuccuucagcagcauauggaguuguuggaauccucaguuaucccccugaugcauccuuuagcagacccgucuacaguuuucaaagacggugaugaagcagaggauuuuguugagguccaccuucccgacgugcacaaacagaucucagguguugaccugggucuccccagcuggggaaaguauguuuugguuagugcagggguuuugguuguccugauguugacaauuuucauaaugacauguuguggaagaguccaucgacccaagucuacacaacacggucucggagggacagagaggaaggugucggucacuucccaaagcgggaaggucauaucuucaugggagucauauaagagcgggggugagaccagacuguga

SEQ ID NO: 63686 - RNA, 1575 nt, Artificial Sequence
  derived and/or modified CDS sequence (wt) from glycoprotein__RABV__KM594023.1
augaucccccagaauccuuugcucgggcuucuccugguuuccucacuguguuucgggaaauuccccaucuacacaauaccagacaagcugggccccuggagcccaauugacauacaccaucucaguugucccaacaaucugguuguggaggacgaggggugcaccagccugucuggguuuucuuauauggagcugaaggugggauacaucucugccauaaaaguaaaugguuuuacuuguacuggaguugugacagaagccgagaccuauaccaacuuugucggcuacgucaccacuacauucaaaagaagacacuuccgcccgaugccggaugcuugcagagcugcacacaacuggaagauagccggugacccucgauaugaggauucucuucaaaacccuuacccugauuaccauuggcugcggaccguaaagaccaccaaggagucucuuauuauuauaucuccaaguguggcugaucuggacccauaugacaagucccuucacucaagaguguuccccggagggaaguguuugggaguaacaaucuccuccaccuacugcucgaccaaccaugauuacacuauauggaugcccgaagaagcaggacucgggacaucuugugauauuuucaccaacagcagggggaagagagcaucuaaagggggaaaaaccugcggauucguggacgaaaggggcuuguacaagucucugaaaggaucauguaagcucaaguugugcggagucccuggucuucgacucauggaugggacuugggucucaauccaaacaccagaugagacgaaaugguguccuccugaccaaguagugaaucugcaugacuuccacucagaugaaauagagcaccuugucguagaggaguugaucaagaaaagggaggaaugucuagaugcacuggaaucuauuaugacuaccaaaucagugaguuucagacgucucagccaccugagaaaacugguccccggguuuggaaaggcauacacuauauacaacaagaccuuaauggaggcugaugcccacuacaagucaguucggacuuggaacgagaucauccccucaaaggggugccuaagagucggggggaggugucauccugauguggacgguguguucuucaaugguauaauuuugggcccagacgggaauguccugaucccugagaugcaaucauccuugcuucaacaacacauggagcuacuggagucaucugugaucccccugaugcauccccuggcagacccaucaacaaucuucaaggacagugaugaagcagaggacuucguugaaguucaccuuccggauguucacaagaaaaucuccgggguugaccucggucucccaaguugggggaaguauuuguugaugagugcgggugcucuggcugcacuaaugcugaccacucucuuaauaacauguugcaggaaggucaauagggcagagccaaaacagcaagguccuagggagucaggaaggacaaucucaguaacuccucaaaaugggagagucauaucuucaugggaguuauacaaaaguggaagcgagacugggcuguga

SEQ ID NO: 63687 - RNA, 1575 nt, Artificial Sequence
  derived and/or modified CDS sequence (wt) from glycoprotein__RABV__KM594024.1
augaucccccggaauccuuugcucgggcuucuccugguuuccucacuguguuuugggaaauuccccaucuacacaauaccagacaagcugggcccuuggagcccaauugacauacaccaccucaguugucccaacaaucugguuguggaggacgaggggugcacaagcuugucuggguuuucuuauauggagcugaaggugggauacaucuccgccauaaaaguaaaugguuucacuuguacuggaguugugacagaagccgagaccuauaccaacuuugucggcuacgucaccacuacguucaaaagaagacacuuucgcccgaugccagaugcuugcagagcugcacacaacuggaagauagccggugauccuagauaugaggauucucuucaaaacccuuacccugauuaccauuggcugcggacuguaaagaccaccaaggagucucucauuauuauaucuccaaguguggcugaucuggacccauaugacaaaucccuucauucaagaguguuccccggagggaaguguuugggaguaacaaucuccuccaccuacugcucgaccaaccaugauuacacuauauggaugcccgaagaagcaggacucgggaccucuugugauauuuucaccaacagcagggggaagagagcaucuaaagggggaaaaaccugcggauucguggacgagaggggcuuguacaagucucugaaaggaucaugcaagcucaaguugugcggagucccuggucuucgacucauagaugggacuugggucucaauccaaacaccagaugagacgaaauggugcccuccugaccaaguagugaaucugcaugacuuccacucagaugaaauagagcaccuugucguagaggaguugaucaagaaaagggaggagugucuagaugcacuggaaucuauuaugacuaccaaaucagugaguuucaggcgucucagccaccugagaaaacugguccccggguuuggaaaggcauacacuauacacaacaagaccuuaauggaggcugaugcccacuacaaguccguucggacuuggaacgagaucauccccucaaaggggugccuaagagucggggggaggugucauccuaauguggacgguguguucuucaaugguauaauuuugggcccagacgggaauguccugaucccugagaugcaaucauccuugcuucaacaacacauggagcuacuggagucaucugugaucccccugaugcauccucuggcagacccaucaacaaucuucaaggacagugaugaagcagaggacuucguugacguucaccuuccggauguucacaagaagaucuccgggguugaccucggucucccaaguugggggaaguauuuguugaugagugcgggugcucuggcugcacuaaugcugaccacucucuuaauaacauguugcaggaaggucaauagggcagagccaaaacagcaagguccuagggagucaggaaggacaaucucaguaacuccucaaaaugggagagucauaucuucaugggaguuauacaaaaguggaagcgagacugggcuguga

SEQ ID NO: 63688 - RNA, 1575 nt, Artificial Sequence
  derived and/or modified CDS sequence (wt) from glycoprotein__RABV__KM594025.1
augaucccccuggaucuucugcucggccuacuccuugcuuccucacuguguuucgggaaauuccccaucuacacgauaccagacaagcuggguccguggagucccaucgacauacaccaucucagcugucccaacaauuugguuguggaggaugaggggugcaccagccugucaggguuuucuuacauggaacugaaggugggguacauuucugccauaaaagugaaugguuucacuugcacaggaguugugacugaggccgagaccuauaccaacuuuguuggcuacgucaccaccacauucaaaaggaaacacuuucguccgaugccggaugcuuguagggcugcacaugaauggaagacagcuggugauccuagauaugaagacucucuucaaaacccuuauccugauuaccacugguuacggacuguaaagaccaccaaggagucucuuguuauuauaucuccgaguguugcugacuuggacccauaugacaagucccuucauucaaggguguuccccggagggaaguguuuggggguaacuaucuccucuaccuacugcucaaccaaccaugauuacaccauauggaugcccgaagaagcaggacucggaacaucuugugacauuuuuacuaauagcagagggaagagagcaucuaagggggggaggaucugcggauuuguggacgaaaggggccuguacaagucucugaagggggccuguaagcucaaguuguguggaguucccgggcuuagacucauggaugggaccugggucucaauucaggcaccagaugagacaaaauggugucccccugaccaaguggugaaucugcaugacuuccacucagaugagauagagcaccucguuguggaggaguugaucaagaagagggaggaaugucuggaugcacuagaaucuaucaugaccaccaaaucaguaaguuuuaggcgucucagccaccugagaaaacugguuccaggauuuggaaaggcauacacuauauuuaacaagacccugauggaggccgaugcccacuacaagucaguccggaccuggaacgaggucguccccucaaaggggugcuuaaaagucggagggaggugucauucugacguggauggaguguuuuucaacggaauaauuuugggcccagacgguaacguccugaucccugagaugcaaucaucccugcuucagcaacauauggagcuguuggaguccucuguaaucccccugaugcauccuuuggcagacccaucgacaaucuucaaggacagugaugaagcagaagauuuuguggacguccaccuuccagauguccauaagcaggucucuggaguugaucucggucucccgagcugggggaaguaucuguugaugagugcaggggcucuggcaacacuaaugucagcaauuuucuuagugacaugcugcaagaaggucaagagggcagagccagcacaucacgguccuaaggagucaggaagaaaaaucucaguaacuccucaaaacgggaaaguuauaucuucaugggagguauacaagaguggaaaugagccagggcuguga

SEQ ID NO: 63689 - RNA, 1575 nt, Artificial Sequence
  derived and/or modified CDS sequence (wt) from glycoprotein__RABV__KM594026.1
augaucccucaggcucuucuguuugugccucuccugauaucuucaucguguuuugggaaauuccccgucuacacgauaccagaaaagcucggcccuuggagucccaucgauauacaucaucucagcuguccuaauaaucuggcuguggaggaugaggggugcaacagucugucgggguuuucuuacauggaacugaaagugggauacaucucugccauaaaagugaacggguucacuuguacuggcguugugacagaggcugagaccuacaccaacuuuguugguuaugucaccaccacauucaagagaaaacauuuucgcccgaugccagaugcaugcagagcugcauacaacuggaaaauggcuggugauccuagauacgaagaaucucuucauaauccuuauccagacuaccauuggcuacggacugugacuaccaccaaagagucccuuauuaucauaucgccaaguguagccaauuuggaccccuacgacaaaucccuucauucaagaguuuuccccggugggaaguguaugggaauaacagucucuuccacauucuguucaacuaaucaugauuacaccaucuggaugccagaaaacgcaagacucgggacuucuugcgacauuuuuacuaccagcaaagggaagaaggcaucuaagggaggcaagauuugcggauuuguggacgagaggggcuuguauaagucucuaaaaggagcauguaaacuuaaacugugcggaguuucuggacuuagacuucuagaugggacuugggucacaauucagacaucagaugagaucaaguggugcccuccugacaagcuggugaaucuacaugacuuucauucagaugagauagaacaucucguuguagaggaguuagucaggaagagggaagaaugucuggacacacuggaguccaucaugaccaccaaaucggugagcuucagacgucuuagccacuugagaaaacuugucccuggguuuggaaaggcauauacuauauuuaacaagacccuaauggaagcugaugcucacuacaagucagucaauacuuggaaugaaaucauccccucaaaaggaugucuaacagucggagggaggugucauccucaugugaaugggguguuuuucaaugguauaauucuggguccggaugggcauguccuaaucccggagaugcaaucgucuuuacuucaacagcauauggagcuguuggagucuucuguaaucccucuaaugcauccuuuggcagacccaucgacagucuucaaggauggugaugaggcagaagauuuuguggagguucaccuuccggauguccauaagcaggucucagggauugaccugggucucccaaacugggggaaauaugugcugauaagcgcagguuuucuggugacacuauugcugauaaucuucuucaugauauguugcagacgggcuaauagaagaguaucaacacaacaaagucuuggagagucaggaaagaaaguguucguuauuccccaaaacgggaaagucauaucuucaugggaaucauauaagaauggaaccgagaccaggcuguga

SEQ ID NO: 63690 - RNA, 1575 nt, Artificial Sequence
  derived and/or modified CDS sequence (wt) from glycoprotein__RABV__KM594027.1
augaucccucaggcucuuuuguuugugccucuccuaauaucuucaucguguuuugggaaauuccccgucuacacgauaccagaaaagcucggcccuuggagucccaucgauauacaucaucucagcuguccuaauaaucuggcuguggaggaugaggggugcaacagucugucgggguuuucuuacauggaacugaaagugggauacaucucugccauaaaagugaacggguucacuuguacuggcguugugacagaggcugagaccuacaccaacuuuguugguuaugucaccaccacauucaagagaaaacauuuucgcccgaugccagaugcaugcagagcugcauacaacuggaaaauggcuggugauccuagauacgaagaaucucuucauaauccuuauccagauuaccauuggcuacggacugugacuacuaccaaagagucccuuauuaucauaucgccaaguguagccaauuuggaucccuacgacaaaucccuucauucaagaguuuuccccggugggaaguguaugggaauaacagucucuucuacauucuguucaacuaaucaugauuacaccaucuggaugccagaaaacgcaagacucgggacuucuugcgacauuuuuacuaccagcaaagggaagaaggcaucuaagggaggcaagauuugcggauuuguggacgagaggggcuuguauaagucucuaaaaggagcauguaaacuuaaacugugcggaguuucuggacuuagacuucuagaugggacuugggucacaauucagacaucagaugagaucaaguggugcccuccugacaagcuggugaaucuacaugacuuucauucagaugagauagaacaucucguuguagaggaguuagucaggaagagggaagaaugucuggacacacuggaguccaucaugaccaccaaaucggugagcuucagacgucuuagccacuugagaaaacuugucccuggguuuggaaaggcauauacuauauuuaacaagacccuaauggaagcugaugcucacuacaagucagucaauacuuggaaugaaaucauccccucaaaaggaugucuaacagucggagggaggugucauccucaugugaaugggguguuuuucaaugguauaauucuggguccggaugggcauguccuaaucccggagaugcaaucgucuuuacuccaacagcauauggagcuguuggagucuucuguaaucccucuaaugcauccuuuggcagacccaucgacagucuucaaggauggugaugaggcagaagauuuuguggagguucaccuuccggauguccauaagcaggucucagggauugaccugggucucccgaacugggggaaauaugugcugauaagcgcagguuuucuggugacacuauugcugauaaucuucuuaaugauauguugcagacgggcuaauagaagaguaucaacacaacaaagucuuggagagucaggaaagaaaguguucguuauuccccaaaacgggaaagucauaucuucaugggaaucauauaagaauggagccgagaccaggcuguga

SEQ ID NO: 63691 - RNA, 1575 nt, Artificial Sequence
  derived and/or modified CDS sequence (wt) from glycoprotein__RABV__KM594028.1
augaucccucaggcucuuuuguucgugccucuccugauuucuucaucguguuuugggaaauuccccgucuacacgauaccagaaaagcucggcccuuggagucccaucgauauacaucaucucagcugucccaauaaucuggcuguggaggaugaggggugcaacagucuuucgggguuuucuuacauggaacugaaagugggauacaucucugccauaaaagugaacggguucacuuguacuggcguugugacagaggcugagaccuacaccaacuuuguugguuaugucaccaccaccuucaagagaaaacauuuucgcccgaugccagaugcaugcagagcugcauacaacuggaaaauggcuggugauccuagauaugaagaaucucuucauaauccuuauccagauuaccauuggcuacggacugugacgacuaccaaagagucccuuauuaucauaucgccaaguguagccaaucuggaccccuacgacaaaucccuucauucaagaguuuuccccggugggaaguguaugggaauaacagucucuucuacauucuguucaacuaaucaugauuacaccaucuggaugcccgaaaacgcaagacucgggacuucuugcgacauuuuuacuaccagcaaagggaagaaggcaucuaagggaggcaagauuugcggauuuguggacgagaggggcuuguauaagucucuaaaaggagcauguaaacuuaaacugugcggaguuucuggacuuaggcuucuagaugggacuugggucacaauucagacaucagaugagaucaaguggugcccuccugacaagcuggugaaucuacaugacuuucauucagaugagauagaacaucucguuguagaggaguuagucaggaagagggaagaaugucuggacacacuggagucuaucaugaccaccaaaucggugagcuucagacgucuuagccacuugagaaaacuugucccuggguuuggaaaggcauauacuauauuuaacaagacccuaauggaagcugaugcucacuacaagucagucaauacuuggaaugaaaucauucccucgaaaggguguuugacagucggagggaggugucauccucaugugaaugggguguuuuucaaugguauaauucuggguccggaugggcauguccuaaucccggagaugcaaucgucuuuacuccaacagcauauggagcuguuggagucuucuguaaucccucuaaugcauccuuuggcagacccgucgacagucuucaaggagggugaugaggcagaagauuuuguggagguucaccuuccggauguccauaaacaggucucagggauugaccugggucucccaaacugggggaaauaugugcugauaagcgcagguuuucuggugacacuauugcugauaaucuucuuaaugauauguugcagacgggcuaauagaagaguaucaacacaacaaagucuuggagagucaggaaagaaaauguucguuauuccccaaaacgggaaaguuauaucuucaugggaaucauauaagaauggagccgagaccgggcuguga

SEQ ID NO: 63692 - RNA, 1575 nt, Artificial Sequence
  derived and/or modified CDS sequence (wt) from glycoprotein__RABV__KM594029.1
augauccaucaagcucuucugcuugugccucucaugaucuccucacagugucuugggaaauucccuaucuacacuauaccagacaagcuaggcccuuggagucccaucgacauacaucaucucaguuguccuaacaauuugauuguggaggaugaaggaugcaccagucugucagggcuuucuuauauggaacugaaggugggauacaucucugccauaaaagugaacggguucacuuguaccgguguugugacagaagcugagacuuacaccaacuuuguugguuaugucacuacuacauucaagagaaagcacuuucgcccgaugccagaugcaugcagagcugcauacaacuggaagauagccggugaucccagauaugaagagucucuucaaaauccuuauccugauucccauuggcuacggacuguaaagaccaccaaagagucgcuuaucaucauaucuccaaguguggcugaucuggacccauaugacaaaucccuucguucaagaguuuucccuggcgggaaguguuuaggaauaacuaucucaucuaccuacugcucaacuaaucaugauuauacuauuuggaugccggaagaagcaagacuugggacaucuugugacaucuuuaccaacagcaaagggaagagagcaucuaagggaggcaagaucuguggguucguggaugaaaggggauuguauaaaucucugaaaggagcaugcaagcuuaagcuaugcggaguuucuggacuuagacuuauggauggaaccugggucucgauucagauuccagaugagauaaaauggugcccuuccgaucaauuggugaaucuacaugacuuucacucagaugagauagagcaucucguuguagaggaguugguuaagaagagggaagaaugucuggacgcauuggaguccaucaugaccaccaaaucaguaagcuucagacgucucagccacuugagaaaacuugucccuggguuugggaaggcauauacuauauucaacaagacuuuaauggaagcugaugcccacuacaauucaguccggacuuggaacgagaucauccccucaaaggggugccuaaaagucggagggagaugucauccucauguggauggaguguuuuucaaugguauaauuauggguccugacgggagugucuugaucccugagaugcaaucaucccuacuccaacaacauauggagcuguuggaguccucuguaauccccuuaaugcaucccuuggcagacccaucaacagucuucaaggacgaugaugaagcagaaaacuucguugagguucaccugccggauauucacaaacaggucucagggauugaucuuggucucccggacuggggaaaguacuuguugaugaguacgggugcucuggcagcauuaauacugacaaucuucuugauucuaugcugcaggaaggucaauagaaaagaaucgauacaacgaagucuugaggagucaggaaggaaaguaccuguaaccccccagaacgggaaagucauaucuucaugggagcuguacaagaauggaggugagaccaagcuguga

SEQ ID NO: 63693 - RNA, 1575 nt, Artificial Sequence
  derived and/or modified CDS sequence (wt) from glycoprotein__RABV__KM594030.1
augaucccucaggcucuucuguuugugcuucuccugauuucuucaucguguuucgggaaauuccccgucuacacgauaccagacaagcuaggcccuuggagucccaucgacauacaucaucucagcuguccuaacaacuugauuguggaggacgagggaugcaacaaucugucgggguuuucuuauauggaauugaaggugggauacaucucugccauaaaagugaacggguucacgugcacuggggucgugacagaagcugagaccuacacaaacuucguugguuaugucaccaccacauucaaaagaaaacacuuucgcccgacgccagaugcuugcagagcggcauacaacuggaaaauggccggugacccgagauaugaagagucucuccacaauccuuacccugacuaccacugguuaaggaccguaaaaaccaccaaagagucucucauuaucauaucaccgaguguggcugauuuggacccguacgacaaaucucuucauucaagaguuuucccuagugggaagugucucggaauaaccauaucuucuacuuacugcucgacuaaccaugauuauaccaucuggaugccagaaaaagcaagacuagggaccucuugugacauuuucaccaauagcaaagggaagaaggcaucuaaggggggcaagguuugcggauuuguggaugaaaggggcuuguauaagucucuaaaaggagcauguaagcucaagcugugcggaguuccuggacuuagacucauggauggaaccugggucucaguucagacgccagaugaagccaaauggugccccccugaccagcuggugaaucuacaugacuuucacucagaugagauagaacaccucguuguagaggaguuagucaagaagagggaggaaugucuggauacacuggaguccaucaugaccaccaagucaguaagcuucagacgucucagccaucugcgaaagcuuguucccggguuuggaaaggcauacacuauauucaacaaaaccuuaauggaagccgaugcucauuacaagucaguucauacuuggaaugaggucauucccucaaaaggguguuugaaagugggggggaggugucauccucaugugaacgggguguuuuugaaugguauaauucuggguccugaugggaauguccugaucccagaaaugcaaucauccuuacuucaacagcauauggagcuguuggagucuucuguaaucccucuaaugcaucccuugucagacccaucaacaguuuucaaagacggugaugaggcugaagacuuuguugaaguucaccuuccggauguucacaaacaagucucaggaguugacuuugggcucccaaacugggggagauaugugcugaugagugcagguguucuggcgauauugauccugacaaucuuucuaaugauauguugcagaagggucaauagaaaagacucgagccgaucaaguccuggggaauugggaaggaaaguaucagucacuccacaaaacggaaaaguuauaucuucaugggagucuuacaagagugaaggugagacccgacuguga

SEQ ID NO: 63694 - RNA, 1575 nt, Artificial Sequence
  derived and/or modified CDS sequence (wt) from glycoprotein__RABV__KM594031.1
augaucccucaggcucuucuguuugugcuucuccugauuucuucaucguguuucgggaaauuccccgucuacacgauaccagacaagcuaggcccuuggagucccauagacauacaucaucucagcuguccuaacaacuugauuguggaggacgagggaugcaacaaucugucgggguuuucuuacauggaauugaaggugggauacaucucugccauaaaagugaacggguucacgugcacuggggucgugacagaagcugagaccuacacaaacuucguugguuaugucaccaccacauucaaaagaaaacacuuucgcccgacgccagaugcaugcagagcggcauacaacuggaaaauggccggugacccgagauaugaagagucucuccacaauccuuacccugacuaccacugguuaaggaccguaaaaaccaccaaagagucucuuauuaucauaucaccgaguguggcugauuuggacccguacgacaaaucucuucauucaagaguuuucccuagugggaagugucucggaauaaccauaucuucuacuuacugcucgacuaaccaugauuauaccaucuggaugccagaaaaagcaagacuagggaccucuugugacauuuucaccaauagcaaagggaagaaggcaucuaagggaggcaagguuuguggauuuguggaugaaaggggcuuguauaagucucuaaaaggagcauguaagcucaagcugugcggaguuccuggacuuagacucauggauggaaccugggucucaguucagacgccagaugaagccaaauggugccccccugaccagcuggugaaucuacaugacuuucacucagaugagauagaacaccucguuguagaggaguuggucaagaagagggaggaaugucuggauacacuggaguccaucaugaccaccaagucaguaagcuucagacgucucagccaucuacgaaagcuuguucccggguuuggaaaggcauacacuauauucaacaaaaccuuaauggaagccgaugcucauuacaagucaguucauacuuggaaugaggucauucccucaaaaggguguuugaaagugggggggaggugucauccucaugugaacgggguguuuuugaaugguauaauucuggguccugaugggaauguccugaucccagaaaugcaaucauccuuacuucaacagcauauggagcuguuagagucuucuguaaucccucuaaugcaucccuugucagacccaucaacaguuuucaaggacggugaugaggcugaagacuuuguugagguucaccuuccggauguucacaaacaagucucagggguugacuuugggcucccaaacugggggagauaugugcugaugagugcagguguucuggcgauacugauccugacaaucuuucuaaugauauguugcagaagggucaauagaaaagacucgagccgaucaagucuuggggaauuaggaaggaaaguaucagucacuccacaaaacggaaaaguuauaucuucaugggagucuuacaagagugaaggcgagacccgacuguga

SEQ ID NO: 63695 - RNA, 1575 nt, Artificial Sequence
  derived and/or modified CDS sequence (wt) from glycoprotein__RABV__KM594032.1
augaucccucaggcucuuuuguuugugcuucuccugauuucuucauuguguuccgggaaauuccccaucuacacaauaccagacaagcugggcccuuggagucccauugacauacaucaucucagcugcccuaauaacuugauuguggaggaugagggaugcagcagucugucaggguuuucuuacauggaauugaaggugggauacaucucugccauaaaagugaacggguucacgugcaccggggucgugacagaagcugagaccuacacaaauuucgucgguuauguuaccaccacauucaagagaaaacacuuucgcccgaugccagaugcauguagagcugcguacaacuggaaaauggccggugauccgagauaugaagagucucuccacaauccuuacccggauuaccauugguuacggacuguaaagacuaccaaagagucucuuauuaucauaucaccaaguguagcugauuuggacccauacgacaaaucucuucauucaagaguuuucccuggugggaaguguuuaggaauaacaauaucuucuaccuacugcucaacuaaccaugauuauaccaucuggaugccagaagaaccaagauuaaggacuucuugugacauuuucaccaauagcaaagggaagagagcaucuaaggggggcaagaugugcggauuuguggaugaacggggcuuguauaagucucuaaagggggcauguaaacuuaagcuaugcggaguuccuggacuuagacucauggauggaaccugggucucaguucagacaccagaugagaccaaguggugcucuccugaccagcuggugaaucuacaugacuuucacucagaugagauagaacaccuuguuguagaggagcuagucaagaagagggaggaaugucuggauacauuggaguccaucaugaccaccaagucaguaagcuucagacgucucagccaucugagaaaacuugucccuggguuuggaaaggcauacacuauauucaacaagacccuaauggaagcugaugcucauuacaagucaauucagacuuggaacgaggucauccccucaaaaggguguuugaaagucggggggaggugucauccucaugugaacgggguguuuuugaaugguauaauucuggguccggacgggaauguccugaucccagaaaugcagucauccuuacuccaacaacauauggagcuguuggaguccucugugaucccucuaaugcaucccuugucagacccaucaacagucuuuaaggacggugaugaggcugaagacuuuguugagguucaccucccagauguucacaaacaggucucggggguugacuuugggcucccaaauugggggagauaugugcugaugagugcaggugcucuggcgauacuaaugcugacaaucuuuuuaaugauaugcugcagaaaggucaagagaacagacucgagccaaucaagucuugaggaauugagaaggaaaguaucggucacuccacaaaacgggaaaguuauaucuucaugggagucguauaagagugaaggcgagacccggcuguga

SEQ ID NO: 63696 - RNA, 1575 nt, Artificial Sequence
  derived and/or modified CDS sequence (wt) from glycoprotein__RABV__KM594033.1
augaucccucaggcucuucuacuggugccucuugugaucuccucauugugucucgggaaauuccccaucuacacgauaccagacaagcucggcccuuggagucccaucgauauacaucaucucagcuguccuaauaauuugguuguggaggacgaggggugcacuagucugucaggguuuucuuacauggaacugaagguaggauacaucucggccauaaaagugaacggguucacuuguaccgguguugugacagaagcugagaccuauaccaacuuuguugguuaugucacuaccacauucaagagaaaacacuuucgcccaaugucagaugcaugcagagcugccuacaacuggaagguggccggugacccuagauaugaagagucucuucaaaauccguauccugauuaccauuggcuucggacugugaagaccaccaaagagucgcuuauuaucauaucuccaaguguggcugaccuggaucccuacgacaaaucccugcggucaagaauuuucccuggagggaagugcuuggggauaacagucucuucuaccuacugcucaacuaaccaugauuacacuaucuggaugccagaagaagcaagacucgggacauauugugacauuuuuaccaacagcaaagggaagagagcuucuaagggaggcaagauuugcggauucguggaugaaaggggauuguauaagucucuaaaaggagcauguaggcuuaaguugugcggaguuucuggacuuagacuuauggauggaaccugggucgcgauucagacgucagaggagaccaaauggugcccuucugaucaauuagugaaucuacaugacuuucacucagaugagauagaacaucuugucguggaggaguuggucaagaagagggaagaaugucuggacacacuggaguccaucaugaccaccaaaucaguaaguuuccgacgucucagccacuugagaaaacuuguuccaggauuugggaaggcuuauacuauauucaacaagacuuuaauggaagcugaugcucacuauaacucaguucgaacuuggaaugagaucauccccucaaaagggugucuaaaagucggagggagaugucauccucauguggacggaguguuuuucaaugguauaauucuugguccagacgggaaugucuugaucccggagaugcaaucgucccuacuccaacaacauauggaguuguuggaguccucuguaaucccccuaaugcaucccuuggcagacccauccacugucuucaaggaaggcgaugaggcagagaacuuuguugagguucacuugccggauauucacaaacaggucuccgggauugaccuuggucucccaaacugggggaaauauuugcugaugagugcaggugcucuggcagcacuaauucugacaaucuucuuaauuaccuguugcagaagggucaauagaacagaaucaauaaagcgagguccugaggagucaagaaggaaaguaucuguaacuccccaaaacgggaaagucauaucuucaugggagcuguacaaaaauggaggcgagaccaagcuguga

SEQ ID NO: 63697 - RNA, 1575 nt, Artificial Sequence
  derived and/or modified CDS sequence (wt) from glycoprotein__RABV__KM594034.1
augaucccucaggcucuucuacuggugccucuugugaucuccucauugugucucgggaaauuccccaucuacacgauaccagacaagcucggcccuuggagucccaucgauauacaucaucucagcuguccuaauaauuugguuguggaggacgaggggugcacuagucugucaggguuuucuuacauggaacugaagguaggauacaucucugccauaaaagugaacggguucacuuguaccgguguugugacagaagcugagaccuauaccaacuuuguugguuaugucacuaccacauucaagagaaaacacuuucgcccaaugucaggugcaugcagagcugccuacaacuggaagguggccggugacccuagauaugaagagucucuucaaaauccguauccugauuaccauuggcuucggacugugaagaccaccaaagagucgcuuauuaucauaucuccaaguguggcugaccuggaucccuacgacaaaucccugcggucaagaauuuucccuggagggaagugcuugggaauaacagucucuucuaccuacugcucaacuaaccaugauuacacuaucuggaugccagaagaagcaagacucgggacaucuugugacauuuuuaccaacagcaaagggaagagagcuucuaagggaggcaagauuugcggauucguggaugaaagaggauuguauaagucucuaaaaggagcauguaggcuuaaguugugcggaguuucuggacuuagacuuauggaugggaccugggucgcgauucagacgucagaggagaccaaauggugcccuucugaucaauuggugaaucuacaugacuuucacucagaugagauagaacaucuugucguggaggaguuggucaagaagagggaagaaugucuggacacacuggaguccaucaugaccaccaaaucaguaaguuuccgacgucucagccacuugagaaaacuuguuccaggauuugggaaggcuuauacuauauucaacaagacuuuaauggaagcugaugcucacuauaacucaguucgaacuuggaaugagaucauccccucaaaagggugucuaagagucggagggagaugucauccucauguggacggaguguuuuucaaugguauaauucuugguccagacgggaaugucuugaucccggagaugcaaucgucccuacuccaacaacauauggaguuguuggaguccucuguaaucccccuaaugcaucccuuggcagacccaucaacugucuucaaggaaggcgaugaggcagagaacuuuguugagguucacuugccggauauucacaaacaggucuccgggauugaccuuggucucccaaacugggggaaauauuugcugaugagugcaggugcucuggcagcacuaauucugacaaucuucuuaauuaccuguugcagaagggucaauagaacagaaucaauaaagcaagguccugaggagucaagaaggaaaguaucuguaacuccccaaaacgggaaagucauaucuucaugggagcuguacaaaaauggaggcgagaccaagcuguga

SEQ ID NO: 63698 - RNA, 1575 nt, Artificial Sequence
  derived and/or modified CDS sequence (wt) from glycoprotein__RABV__KM594035.1
augaucccucaggcucuucuacuggugccucuugugaucuccucauugugucucgggaaauuccccaucuacacgauaccagacaagcucggcccuuggagucccaucgauauacaucaucucagcuguccuaauaauuugguuguggaggacgaggggugcacuagucugucaggguuuucuuacauggaacugaagguaggauauaucucugccauaaaagugaacggguucacuuguaccgguguugugacagaagcugagaccuauaccaacuuuguugguuaugucacuaccacauucaagagaaaacacuuucgcccaaugucagaugcaugcagagcugccuacaacuggaagguggccggugacccuagauaugaagagucucuucaaaauccguauccugauuaccauuggcuucggacugugaagaccaccaaagagucgcuuauuaucauaucuccaaguguggcugaccuggaucccuacgacaaaucccugcggucaagaauuuucccuggagggaagugcuugggaauaacagucucuucuaccuacugcucaacuaaccaugauuacacuaucuggaugccagaagaagcaagacucgggacaucuugugacauuuuuaccaacagcaaagggaagagagcuucuaagggaggcaagauuugcggauucguggaugaaaggggauuguauaagucucuaaaaggagcauguaggcuuaaguugugcggaguuucuggacuuagacuuauggauggaaccugggucgcgauucagacgucagaggagaccaaauggugcccuucugaucaauuggugaaucuacaugacuuucacucagaugagauagaacaucuugucguggaggaguuggucaagaagagggaagaaugucuggacacacuggaguccaucaugaccaccaaaucaguaaguuuccgacgucucagccacuugagaaaacuuguuccaggauuugggaaggcuuauacuauauucaacaagacuuuaauggaagcugaugcucacuauaacucaguucgaacuuggaaugagaucauccccucaaaagggugucuaaaagucggagggagaugucauccucauguggacggaguguuuuucaaugguauaauucuugguccagacgggaaugucuugaucccggagaugcaaucgucccuacuccaacaacauauggaguuguuggaguccucuguaaucccccuaaugcaucccuuggcagacccaucaacugucuucaaggaaggcgaugaggcagagaacuuuguugagguucacuugccggauauucacaaacaggucuccgggauugaccuuggucucccaaacugggggaaauauuugcugaugagugcaggugcucuggcagcacuaauucugacaaucuucuuaauuaccuguugcagaagggucaauagaacagaaucaauaaagcgagguccugaggagucaagaaggaaaguaucuguaacuccccaaaacgggaaagucauaucuucaugggagcuguacaaaaauggaggagagaccaagcuguga

SEQ ID NO: 63699 - RNA, 1575 nt, Artificial Sequence
  derived and/or modified CDS sequence (wt) from glycoprotein__RABV__KM594036.1
augaucccucaggcucuucuacuggugccucuugugaucuccucauugugucucgggaaauuccccaucuacacgauaccagacaagcucggcccuuggagucccaucgauauacaucaucucagcuguccuaauaauuuaguuguggaggacgaggggugcacuagucugucaggguuuucuuacauggaacugaagguaggauacaucucugccauaaaagugaacggguucacuuguaccgguguugugacagaagcugagaccuauaccaacuuuguugguuaugucacuaccacauucaagagaaaacacuuucgcccaaugucagaugcaugcagagcugccuacaacuggaagguggccggugacccuagauaugaagagucucuucaaaauccguauccugauuaccauuggcuucggacugugaagaccaccaaagaaucgcuuauuaucauaucuccaaguguggcugaccuggaucccuacgacaaaucccugcggucaagaauuuucccuggagggaagugcuugggaauaacagucucuucuaccuacugcucaacuaaccaugauuacacuaucuggaugccagaagaagcaagacucgggacaucuugugacauuuuuaccaacagcaaagggaagagagcuucuaagggaggcaagauuugcggauucguggaugaaaggggauuguauaagucucuaaaaggagcauguaggcuuaaguugugcggaguuucuggacuuaggcuuauggauggaaccugggucgcgauucagacgucagaggagaccaaauggugcccuucugaucaauuggugaaucuacaugacuuucacucagaugagauagaacaucuugucguggaggaguuggucaagaagagggaagaaugucuggacacacuggaguccaucaugaccaccaaaucaguaaguuuccgacgucucagccacuugagaaaacuuguuccaggauuugggaaggcuuauacuauauucaacaagacuuuaauggaagcugaugcucacuauaacucaguucgaacuuggaaugagaucauccccucaaaagggugucuaaaagucggagggagaugucauccucauguggacggaguguuuuucaaugguauaauucuugguccagacgggaaugucuugaucccggagaugcaaucgucccuacuccaacaacauauggaguuguuggaguccucuguaaucccccuaaugcaucccuuggcagacccaucaacugucuucaaggaaggcgaugaggcagagaacuuuguugagguucacuugccggauauucacaaacaggucuccgggauugaccuuggucucccaaacugggggaaauauuugcugaugagugcaggugcucuggcagcacuaauucugacaaucuucuuaauuaccuguugcagaagggucaauagaacagaaucaauaaagcaagguccugaggagucaagaaggaaaguaucuguaacuccccaaaacgggaaagucauaucuucaugggaguuguacaaaaauggaggcgagaccaagcuguga

SEQ ID NO: 63700 - RNA, 1575 nt, Artificial Sequence
  derived and/or modified CDS sequence (wt) from glycoprotein__RABV__KM594037.1
augauccuucaggcucuucuguuugugccucucuugauuucuucauuguguuucgggaaguuccccaucuacacaauaccagacaagcucggcccuuggagucccaucgacauacaucaucucaguuguccuaacaauuugguuguggaggacgagggguguacaagucugucaggguuuucuuacauggaauugaaggugggauacauaucugccauaaaagugaacggguucaccuguacagguguugugacagaagcugagaccuacaccaacuuugucgguuaugucacuaccacauucaagaggaaacauuuucgcccuacgcccgacgcaugcagggcugccuacaacuggaagguggccggugauccuagauaugaggagucucuucaaaauccuuaucccgauuaccauuggcuacggacuguaaagaccaccaaggagucucuuaucaucauaucuccaaguguggcugauuuggacccauacgacaaaucccuucauuccagaguguucccuagugggaaguguuuggggauaacaauuuccuccacuuacugcucuacuaaccaugauuacaccaucuggaugcccgaagaagcgaggcucgggacaucuugugacaucuuuaccagcagcaaagggaagaaagccucuaaagggggcaagacuugcggauucguagaugaaaggggccuguauaagucuuuaaaaggagcauguaaacucaaacugugcggaguucccggacuuagacucauggacggaacaugggucacuauucagacaucagaugagacuaaauggugcccuccugaucaauuggugaaucuacaugacuuucacucagaugagauagagcaucucgucguggaggaguuggucaagaagagggaagaauguuuagaugcauuggaguccaucaugaccaccaaaucuguaagcuucagacgucucagccacuugagaaaacuugucccuggguuugggaaggcauauacuauauucaacaagaccuugauggaagcugaugcucacuacaagucaguucgaacuuggaacgagaucauccccucaaaggggugcuuaaaaguuggggggaggugucauccucauguggacggaguauuuuucaaugguauaauucuggguccagacgggaaugucuugauccccgagaugcaaucuucccuacuucaacaacauauggagcuguuggaguccucuguaaucccucuaaugcaucccuuggcagacccaucaacagucuucaaggacggugaugaggcggaggacuuuguugaaguucaccuuccggauguucacaagcaaaucucagggguugaccuuggucucccaagcugggggaaguaucuacugaugauugcaggugcucuggcuggacuaauucugauaaucuucuugauggcauguuguagaagggccaagagaacagagucaagacgacgagguucuggggagucagaaaggaaagugccaguaccuccccaaaacgggaaagucauaucuucaugggaguuguacaagagugaaggcgagaccgggcuguga

SEQ ID NO: 63701 - RNA, 1575 nt, Artificial Sequence
  derived and/or modified CDS sequence (wt) from glycoprotein__RABV__KM594038.1
augauccuucaggcucuucuguuugugccucuccugauuucuucauuguguuucgggaaguuccccaucuacacaauaccagacaagcucggcccuuggagucccaucgacauacaucaucucaguuguccuaacaauuugguuguggaggacgagggguguacaagucugucaggguuuucuuacauggaauugaaggugggauacauaucugccauaaaagugaacggguucaccuguacagguguugugacagaagcugagaccuacaccaacuuugucgguuaugucacuaccacauucaagaggaaacauuuucgcccuacgcccgacgcaugcagggcugccuacaacuggaagguggccggugauccuagauaugaggagucucuucaaaauccuuaucccgauuaccauuggcuacggacuguaaagaccaccaaggagucucuuaucaucauaucuccaaguguggcugauuuggacccauacgacaaaucccuucauuccagaguguucccuagugggaaguguuuggggauaacaauuuccuccacuuacugcucuacuaaccaugauuacaccaucuggaugcccgaagaagcgagacucgggacaucuugugacaucuuuaccagcagcaaagggaagaaagccucuaaagggggcaggacuugcggauucguagaugaaaggggccuguauaagucuuuaaaaggagcauguaaacucaaacugugcggaguucccggacuuagacucauggacggaacaugggucacuauucagacaucagaugagacuaaauggugcccuccugaucaauuggugaaucuacaugacuuucacucagaugagauagagcaucucgucguggaggaguuggucaagaagagggaagaauguuuagaugcauuggaguccaucaugaccaccaaaucuguaagcuucagacgucucagccacuugagaaaacuugucccuggguuugggaaggcauauacuauauucaacaagaccuugauggaggcugaugcucacuacaagucaguucgaacuuggaacgagaucauccccucaaaggggugcuuaaaaguuggagggaggugucauccucauguggacggaguauuuuucaaugguauaauucuggguccggacgggaaugucuugauccccgaaaugcaaucuucccuacuucaacaacauauggagcuguuggaguccucuguaaucccucuaaugcaucccuuggcagauccaucaacagucuucaaggacggugaugaggcggaggacuuuguugaaguucaccuuccggauguucacaagcaaaucucagggguugaccuuggucucccaagcugggggaaguaucuacugaugauugcaggugcucuggcuggacuaauucuaauaaucuucuugauggcauguuguagaagggccaagagaacagagucaagacgacgagguucuggggagucagaaaggaaagugccaguaccuccccaaaacgggaaagucauaucuucaugggaguuguacaagagugaaggcgagaccgggcuguga

SEQ ID NO: 63702 - RNA, 1575 nt, Artificial Sequence
  derived and/or modified CDS sequence (wt) from glycoprotein__RABV__KM594039.1
augguuccccaagcucuccuguuuguaccccuccugguuuuuucauuguguuucgggaaguuccccauuuacacaauaccagacaaacuggguccuuggagcccgauugacauacaucaucucagcuguccaaacaauuugguuguggaggacgaaggaugcaccaaccugucaggguucuccuacauggaacuuaaagugggauacaucucagccauaaaagugaacggauucacaugcacaggcguugugacagaggcagaaaccuacaccaacuuugucgguuaugucacaaccacguucaaaagaaagcacuuccgcccaacgccagaugcaugcagagccgcguauaacuggaagauggcaggcgaccccagauaugaggagucucuacacaauccguaucccgacuaccauuggcuucggacugugaaaaccaccaaagagucucuuguuaucauauccccaaguguugcagauuuggacccguacgacaaaucccuccacucaagggucuucccuagcgggaagugcucgggaauaacgguauccuccaccuacugcucaacuaaccaugauuacaccauuuggaugcccgagaauccgagacuaggaacaucuugugauaucuuuaccaauaguagagggaagagagcauccaaagggagcaagacuugcggcuuuguggaugagagaggcuuguacaagucuuuaaagggagcaugcaaacucaaguuaugcggaguucuuggacuuagacuuguggauggaacauggauagcgaugcaaacaucagaugagaucaaauggugcccuccugaucaguuaguaaaucugcacgacuuucgcucggaugagauugagcaccuuguuguagaggaguuggucaagaaaagagaagaguguuuggaugcauuagaguccaucgugaccaccaagucagugaguuucagacgucucagucacuuaagaaaacuugucccuggguucggaaaggcauauacaauauucaauaaaacauugauggaggcugaugcucacuacaagucgauccggacuuggaaugagaucauccccucaaaagggugucuaagggugggagggaggugucauccucaugugaacgggguguuuuuuaaugguauaauacuagggcccgauggccauguucuaaucccagaaaugcagucaucccuccuccagcaacauauggaguuguuggaguccucagucgucccucuuaugcaccccuuggcagacccaucuacaguuuucaaggauggagaugaggcugaagacuuuauugaaguucaccuucccgauguacacaaacaggucucagggguugaccugggucucccagacugggggaaguacguguugaugagugcagggguccugauugccuugaugcugauaauuucucuaaugacauguuguagaggaguccaucgaccaaacucuauacaacaccggcucggagggacagggaggaaggugucaguuacuucccaaagcgggaaggucauaucuucaugggaguccuauaaaagugggggggagacuagacuguga

SEQ ID NO: 63703 - RNA, 1575 nt, Artificial Sequence
  derived and/or modified CDS sequence (wt) from glycoprotein__RABV__KM594040.1
augauucuucaggcccuucuguuugugccucuccuaaucucuucauugugucucgggaaauuccccaucuauacaauaccagauaagcuugguccuuggagccccaucgauauacaucaccucagcuguccaaauaauuuaguuguggaggacgaggggugcaccaaucuaucaggguucucuuacauggaacuaaaggugggauacaucucugccauaaaggugaacggguucacuuguaccgguguggugacagaggcugaaaccuauaccaacuuuguugguuaugucaccaccacauucaagaggaaacauuuucgcccuguaccggaugcaugcagggcugcauacaacuggaagauggcuggugacccuagauaugaggagucucuucaaaauccuuauccugauuaccacuggcuacggaccgucaagaccacuaaggagucucuuaucaucauaucuccgaguguggcugaucuagacccauacgacaaaucccuccauucuaggguguucccuggugggaaguguuugggaauaacgguuucuuccaccuacugcucaaccaaccaugauuacaccaucuggaugcccgaggaaccaagacucgggacaucuugcgacauuuuuaccagcaguaaagggaagaaggcuucuaagggaggcaagaccugcggauuuguggaugaaaggggcuuguacaagucucuaaaaggagcauguaaacucaagcugugcggaguucucggacuuagacucauggacggaaccuggguuucgauucaaacaucagacgauaccaaaugguguccuccggaucaauuggugaaucuacaugacuuucacucagacgaaauagagcaucucgucguggaggaguuggucaagaagagggaagaguguuuggacgcauuggaguccauaaugaccaccaaaucugugaguuuuagacgucucagcuauuugagaaaacuugucccuggguuuggaaaggcauacacuauauucaacaagacuuugauggaggcugacgcccacuacaagucaguucggacuuggaacgagaucauccccucaaaaggguguuugaaagucagagagaggugucacccuccuguggacggaguguucuucaacggcauaauucuggguccggacgggaauguccugauaccugagaugcaaucgucucuacuucaacaacauauggagcuguuggagucuucuguaauccccuuaaugcaucccuuggcggacccgucaacagucuucaaggaaggggaugaagcggaggacuuuguugaaguucaccucccagauguucacaaacagaucucugggguugaccuuggucucccgaguugggggaaauaucuccugaugauugcagguggucuggcggcacuaguucugauaaucugcucgauggcaugcuguagaagaaccaagcgaacagagucaagaagacgaggcucuggagagucagaaaagaagguaacggcaaccccccaaacuaggaaagucguaucuucaugggaguuguacaagagugaaggcgaugccagguuguga

SEQ ID NO: 63704 - RNA, 1575 nt, Artificial Sequence
  derived and/or modified CDS sequence (wt) from glycoprotein__RABV__KM594041.1
augauccuucaggcccuucuguuugugccucuccuaaucucuucguugugucucgggaaauuccccaucuacacaauaccagacaagcuugguccuuggagccccaucgauauacaucaccucagcuguccaaauaauuuaguuguggaggacgaagggugcaccaaucuaucaggauucucuuacauggaacuaaaggugggauacaucucugccauaaaggugaacggguucacuuguaccgguguugugacagaggcugaaaccuauaccaacuuuguugguuaugucaccaccacauucaagaggaaacauuuccgcccuauaccggaugcaugcagggcugcauacaacuggaagauggcuggugauccuagauaugaggagucucuucaaaauccuuacccugauuaccacuggcuacggaccguaaaaaccacuaaggagucucuuaucaucauaucuccgaguguggcugauuuagacccauacgacaaaucccuucauucuaggguguucccuggugggaaauguuugggaauaacgguuucuuccaccuacugcucaaccaaccaugauuacaccaucuggaugcccgaggaaccaagacucgggacaucuugcgacauuuuuaccagcagcaaagggaaaaaggcaucuaaaggaggcaagacuugcggauuuguggaugaaaggggcuuguacaagucucuaaaaggagcauguaaacucaagcugugcggaguucucggacuuagacuuauggauggaaccuggguuucaauucaaacaucagacgauaccaaauggugcccuccggaucaauuggugaaucuacaugacuuucacucagacgaaauagagcaucucgucguggaggagcuggucaagaagagggaagaguguuuggacgcauuggagucuaucaugaccaccaaaucuguaaguuuuagacgucucagcuauuugagaaaacuugucccuggguuuggaaaggcauacacuauauucaacaagacuuugauggaggcugacgcccacuacaagucaguucggacuuggaacgagaucauccccucaaaaggguguuugaaagucagagagaggugucauccuccuguggacggaguguucuucaauggcauaauucuggguccggacgggaauguccugauaccagagaugcaaucgucucuacuucaacaacauauggagcuguuggagucuucuguaauccccuuaaugcaucccuuggcggacccgucaacagucuucaaggagggggaugaagcggaggauuuuguugaaguccaccucccagauguucacaaacagaucucagggguugaccuuggucucccgaguugggggaaauaucuucugaugauugcagguggucuggcgacacugguucugauaaucugcucaauggcaugcuguagaagaaccaagcgaacagagucaagaagacgaggcucucgagagucagagaaaaagguaacggcagccccccagacuaggaaagucguaucuucaugggaguuguacaagagugaaggcgaugccaggcuguga

SEQ ID NO: 63705 - RNA, 1575 nt, Artificial Sequence
  derived and/or modified CDS sequence (wt) from glycoprotein__RABV__KM594042.1
augauucuucaggcccuucuguuugugccucuccuaaucucuucauugugucucgggaaauuccccaucuauacaauaccagauaagcuugguccuuggagccccaucgauauacaucaccucagcuguccaaauaauuuaguuguggaggacgaggggugcaccaaucuaucaggguucucuuacauggaacuaaaggugggauacaucucugccauaaaggugaacggguucacuuguaccgguguggugacagaggcugaaaccuauaccaacuuuguugguuaugucaccaccacauucaagaggaaacauuuucgcccuguaccggaugcaugcagggcugcauacaacuggaagauggcuggugacccuagauaugaggagucucuucaaaauccuuauccugauuaccacuggcuacggaccgucaagaccacuaaggagucucuuaucaucauaucuccgaguguggcugaucuagacccauacgacaaaucccuccauucuaggguguucccuggugggaaguguuugggaauaacgguuucuuccaccuacugcucaaccaaccaugauuacaccaucuggaugcccgaggaaccaagacucgggacaucuugcgacauuuuuaccagcaguaaagggaagaaggcuucuaagggaggcaagacuugcggauuuguggaugaaaggggcuuguacaagucucuaaaaggagcauguaaacucaagcugugcggaguucucggacuuagacuuauggacggaaccuggguuucgauucaaacaucagacgauaccaaaugguguccuccggaucaauuggugaaucuacaugacuuucacucagacgagauagagcaucucgucguggaggaguuggucaagaagagggaagaguguuuggacgcauuggaguccauaaugaccaccaaaucugugaguuuuagacgucucagcuauuugagaaaacuugucccuggguuuggaaaggcauacacuauauucaacaagacuuugauggaggcugacgcccacuacaagucaguucggacuuggaacgagaucauccccucaaaaggguguuugaaagucagagagaggugucauccuccuguggacggaguguucuucaacggcauaauucuggguccggacgggaauguccugauaccugagaugcaaucgucucugcuucaacaacauauggagcuguuggagucuucuguaauccccuuaaugcaucccuuggcggacccgucaacagucuucaaggaaggggaugaagcggaggauuuuguugaaguucaccucccagauguucacaaacagaucucugggguugaccuuggucucccgaguugggggaaauaucuccugaugauugcagguggucuggcggcacuaguucugauaaucugcucgauggcaugcuguagaagaaccaagcgaacagagucaagaagacgaggcucuggagagucagaaaagaagguaacggcaaccccccaaacuaggaaagucguaucuucaugggaguuguacaagagugaaggcgaugccagguuguga

SEQ ID NO: 63706 - RNA, 1575 nt, Artificial Sequence
  derived and/or modified CDS sequence (wt) from glycoprotein__RABV__KM594043.1
augauccuucaggcccuucuguuugugccucuccuaaucucuucguugugccucgggaaauuccccaucuacacaauaccagacaagcuugguccuuggagccccaucgauauacaucaccucagcuguccaaauaauuuaguuguggaggacgaagggugcaccaaucuaucaggauucucuuacauggaacuaaaggugggauacaucucugccauaaaggugaacggguucacuuguaccgguguugugacagaggcugaaaccuauaccaacuuuguugguuaugucaccaccacauucaagaggaaacauuuccgcccuauaccggaugcaugcagggcugcauacaacuggaagauggcuggugauccuagauaugaggagucucuucaaaauccuuauccugauuaccacuggcuacggaccguaaagaccacuaaggagucucuuaucaucauaucuccgaguguggcugauuuagacccauacgacaaaucccuucauucuaggguguucccuggugggaaauguuugggaacaacgguuucuuccaccuacugcucaaccaaccaugauuacaccaucuggaugcccgaggaaccaagacucgggacaucuugcgacauuuuuaccagcaguaaagggaaaaaggcaucuaaaggaggcaagacuugcggauuuguggaugaaaggggcuuguacaagucucuaaaaggagcauguaaacucaagcugugcggaguucucggacuuagacuuauggauggaaccuggguuucaauucaaacaucagacgauaccaaauggugcccuccggaucaauuggugaaucuacaugacuuucacucagacgaaauagagcaucucgucguggaggaguuggucaagaagagggaagaguguuuggacgcauuggaguccaucaugacaaccaaaucuguaaguuuuagacgucucagcuauuugagaaaacuugucccuggguuuggaaaggcauacacuauauucaacaagacuuugauggaggcugacgcccacuacaagucaguucggacuuggaacgagaucauccccucaaaaggguguuugaaagucagagagaggugucauccuccuguggacggaguguucuucaauggaauaauucuggguccggacgggaauguccugauaccagagaugcaaucgucucuacuucaacaacauauggagcuauuggagucuucuguaauccccuuaaugcaucccuuggcggacccgucaacagucuucaaggaaggggaugaagcggaggauuuuguugaaguucaccucccagauguucacaaacagaucucagggguugaucuuggucucccgaguugggggagauaucuccugaugauugcagguggucuggcgacacuaguucugauaaucugcucgauggcaugcuguagaagaaccaagcgaacagagucaagaagacgagacucucgagagucagagaaaaagguaacgguaaccccccagacuaggaaagucguaucuucaugggaguuauacaagagugaaggcgaugccagucuguga

SEQ ID NO: 63707 - RNA, 1575 nt, Artificial Sequence
  derived and/or modified CDS sequence (wt) from glycoprotein__RABV__KP723638.1
augguucuucagacucuuuuguuuguacccuuucuggucuuuucauuguguuucgggaaauucccuauuuacacgauaccagacaaacuuggucccuggagcccgauugauauacaucaucuuagcugcccaaacaauuugguuguggaggacgaaggaugcaccaaccugucaggguucuccuacauggaacuuaaagucggauacaucucagccauaaaggugaacggguucacuugcacaggcguugugacagaggcagaaaccuacacuaacuuuguugguuaugucaccaccacguucaaaagaaagcauuuucgcccaacaccagaugcauguagagccgcguacaacuggaagauggccggugacccaagauaugaagagucucuacauaauccguacccugacuaucauuggcuucgaacuguaaaaaccacuaaggagucucuuguuaucauauccccaaguguggcagauuuggacccauaugacaaaucccuucacucgagggucuucccuaguggaaaguguucaggaauaacggugucuucuacuuacugcucuacuaaccaugacuacaccauuuggaugccugagaauccgagacuggggacaucuugugacauuuuugccaauagcagagggaagagagcauccaaagggaguaaaaccugcggcuuuguagaugaaagaggccuguacaagucccuaaaaggagcaugcaaacucaaguuauguggaguucuuggacuuagacuuauggauggaacaugggucgcgaugcaaacaucagaggagaccaaaugguguccucccgaucaguuggugaaucugcacgacuuucguucggaugaaauugagcaucuuguuguagaggaguuggucaagaaaagagaagagugucuggaugcacuagaguccaucaugaccaccaagucagugaguuucagacgucucagucauuugagaaaacuuguuccuggguucggaaaagccuauaccauauucaacaagaccuugauggaggcugaugcucacuacaagucaguccggacuuggaaugagaucauccccucaaaagggugcuuaagaguuggagggaggugucauccccaugugaacgggguauuuuucaaugguauaauauuagguccugacggccauguucuaaucccagagaugcaaucaucccuccuccagcagcauauggaguuauuggaauccucagucauuccccugaugcacccccuugcagacccguccacaguuuucaaggacggugaugaggccgaggauuucguggaaguucaccuucccgaugugcacaaacaggucucagggguugaccugggucucccgaacugggggaaguauguauuacuaagugcgggaacccugauugucuugauguugauaauuuuccuaaugacauguuguagaagagucaaucgaccaaaaccuacacaacguagucucggagggacggggaggaaggugucgguaaccucccaaagcgggaaggucauaucuucaugggagucauauaaaagugggagugagacuagacuguga

SEQ ID NO: 63708 - RNA, 1575 nt, Artificial Sequence
  derived and/or modified CDS sequence (wt) from glycoprotein__RABV__KR105372.1
augguuccucagguucuuuuguuuguaccccuucuggguuuuucguuguguuucgggaaguuccccauuuacacgauaccagacgaacuuggucccuggagcccuauugacauacaccaucucagcuguccaaauaaccugguuguggaggaugaaggauguaccaaccuguccgaguucuccuacauggaacucaaagugggauacaucucagccaucaaagugaacggguucacuugcacagguguugugacagaggcagagaccuacaccaacuuuguugguuaugucacaaccacauucaagagaaagcauuuccgccccaccccagacgcauguagagccgcguauaacuggaagauggccggugaccccagauaugaagagucccuacacaauccauaccccgacuaccacuggcuucgaacuguaagaaccaccaaagagucccucauuaucauauccccaagugugacagauuuggacccauaugacaaaucccuucacucaagggucuucccuggcggaaagugcucaggaauaacgguguccucuaccuacugcucaacuaaccaugauuacaccauuuggaugcccgaggauccgagaccaaggacaccuugugacauuuuuaccaauagcagagggaagagagcauccaaagggaacaagacuugcggcuuuguggaugaaagaggccuguauaagucucuaaaaggagcaugcaggcucaaguuauguggaguucuuggacuuagacuuauggauggaacaugggucgcgaugcaaacaucagaugagaccaaauggugcccuccagaucaguuggugaauuugcacgacuuucacucagacgagauugagcaucucguuguggaggaguuagucaagaaaagagaggaaugucuggaugcauuagaguccaucaugaccaccaagucaguaaguuucagacgucucagucaccugagaaaacuugucccaggguuuggaaaagcauauaccauauucaacaaaaccuugauggaggcugaugcucacuacaagucaguccggaccuggaaugagaucauccccucaaaaggguguuugaaaguuggaggaaggugccauccucaugugaacgggguguuuuucaaugguauaauauuagggccugacggccauguccuaaucccagagaugcaaucaucccuccuccagcaacauauggaguuguugaaaucuucaguuaucccccugaugcacccccuggcagacccuucuacaguuuucaaagaaggugaugaggcugaggauuuuguugaaguucaccuccccgauguguacaaacggaucucagggguugaccugggucucccgaacuggggaaaguauguauugaugacugcaggggccaugauuggccugguguugauauuuucccuaaugacauggugcagaagagccaaucgaccagaaucgaaacaacgcaguuuuggagggacagggaggaaugugucagucacuucccaaagcggaaaagucauaccuucaugggaaucauauaagaguggaggugagaccagacuguga

SEQ ID NO: 63709 - RNA, 1575 nt, Artificial Sequence
  derived and/or modified CDS sequence (wt) from glycoprotein__RABV__KR906734.1
augguuccucaagcucuuuuguuuguaccccuuuugguuuuuccauuguguuucgggaaauucccuaucuacacgauaccagacaaacuuggacccuggagcccgauugacauacaucaucucagcugcccaaacaauuugguuguggaggacgaaggaugcaccaaccugucaggguucuccuacauggaacuuaaaguuggauacaucucagccauaaaggugaacggguucacuugcacaggcguugugacagaggcugaaaccuacacuaacuuuguagguuaugucaccaccacguucaaaagaaagcauuuccgcccaauaccagaugcauguagagccgcauauaacuggaagauggccggugaccccagauaugaagagucucuacacaauccguacccugacuaccauuggcuucgaacuguaaaaaccaccaaggagucucucguuaucauauccccaaguguggcggauuuggacccauacgacaaaucccuucacucgagggucuucccuagugggaaaugcucaggaauaacggugucuuccaccuacugcucaacuaaccaugauuacaccauuuggaugccugagaauccgagacuagggacgucuugcgacauuuucaccaauaguagagggaagagagcauccaaaggggguaagaccugcggcuuuguagaugaaagaggccuguauaagucucuaaggggggcaugcaaacucaaguuauguggaguucuuggacuuagacucauggauggaacaugggucgcaaugcaaacaucagaugagaccaaaugguguccuccugaucaguuggugaauaugcacgacuuucgcucggaugaaauugagcaucuuguuguagaggaguuggucaagaaaagagaggagugucuggaugcauuagaguccaucaugaccacuaagucagugaguuucagacgucucagucauuuaagaaaacuugucccuggauucggaaaagcauacaccauauucaacaagaccuugauggaggcugaugcucacuacaagucaguccggacuuggaaugagaucauccccucaaaaggguguuuaagaguuggagggaggugucauccucauguaaacgggguguuuuucaaugguauaauauuagggccugacggccauguucuaauccccgagaugcaaucaucccuccuucagcaacauauggaguuauuggaauccucaguuauuccccugaugcacccccuggcagacccguccacuguuuucaaggagggugaugaggcugaggauuuuguagagguucaccuuccugaugugcacaaacaggucucggggguugacuuaggucucccgaacugggggaaauauguauuacugagugcagggacccugauugcuuugauguugauaauuuuucuaaugacauguuguagaagagucaaucgaccagaaccuacgcaacgcagucuaggagggacagggagaaaggugucggucacuucccaaagcgggaaggucauaucuucaugggagucauauaaaagugggggggagacuagacuguaa

SEQ ID NO: 63710 - RNA, 1575 nt, Artificial Sequence
  derived and/or modified CDS sequence (wt) from glycoprotein__RABV__KR906735.1
augguuccucaaacucuuuuauuuguaccccuuuugguuuucucauuguguuucgggaaauucccuaucuacacgauaccagacaaacuuggacccuggagcccgauugacauacaucaucucagcugcccaaacaauuugguuguggaggacgaaggaugcaccaaccugucaggguucuccuacauggaacuuaaaguuggauacaucucagccauaaaggugaacggguucacuugcacaggcguugugacagaggcugaaaccuacacuaauuuuguagguuaugucaccaccacguucaaaagaaagcauuuccgcccaauaccagaugcauguagagccgcauacaacuggaagauggccggugaccccagauaugaagagucucuacacaauccauacccugacuaccauuggcuucgaacuguaaagaccaccaaggagucucucguuaucauauccccaaguguggcggauuuagacccauaugacaaaucccuucacucgagggucuucccuagcgggaaaugcucaggaauaacggugucuucuaccuacugcucaacuaaccaugauuacaccauuuggaugccugagaauccgagacuagggacgucuugcaacauuuuuacuaauaguagggggaagagagcauccaaagggggcaagaccugcggcuuugucgaugaaagaggccuguauaagucucugaagggagcaugcaaacucaaguuauguggaguucuuggacuuagacucauggauggaacauggguugcgaugcaaacaucagaugagaccaaaugguguccuccugaucaguuggugaauaugcacgacuuucgcucggaugaaaucgagcaucuuguuguagaagaauuggucaagaaaagagaggagugucuggaugcacuagaguccaucaugaccaccaagucagugaguuuuagacgucucagucaucuaagaaaacuugucccuggguucggaaaagcauacaccauauucaacaagaccuugauggaggcugaugcucacuacaagucaguccggacuuggaaugagaucauccccucaaaaggguguuuaagaguuggagggaggugucacccucauguaaacgggguguuuuucaaugguauaauauuagggccugacggccauguucuaauccccgagaugcaaucuucccuccuucagcaacauauggaguuguuggaauccucaguuauuccccugaugcacccccuggcagacccguccacaguuuucaaggauggugaugaggcggaggauuuuguagagguucaccuuccugaugugcacaaacaggucucggggguugaccugggucucccgaacugggggaaauauguauuacugagugcagggacccugauugcuuugauguugauaauuuuucuaaugacauguuguagaagagucaaucgaccagaaucuacgcaacgcagucucggagggacaaggaggaaggugucggucacuucccaaagcgggaagguuauaucuucaugggagucauauaaaagugggggugagacuagacuguaa

SEQ ID NO: 63711 - RNA, 1575 nt, Artificial Sequence
  derived and/or modified CDS sequence (wt) from glycoprotein__RABV__KR906736.1
augguuccucaaacucuuuuauuuguaccccuuuugguuuucucauuguguuucgggaaauucccuaucuacacgauaccagacaaacuuggacccuggagcccgauugacauacaucaucucagcugcccaaacaauuugguuguggaggacgaaggaugcaccaaccugucaggguucuccuacauggaacuuaaaguuggauacaucucagccauaaaggugaacggguucacuugcacaggcguugugacagaggcugaaaccuacacuaauuuuguagguuaugucaccaccacguucaaaagaaagcauuuccgcccaauaccagaugcauguagagccgcauacaacuggaagauggccggugaccccagauaugaagagucucuacacaauccauacccugacuaccauuggcuucgaacuguaaagaccaccaaggagucucucguuaucauauccccaaguguggcggauuuagacccauaugacaaaucccuucacucgagggucuucccuagcgggaaaugcucaggaauaacggugucuucuaccuacugcucaacuaaccaugauuacaccauuuggaugccugagaauccgagacucgggacgucuugcaacauuuuuacuaauaguagggggaagagagcauccaaagggggcaagaccugcggcuuugucgaugaaagaggccuguauaagucucugaagggagcaugcaaacucaaguuauguggaguucuuggacuuagacucauggauggaacauggguugcgaugcaaacaucagaugagaccaaaugguguccuccugaucaguuggugaauaugcacgacuuucgcucggaugaaaucgagcaucuuguuguagaagaauuggucaagaaaagagaggagugucuggaugcacuagaguccaucaugaccaccaagucagugaguuuuagacgucucagucaucuaagaaaacuugucccuggguucggaaaagcauacaccauauucaacaagaccuugauggaggcugaugcucacuacaagucaguccggacuuggaaugagaucauccccucaaaaggguguuuaagaguuggagggaggugucacccucauguaaacgggguguuuuucaaugguauaauauuagggccugacggccauguucuaauccccgagaugcaaucuucccuccuucagcaacauauggaguuguuggaauccucaguuauuccccugaugcacccccuggcagacccguccacaguuuucaaggauggugaugaggcggaggauuuuguagagguucaccuuccugaugugcacaaacaggucucggggguugaccugggucucccgaacugggggaaauauguauuacugagugcagggacccugauugcuuugauguugauaauuuuucuaaugacauguuguagaagagucaaucgaccagaaucuacgcaacgcagucucggagggacaaggaggaaggugucggucacuucccaaagcgggaagguuauaucuucaugggagucauauaaaagugggggugagacuagacuguaa

SEQ ID NO: 63712 - RNA, 1575 nt, Artificial Sequence
  derived and/or modified CDS sequence (wt) from glycoprotein__RABV__KR906737.1
augguuccucaagcucuuuuguuuguaccccuuuugguuuuuccauuguguuucgggaaauucccuaucuacacaauaccagacaaacucggacccuggagcccgauugacauacaucaucucagcugcccaaacaauuugguuguggaggacgaaggaugcaccaaccugucaggguucuccuauauggaacuuaaaguuggauacaucucagcuauaaaggugaacggguucacuugcacaggcguugugacagaggcugaaaccuacacuaacuuuguagguuaugucaccaccacauucaaaagaaagcauuuccgcccaauaccagaugcauguagagccgcauacaacuggaagauggccggugaccccagauaugaagagucucuacacaauccauacccugacuaccauuggcuucgaacuguaaaaaccaccaaggagucucucguuaucauauccccgaguguggcggauuuagacccauaugacaaaucccuucacucgagggucuucacuagcggaaaaugcucgggaauaacggugucuuccaccuacugcucaacuaaccaugauuacaccauuuggaugccugagaauccuagacuagggacgucuugcaacauuuuugucaauaguaaggggaagagagcauccaaaggggguaaaaccugcggcuuuguagaugaaagaggccuguauaagucucuaaagggagcaugcaaacucaaguuauguggaguucuuggacuuagacuuauggauggaacauggguugcgaugcaaacaucagaugagaccaaaugguguucuccugaucaguuggugaauaugcacgacuuucgcucggaugaaauugagcaucuuguuguggaggaauuggucaagaaaagagaggagugucuggaugcacuagaguccaucaugaccaccaagucagugaguuucagacgucucagucauuuaagaaaacuugucccuggguucgggaaagcauacaccauauucaauaagaccuugauggaggcugaugcucacuacaagucaguccggacuuggaaugagaucaucccaucaaaaggguguuuaagaguuggagggaggugucacccucauguaaacgggguguuuuucaaugguauaauauuagggccugacggccauguucuaauccccgagaugcaauccucucuccuucagcaacauauggaguuguuggaauccucaguuauuccccugaugcacccccuggcagacccguccacaguuuucaaggauggugaugaggcugaggauuuuguagagguucaccuuccugaugugcacaaacaggucucggggguugaccugggucucccaaacugggggaaauauguauuacugagugcaggaacccugauugcuuugauguugauaauuuuucuaaugacauguuguagaagagucaaucgaccagaaucuacgcaacgcagucucggagggacagggaggaaggugucggucacuucccaaagcgggaaggucauaucuucaugggagucauauaaaagugggggugagacuagacuguaa

SEQ ID NO: 63713 - RNA, 1575 nt, Artificial Sequence
  derived and/or modified CDS sequence (wt) from glycoprotein__RABV__KR906738.1
augguuccucaagcucuuuuguuuguaccccuuuugguuuuuccauuguguuucgggaaauucccuaucuacacaauaccagacaaacucggacccuggagcccgauugacauacaucaucucagcugcccaaacaauuugguuguggaggacgaaggaugcaccaaccugucaggguucuccuauauggaacuuaaaguuggauacaucucagcuauaaaggugaacggguucacuugcacaggcguugugacagaggcugaaaccuacacuaacuuuguagguuaugucaccaccacauucaaaagaaagcauuuccgcccaauaccagaugcauguagagccgcauacaacuggaagauggccggugaccccagauaugaagagucucuacacaauccauacccugacuaccauuggcuucgaacuguaaaaaccaccaaggagucucucguuaucauauccccgaguguggcggauuuagacccauaugacaaaucccuucacucgagggucuucacuagcgggaaaugcucgggaauaacggugucuuccaccuacugcucaacuaaccaugauuacaccauuuggaugccugagaauccuagacuagggacgucuugcaacauuuuugucaauaguaaggggaagagagcauccaaaggggguaaaaccugcggcuuuguagaugaaagaggccuguauaagucucuaaagggagcaugcaaacucaaguuauguggaguucuuggacuuagacuuauggauggaacauggguugcgaugcaaacaucagaugagaccaaaugguguucuccugaucaguuggugaauaugcacgacuuucgcucggaugaaauugagcaucuuguuguggaggaauuggucaagaaaagagaggagugucuggaugcacuagaguccaucaugaccaccaagucagugaguuucagacgucucagucauuuaagaaaacuugucccuggguucgggaaagcauacaccauauucaauaagaccuugauggaggcugaugcucacuacaagucaguccggacuuggaaugagaucaucccaucaaaaggguguuuaagaguuggagggaggugucacccucauguaaacgggguguuuuucaaugguauaauauuagggccugacggccauguucuaauccccgagaugcaauccucccuccuucagcaacauauggaguuguuggaauccucaguuauuccccugaugcacccccuggcagacccguccacaguuuucaaggauggugaugaggcugaggauuuuguagagguucaccuuccugaugugcacaaacaggucucggggguugaccugggucucccgaacugggggaaauauguauuacugagugcaggaacccugauugcuuugauguugauaauuuuucuaaugacauguuguagaagagucaaucgaccagaaucuacgcaacgcagucucggagggacagggaggaaggugucggucacuucccaaagcgggaaggucauaucuucaugggagucauauaaaagugggggugagacuagacuguaa

SEQ ID NO: 63714 - RNA, 1575 nt, Artificial Sequence
  derived and/or modified CDS sequence (wt) from glycoprotein__RABV__KR906739.1
augguuccucaagcucuuuuguuuguaccccuuuugguuuuuccauuguguuucggaaaauucccuaucuacacgauaccagacaaacuuggacccuggagcccgauugacauacaucaucucagcugcccaaacaauuugguuguggaggacgaaggaugcaccaaccugucaggguucuccuacauggaacuuaaaguuggauacaucucagccauaaaggugaacggguucacuugcacaggcguugugacagaggcugaaaccuacacuaacuuuguagguuaugucaccaccacguucaaaagaaagcauuuccgcccaauaccagaugcauguagagccgcauauaacuggaagauggccggugaccccagauaugaagagucucuacacaauccguacccugacuaccauuggcuucgaacuguaaaaaccaccaaggagucucucguuaucauauccccaaguguggcggauuuggacccauaugacaaaacccuucacucgagggucuucccuagugggaaaugcucaggaauaacggugucuuccaccuauugcucgacuaaccaugauuacaccauuuggaugccugagaauccgagacuagggacgucuugcgacauuuuuaccaauaguagagggaagagagcauccaaaggggguaagaccugcggcuuuguagaugaaagaggccuguauaagucucuaaagggggcaugcaaacucaaguuauguggaguucuuggacuuagacucauggauggaacaugggucgcgaugcaaacaucagaugagaccaaaugguguccuccugaucgguuggugaauaugcacgacuuucgcucggaugaaauugagcaucuuguuguagaggaguuggucaagaaaagagaggagugucuggaugcacuagaguccaucaugaccaccaagucagugaguuucagacgucucagucauuuaagaaaacuugucccuggauucggaaaagcauacaccauauucaacaagaccuugauggaggcugaugcucacuacaagucaguccggacuuggaaugagaucauccccucaaaaggguguuuaagaguuggagggaggugucauccucauguaaacgggguguuuuucaaugguauaauauuagggccugacggccauguucuaauccccgagaugcaaucaucccuccuucagcaacauauggaguuauuggaauccucaguuauuccccugaugcacccccuggcagacccguccacaguuuucaaggauggugaugaggcugaggauuuuguagagguucaccucccugaugugcacaaacaggucucggggguugacuuaggucucccgaacugggggaaauauguauuacugagugcagggacccugauugcuuugauguugauaauuuuucuaaugacauguuguagaagagucaaucgaccagaaccuacgcaacgcagucuaggagggacagggaggaaggugucggucacuucccaaagcgggaaggucauaucuucaugggagucguauaaaagugggggugagacuaaacuguaa

SEQ ID NO: 63715 - RNA, 1575 nt, Artificial Sequence
  derived and/or modified CDS sequence (wt) from glycoprotein__RABV__KR906740.1
augguuccucaagcucguuuguuuguaccccuuuugguuuuuccauuguguuucgggaaauucccuaucuacacgauaccagacaaacucggacccuggagcccgauugacauacaucaucucagcugcccaaacaauuugguuguggaggacgaaggaugcaccaaccugucaggguucuccuacauggaacuuaaaguuggauacaucucagccauaaaggugaacggguucacuugcacaggcguugugacagaagcugaaaccuacacuaacuuuguagguuaugucaccaccacguucaaaagaaagcauuuccgcccaauaccagaugcauguagagcugcauacaacuggaagauggccggugaccccagauaugaagagucucuacacaauccauacccugacuaucauuggcuucgaacuguaaaaaccaccaaggagucucucguuaucauauccccgaguguggcggauuuagacccauaugacagaucccuucacucgagggucuucacuggcgggaaaugcucgggaauaacggugucuuccaccuacugcucaacuaaccaugauuacaccauuuggaugccugagaauccgagacuagggacguccugcaacauuuuugccaauaguaaggggaagagagcauccaaaggggguaaaaccugcggcuuuguagaugaaagaggccuguauaagucucuaaagggagcaugcaaacucaaguuauguggaguucuuggacuuagacucauggauggaacauggguugcgaugcaaacaucagaugagaccaaaugguguccuccugaucaguuggugaauaugcacgacuuucgcucggaugaaauugagcaucuugucguagaggaauuggucaagaaaagagaggagugucuggaugcacuagaguccaucaugacuacuaagucagugaguuucagacgucucagucauuuaagaaaacuugucccuggguucggaaaagcauacaccauauucaauaagaccuugauggaggccgaugcucacuacaagucaguccggacuuggaaugagaucauccccucaaaaggguguuuaagaguuggagggaggugucacccucaugugaacgggguguuuuucaaugguauaauauuagggccugacggccauguucuaauccccgagaugcaauccucccuccuucagcaacauauggaguuguuggagucuucaguuauuccccugaugcacccccuggcagacccguccacaguuuucaaggauggugaugaagcugaggauuuuguagagguucaccuuccugaugugcacaaacaggucucggggguugaccugggucucccgaacugggggaaauauguauugcugagugcaggaacccugauugcuuugauguugauaauuuuucuaaugacauguuguagaagagucagucgaccagaaucuacgcaacgcagucucggaaggauagggaggaaggugucggucacuucccaaagcgggaaggucauaucuucaugggagucauauaaaagugggggugagacuagacuguaa

SEQ ID NO: 63716 - RNA, 1575 nt, Artificial Sequence
  derived and/or modified CDS sequence (wt) from glycoprotein__RABV__KR906741.1
augguuccucaagcucuuuuguuuguaccccuuuugguuuuucccuuguguuucgggaaauucccuaucuacacgauaccagacaaacucggacccuggagcccgauugacauacaucaucucagcugcccaaacaauuugguuguggaggacgaaggaugcacuaaccugucaggguucuccuacauggaacuuaaaguuggauacaucucagccauaaaggugaacggguucacuugcacaggcguugugacagaagcugaaaccuacacuaacuuuguagguuaugucaccaccacguucaaaagaaagcauuuccgcccaauaccagaugcauguagagccgcauacaacuggaagauggccggugaccccagauaugaagagucucuacacaauccauacccugacuaccauuggcuucgaacuguaaaaaccaccaaggagucucucguuaucauauccccgaguguggcggauuuagacccauaugacaaaucccuccacucgagggucuucacuagcgggaaaugcucgggaauaacggugucuuccaccuacugcucaacuaaccaugauuacaccauuuggaugccugagaauccgagacuagggacgucuugcaacaucuuugccaauaguaaggggaagagagcauccaaaggggguaaaaccugcggcuuuguagaugaaagaggccuguauaagucucuaaagggagcaugcaaacucaaguuauguggaguucuuggacuuagacucauggauggaacauggguugcgaugcagacaucagaugagaccaaaugguguccuccugaucaguuggugaacaugcacgacuuucgcucggaugaaauugagcaucuuguuguagaggaauuggucaagaaaagagaggagugucuggaugcacuagaguccaucaugaccaccaagucagugaguuucagacgucucagucauuuaagaaaacuugucccuggguucggaaaagcauacaccauauucaauaagaccuugauggaggcugaugcucacuacaagucaguccggacuuggaaugagaucauccccucaaaaggguguuuaagaguuggagggaggugucacccucauguaaacgggguguuuuucaaugguauaauauuagggccugacggccauguucuaauccccgagaugcaauccucccuccuucagcaacauauggaguuguuggaauccucaguuauuccccugaugcacccccuggcagacccguccacaguuuucaaggauggugaugaggcugaggauuuuguggagguucaccuuccugaugugcacaaacaggucucggggguugaccugggucucccgaacugggggaaauauguauuacugagugcaggaacccugauugcuuugauguugauacuuuuucuaaugacauguuguagaagagucaaucgaccagaaucuacgcaacgcagucucggagggacagggaggaaggugucggucacuucccaaagcgggaaggucauaucuucaugggagucauauaaaagugggggugagacuagacuguaa

SEQ ID NO: 63717 - RNA, 1575 nt, Artificial Sequence
  derived and/or modified CDS sequence (wt) from glycoprotein__RABV__KR906742.1
augguuccucaagcucguuuguuuguaccccuuuugguuuuuccauuguguuucgggaaauucccuaucuacacgauaccagacaaacucggacccuggagcccgauugacauacaucaucucagcugcccaaacaauuugguuguggaggacgaaggaugcaccaaccugucaggguucuccuacauggaacuuaaaguuggauacaucucagccauaaaggugaacggguucacuugcacaggcguugugacagaagcugaaaccuacacuaacuuuguagguuaugucaccaccacguucaaaagaaagcauuuccgcccaauaccagaugcauguagagcugcauacaauuggaagauggccggugaccccagauaugaagagucucuacacaauccauacccugacuaucauuggcuucgaacuguaaaaaccaccaaggagucucucguuaucauauccccgaguguggcggauuuagacccauaugacagaucccuucacucgagggucuucacuggcgggaaaugcucgggaauaacggugucuuccaccuacugcucaacuaaccaugauuacaccauuuggaugccugagaauccgagacuagggacguccugcaacauuuuugccaauaguaaggggaagagagcauccaaaggggguaaaaccugcggcuuuguagaugaaagaggccuguacaagucucuaaagggagcaugcaaacucaaguuauguggaguucuuggacuuagacucauggauggaacauggguugcgaugcaaacaucagaugagaccaaaugguguccuccugaucaguuggugaauaugcacgacuuucgcucggaugaaauugagcaucuugucguagaggaauuggucaagaaaagagaggagugucuggaugcacuagaguccaucaugacuacuaagucagugaguuucagacgucucagucauuuaagaaaacuugucccuggguucggaaaagcauacaccauauucaauaagaccuugauggaggcugaugcucacuacaagucaguccggacuuggaaugagaucauccccucaaaaggguguuuaagaguuggagggaggugucacccucaugugaacgggguguuuuucaaugguauaauauuagggccugacggccauguucuaauccccgagaugcaauccucccuccuucagcaacauauggaguuguuggagucuucaguuauuccccugaugcacccccuggcagacccguccacaguuuucaaggauggugaugaagcugaggauuuuguagagguucaccuuccugaugugcacaaacaggucucggggguugaccugggucucccgaacugggggaaauauguauugcugagugcaggaacccugauugcuuugauguugauaauuuuucuaaugacauguuguagaagagucagucgaccagaaucuacgcaacgcagucucggaaggacagggaggaaggugucggucacuucccaaagcgggaaggucauaucuucaugggagucauauaaaagugggggugagacuagacuguaa

SEQ ID NO: 63718 - RNA, 1575 nt, Artificial Sequence
  derived and/or modified CDS sequence (wt) from glycoprotein__RABV__KR906743.1
augguuccucaagcucuuuuguuuguaccccuuuugguuuuuccauuguguuucgggaaauucccuaucuacacgauaccagacaaacuuggacccuggagcccgauugacauacaucaucucagcugcccaaacaauuugguuguggaggacgaaggaugcaccaaccugucaggguucuccuacauggaacuuaaaguuggauacaucucagccauaaaggugaacggguucacuugcacaggcguugugacagaggcugaaaccuacacuaacuuuguagguuaugucaccaccacguucaaaagaaagcauuuccgcccaauaccagaugcauguagagccgcauauaacuggaagauggccggugaccccagauaugaagagucucuacacaauccguacccugacuaccauuggcuucgaacuguaaaaaccaccaaggagucucucguuaucauauccccaaguguggcggauuuggacccauacgacaaaucccuucacucgagggucuucccuagugggaaaugcucaggaauaacggugucuuccaccuacugcucaacuaaccaugauuacaccauuuggaugccugagaauccgagacuagggacgucuugcgacauuuucaccaauaguagagggaagagagcauccaaaggggguaagaccugcggcuuuguagaugaaagaggccuguauaagucucuaaggggggcaugcaaacucaaguuauguggaguucuuggacuuagacucauggauggaacaugggucgcgaugcaaacaucagaugagaccaaaugguguccuccugaucaguuggugaauaugcacgacuuucgcucggaugaaauugagcaucuuguuguagaggaguuggucaagaaaagagaggagugucuggaugcauuagaguccaucaugaccacuaagucagugaguuucagacgucucagucauuuaagaaaacuugucccuggauucggaaaagcauacaccauauucaacaagaccuugauggaggcugaugcucacuacaagucaguccggacuuggaaugagaucauccccucaaaaggguguuuaagaguuggagggaggugucauccucauguaaacgggguguuuuucaaugguauaauauuagggccugacggccauguucuaauccccgagaugcaaucaucccuccuucagcaacauauggaguuauuggaauccucaguuauuccccugaugcacccccuggcagacccguccacuguuuucaaggagggugaugaggcugaggauuuuguagagguucaccuuccugaugugcacaaacaggucucggggguugacuuaggucucccgaacugggggaaauauguauuacugagugcagggacccugauugcuuugauguugauaauuuuucuaaugacauguuguagaagagucaaucgaccagaaccuacgcaacgcagucuaggagggacagggaggaaggugucggucacuucccaaagcgggaaggucauaucuucaugggagucauauaaaagugggggggagacuagacuguaa

SEQ ID NO: 63719 - RNA, 1575 nt, Artificial Sequence
  derived and/or modified CDS sequence (wt) from glycoprotein__RABV__KR906744.1
augguuccucaagcucuuuuguuuguaccccuuuugguuuuuccauuguguuucggaaaauucccuaucuacacgauaccagacaaacuuggacccuggagcccgauugacauacaucaucucagcugcccaaacaauuugguuguggaggacgaaggaugcaccaaccugucaggguucuccuacauggaacuuaaaguuggauacaucucagccauaaaggugaacggguucacuugcacaggcguugugacagaggcugaaaccuacacuaacuuuguagguuaugucaccaccacguucaaaagaaagcauuuccgcccaauaccagaugcauguagagccgcauauaacuggaagauggccggugaccccagauaugaagagucucuacacaauccguacccugacuaccauuggcuucgaacuguaaaaaccaccaaggagucucucguuaucauauccccaaguguggcggauuuggacccauaugacaaaacccuucacucgagggucuucccuagugggaaaugcucaggaauaacggugucuuccaccuauugcucgacuaaccaugauuacaccauuuggaugccugagaauccgagacuagggacgucuugcgacauuuuuaccaauaguagagggaagagagcauccaaaggggguaagaccugcggcuuuguagaugaaagaggccuguauaagucucuaaagggggcaugcaaacucaaguuauguggaguucuuggacuuagacucauggauggaacaugggucgcgaugcaaacaucagaugagaccaaaugguguccuccugaucaguuggugaauaugcacgacuuucgcucggaugaaauugagcaucuuguuguagaggaguuggucaagaaaagagaggagugucuggaugcacuagaguccaucaugaccaccaagucagugaguuucagacgucucagucauuuaagaaaacuugucccuggauucggaaaagcauacaccauauucaacaagaccuugauggaggcugaugcucacuacaagucaguccggacuuggaaugagaucauccccucaaaaggguguuuaagaguuggagggaggugucauccucauguaaacgggguguuuuucaaugguauaauauuagggccugacggccauguucuaauccccgagaugcaaucaucccuccuucagcaacauauggaguuauuggaauccucaguuauuccccugaugcacccccuggcagacccguccacaguuuucaaggauggugaugaggcugaggauuuuguagagguucaccucccugaugugcacaaacaggucucggggguugacuuaggucucccgaacugggggaaauauguauuacugagugcagggacccugauugcuuugauguugauaauuuuucuaaugacauguuguagaagagucaaucgaccagaaccuacgcaacgcagucuaggagggacagggaggaaggugucggucacuucccaaagcgggaaggucauaucuucaugggagucauauaaaagugggggugagacuaaacuguaa

SEQ ID NO: 63720 - RNA, 1575 nt, Artificial Sequence
  derived and/or modified CDS sequence (wt) from glycoprotein__RABV__KR906745.1
augguuccucaagcucuuuuguuuguaccccuuuugguuuuuccauuguguuucgggaaauucccuaucuacacgauaccagacaaacucggacccuggagcccgauugacauacaucaucucagcugcccaaacaauuugguuguggaggacgaaggaugcaccaaccugucaggguucuccuauauggaacuuaaaguuggauacaucucagcuauaaaggugaacggguucacuugcacaggcguugugacagaagcugaaaccuacacuaacuuuguagguuaugucaccaccacguucaaaagaaagcauuuccgcccaauaccagaugcauguagagccgcauacaacuggaagauggccggugaccccagauaugaagagucucuacacaauccauacccugacuaccauuggcuucgaacuguaaaaaccaccaaggagucucucguuaucauauccccgaguguggcggauuuagacccauaugacaaaucccuucacucgagggucuucacuagcgggaaaugcucgggaauaacggugucuuccaccuacugcucaacuaaccaugauuacaccauuuggaugccugagaauccgagacuagggacgucuugcaacauuuuugucaauaguaaggggaagagagcauccaaaggggguaaaaccugcggcuuuguagaugaaagaggccuguauaagucucuaaagggagcaugcaaacucaaguuauguggaguucuuggacuuagacuuauggauggaacauggguugcgaugcaaacaucagaugagaccaaaugguguucuccugaucaguuggugaauaugcacgacuuucgcucggaugaaauugagcaucuuguuguagaggaauuggucaagaaaagagaggagugucuggaugcacuagaguccaucaugaccaccaagucagugaguuucagacgucucagucauuuaagaaaacuugucccuggguucgggaaagcauacaccauauucaauaagaccuugauggaggcugaugcucacuacaagucaguccggacuuggaaugagaucauccccucaaaaggguguuuaagaguuggagggaggugucacccucauguaaacgggguguuuuucaaugguauaauauuagggccugacggccauguucuaauccccgagaugcaauccucccuccuucagcaacauauggaguuguuggaauccucaguuauuccccugaugcacccccuggcagacccguccacaguuuucaaggauggugaugaggcugaggauuuuguagagguucaccuuccugaugugcacaaacaggucucggggguugaccugggucucccgaacugggggaaauauguauuacugagugcaggaacccugauugcuuugauguugauaauuuuucuaaugacauguuguagaagagucaaucgaccagaaucuacgcaacgcagucucggagggacagggaggaaggugucggucacuucccaaagcgggaaggucauaucuucaugggagucauauaaaagugggggugagacuagauuguaa

SEQ ID NO: 63721 - RNA, 1575 nt, Artificial Sequence
  derived and/or modified CDS sequence (wt) from glycoprotein__RABV__KR906746.1
augguuccucaggcucuuuuguuuguaacccuuuugguuuuuucauuguguuucgggaaauucccuaucuacacgauaccagacaaacuuggacccuggagcccgauugacauacaucaucucagcugcccaaacaauuugguuguggaggacgaaggaugcaccaaccugucaggguucucuuacauggaacuuaaaguuggauacaucucagccauaaaggugaacggguucacuugcacaggcguugugacagaggcugaaaccuacacuaacuuuguagguuaugucaccaccacguucaaaagaaagcauuuccgcccaauaccagaugcauguagagccgcauacaacuggaagauggcaggugaccccagauaugaagagucucuacacaauccguacccugacuaccacuggcuucgaacuguaaaaaccaccaaggagucucucguuaucauauccccaaguguggcggauuuggacccauaugacaaaucccuucacucgagggucuucccuggcgggaagugcucagggauaacggugucuucuaccuucugcucaacuaaccacgauuacaccauuuggaugccugaaaauccgagacuagggacgucuugcgacauuuuugccaacaguagagggaagagagcaucuaaaggggguaagaccugcggcuuuguagaugaaagaggccuguauaagucucuaaagggagcauguaaacucaaguuauguggaguucuuggacuuagacucauggauggaacaugggucgcgaugcaaacaucagaugagaccaaaugguguccuccugaucaguuggugaauaugcacgacuuucgcucggaugaaauugagcaucuuguuguagaggaguuaguuaagaaaagagaggagugucuggaugcacuagaguccaucaugaccacuaagucagugaguuucagacgucucagucauuuaagaaaacuugucccuggguucggaaaggcauacaccauguuuaacaagaccuugauggaggcugaugcucacuacaagucaguccggacuuggaaugagaucauccccucaaagggguguuuaagaguuggagggaggugucauccccauguaaacgggguguucuucaaugguauaauauuagggccugacggccauguucuaauccccgagaugcagucaucccuccuucagcaacauauggaguuauuggaguccucaguuauuccccugaugcacccucuggcagacccguccacagucuucaaggauggugaugaggcugaggauuuuguagagguucaccuuccugaugugcacaaacaagucucagggguugaccugggucucccgaacugggggaaauauguauuacugagugcagggacccugauugccuugauguugauaaucuuucuaaugacauguuguagaagagucaaucggccagagucuacagaccgcagucucggaggaacagggaggaaggugucggucacuucccaaagcgggaaggucauaucuucaugggagucauauaagagugggggugagacuagauuguaa

SEQ ID NO: 63722 - RNA, 1575 nt, Artificial Sequence
  derived and/or modified CDS sequence (wt) from glycoprotein__RABV__KR906747.1
augguuccucaggcucuuuuguuuguaacccuuuugguuuuuucauuguguuucgggaaauucccuaucuacacgauaccagacaaacuuggacccuggagcccgauugacauacaucaucucagcugcccaaacaauuugguuguggaggacgaaggaugcaccaaccugucaggguucucuuacauggaacuuaaaguuggauacaucucagccauaaaggugaacggguucacuugcacaggcguugugacagaggcugaaaccuacacuaacuuuguagguuaugucaccaccacguucaaaagaaagcauuuccgcccaauaccagaugcauguagagccgcauacaacuggaagauggcaggugaccccagauaugaagagucucuacacaauccguacccugacuaccacuggcuucgaacuguaaaaaccaccaaggagucucucguuaucauauccccaaguguggcggauuuggacccauaugacaaaucccuucacucgagggucuucccuggcgggaagugcucagggauaacggugucuucuaccuucugcucaacuaaccacgauuacaccauuuggaugccugaaaauccgagacuagggacgucuugcgacauuuuugccaacaguagagggaagagagcaucuaaaggggguaagaccugcggcuuuguagaugaaagaggccuguauaagucucuaaagggagcauguaaacucaaguuauguggaguucuuggacuuagacucauggauggaacaugggucgcgaugcaaacaucagaugagaccaaaugguguccuccugaucaguuggugaauaugcacgacuuucgcucggaugaaauugagcaucuuguuguagaggaguuaguuaagaaaagagaggagugucuggaugcacuagaguccaucaugaccacuaagucagugaguuucagacgucucagucauuuaagaaaacuugucccuggguucggaaaggcauacaccauguuuaacaagaccuugauggaggcugaugcucacuacaagucaguccggacuuggaaugagaucauccccucaaagggguguuuaagaguuggagggaggugucauccccauguaaacgggguguucuucaaugguauaauauuagggccugacggccauguucugaucccugagaugcagucaucccuccuucagcaacauauggaguuauuggaguccucaguuauuccccugaugcacccucuggcagacccguccacagucuucaaggauggugaugaggcugaggauuuuguagagguucaccuuccugaugugcacaaacaagucucagggguugaccugggucucccgaacugggggaaauauguauuacugagugcagggacccugauugccuugauguugauaaucuuucuaaugacauguuguagaagagucaaucggccagagucuacagaccgcagucucggaggaacagggaggaaggugucggucacuucccaaagcgggaaggucauaucuucaugggagucauauaagagugggggugagacuagauuguaa

SEQ ID NO: 63723 - RNA, 1575 nt, Artificial Sequence
  derived and/or modified CDS sequence (wt) from glycoprotein__RABV__KR906748.1
augguuccucaggcucuuuuguuuguaccccuucugguuuucucauuguguuucgggaaauucccuauuuacacgauaccagacaaacuugggccuuggagcccgauugacauacaucaucucagcugcccaaacaauuugguuguggaagaugaaggaugcaccaaccugucaggguucuccuacauggaacuuaaaguuggauacaucucagccauaaaggugaacggguucacuugcacaggcguugugacagaggccgaaaccuacacuaacuuugucgguuaugucaccaccacguucaaaagaaagcauuuccgcccaauaccagaugcauguagagccacguacaacuggaagauagccggugaccccagauaugaagagucucuacacaauccguacccugauuaccauuggcuucgaacuguaaaaaccaccaaggagucucuuguuauuauauccccaaguguggcagauuuggacccauaugacaagucccuucauucgagggucuuccccagcgggaagugcucaggaauaacagugucuucuacccacugcucaacuaaccacgauuacaccaucuggaugccugagaauccgagacuagggacaucuugugacauuuuuaccaauaguagagggaagagagcauccaaagggaguaagaccugcggcuuuguagaugaaagaggccuguauaagucucugaaaggagcaugcaagcucaaguuauguggaguucuuggacuuaggcucauggauggaacaugggucgcgaugcaaacaucagaugagaccaaaugguguccccccgaucagcugguaaaucugcacgacuuucgcucggaugaaauugagcaucuuguuguagaggaguuggucaagaaaagggaggagugucuggaugcacuagaguccaucaugaccaccaagucagugaguuucagacgucucagucauuugagaaaacuugucccuggguucggaaaggcauauaccauauucaacaagaccuugauggaggcugaugcucacuacaagucaguccggacuuggaaugagaucauccccucaaaagggugcuuaagaguuggagggagaugucauccuccuguaaacgggguguuuuucaaugguauaauauuagggccugacggccauguucuaauccccgagaugcaaucaucucuccuucagcaacacauggaguuguuggaauccuccguuauuccccugaugcacccucuggcagacccguccgcaguuuucaaggauggagaugaggcugaggauuuuguagaaguucaccucccggaugugcacaaacaggucucagggguugaccugggucucccaaacugggggaaguauguauuacugagugcagggacccugauugccuugauguugauaauauuccuaaugacauguugcagaggagucaaucggccagaaucuaagcaaugcagucucggagggacaaggaggaaggugucggucaccucccaaagcgggaaggucauaucuucaugggagucauauaaaagcgggggugagacuagacuguaa

SEQ ID NO: 63724 - RNA, 1575 nt, Artificial Sequence
  derived and/or modified CDS sequence (wt) from glycoprotein__RABV__KR906749.1
augguuccucaagaucuuuuguuuguaccccuuuugguucuuccauuguguuucgggaaauucccuaucuacacgauaccagacaaacucggacccuggagcccgauugacauacaucaucucagcugcccaaacaauuugguuguggaggacgaaggaugcaccaaccugucaggguucuccuacauggaacuuaaaguuggauacaucucagccauaaaggugaacggguucacuugcacaggcguugugacagaagcugaaaccuacacuaacuuuguagguuaugucaccaccacguucaaaagaaagcauuuccgcccaauaccagaugcauguagagccgcauacaacuggaagauggccggugaccccagauaugaagagucucuacacaauccauacccugacuaccauuggcuucgaacuguaaaaaccaccaaggagucucucguuaucauauccccgaguguggcagauuuagacccauaugacaaaucccuucacucgagggucuucacuagcgggaaaugcucgggaauaacggugucuuccaccuacugcucaacuaaccaugauuacaccauuuggaugccugagaauccgagacuagggacgucuugcaacauuuuugccaauaguaaggggaagagagcauccaaaggggguaaaaccugcggcuuuguagaugaaagaggccuguauaagucucuaaagggagcaugcaaacucaaguuauguggaguucuuggacuuagacucauggauggaacauggguugcgaugcaaacaucagaugagaccaaaugguguccuccugaucaguuggugaauaugcacgacuuucgcucggaugaaauugagcaucuuguuguagaggaauuggucaagaaacgagaggagugucuggaugcacuagaguccaucaugaccaccaagucagugaguuucagacgucucagucauuuaagaaaacuugucccuggguucggaaaagcauacaccauauucaauaagaccuugauggaggcugaugcucacuacaagucaguccggacuuggaaugagaucauccccucaaaaggguguuuaagaguuggagggaggugucacccucauguaaacgggguguuuuucaaugguauaauauuagggccugacggccauguucuaauccccgagaugcaauccucccuccuucagcaacauauggaguuguuggaauccucaguuauuccucugaugcacccccuggcagacccguccacaguuuucaaggauggugaugaggcugaggauuuuguagagguucaccuuccugaugugcacaaacaggucucggggguugaccugggucucccaaacugggggaaauauguauuacugagugcaggaacccugauugcuuugauguugauaauuuuucuaacgacauguuguagaagagucaaucgaccagaaucuacgcaacgcagucucggagggaccgggaggaaggugucggucacuucccaaagcgggaaggucauaucuucaugggagucauauaaaagugggggugaaacuagacuguaa

SEQ ID NO: 63725 - RNA, 1575 nt, Artificial Sequence
  derived and/or modified CDS sequence (wt) from glycoprotein__RABV__KR906750.1
augguuccucaagcucguuuguuuguaccccuuuugguuuuuccauuguguuucgggaaauucccuaucuacacgauaccagacaaacucggacccuggagcccgauugacauacaucaucucagcugcccaaacaauuugguuguggaggacgaaggaugcaccaaccugucaggguucuccuacauggaacuuaaaguuggauacaucucagccauaaaggugaacggguucacuugcacaggcguugugacagaagcugaaaccuacacuaacuuuguagguuaugucaccaccacguucaaaagaaagcauuuccgcccaauaccagaugcauguagagcugcauacaauuggaagauggccggugaccccagauaugaagagucucuacacaauccauacccugacuaucauuggcuucgaacuguaaaaaccaccaaggagucucucguuaucauauccccgaguguggcggauuuagacccauaugacagaucccuucacucgagggucuucacuggcgggaaaugcucgggaauaacggugucuuccaccuacugcucaacuaaccaugauuacaccauuuggaugccugagaauccgagacuagggacguccugcaacauuuuugccaauaguaaggggaagagagcauccaaaggggguaaaaccugcggcuuuguagaugaaagaggccuguacaagucucuaaagggagcaugcaaacucaaguuguguggaguucuuggacuuagacucauggauggaacauggguugcgaugcaaacaucagaugagaccaaaugguguccuccugaucaguuggugaauaugcacgacuuucgcucggaugaaauugagcaucuugucguagaggaauuggucaagaaaagagaggagugucuggaugcacuagaguccaucaugacuacuaagucagugaguuucagacgucucagucauuuaagaaaacuugucccuggguucggaaaagcauacaccauauucaauaagaccuugauggaggcugaugcucacuacaagucaguccggacuuggaaugagaucauccccucaaaaggguguuuaagaguuggagggaggugucacccucaugugaacgggguguuuuucaaugguauaauauuagggccugacggccauguucuaauccccgagaugcaauccucccuccuucagcaacauauggaguuguuggagucuucaguuauuccccugaugcacccccuggcagacccguccacaguuuucaaggauggugaugaagcugaggauuuuguagagguucaccuuccugaugugcacaaacaggucucggggguugaccugggucucccgaacugggggaaauauguauugcugagugcaggaacccugauugcuuugauguugauaauuuuucuaaugacauguuguagaagagucagucgaccagaaucuacgcaacgcagucucggaaggacagggaggaaggugucggucacuucccaaagcgggaaggucauaucuucaugggagucauauaaaagugggggugagacuagacuguaa

SEQ ID NO: 63726 - RNA, 1575 nt, Artificial Sequence
  derived and/or modified CDS sequence (wt) from glycoprotein__RABV__KR906751.1
augguuccucaggcucuuuuguuuguaacccuuuugguuuuuucauuguguuucgggaaauucccuaucuacacgauaccagacaaacuuggacccuggagcccgauugacauacaucaucucagcugcccaaacaauuugguuguggaggacgaaggaugcaccaaccugucaggguucucuuacauggaacuuaaaguuggauacaucucagccauaaaggugaacggguucacuugcacaggcguugugacagaggcugaaaccuacacuaacuuuguagguuaugucaccaccacguucaaaagaaagcauuuccgcccaauaccagaugcauguagagccgcauacaacuggaagauggcaggugaccccagauaugaagagucucuacacaauccguacccugacuaccacuggcuucgaacuguaaaaaccaccaaggagucucucguuaucauauccccaaguguggcggauuuggacccauaugacaaaucccuucacucgagggucuucccuggcgggaagugcucgggaauaacggugucuucuaccuucugcucaacuaaccacgauuacaccauuuggaugccugaaaauccgagacuagggacgucuugcgacauuuuugccaacaguaaggggaagagagcaucuaaaggggguaagaccugcggcuuuguagaugaaagaggccuguauaagucucuaaagggagcauguaaacucaaguuauguggaguucuuggacuuagacucauggauggaacaugggucgcgaugcaaacaucagaugagaccaaaugguguccuccugaucaguuggugaauaugcacgacuuucgcucggaugaaauugagcaucuuguuguagaggaguuaguuaagaaaagagaggagugucuggaugcacuagaguccaucaugaccacuaagucagugaguuucagacgucucagucauuuaagaaaacuugucccuggguucggaaaagcauacaccauguuuaacaagaccuugauggaggcugaugcucacuacaagucaguccggacuuggaaugagaucauccccucaaaaggguguuuaagaguuggagggaggugucacccucauguaaacgggguguucuucaaugguauaauauuagggccugacggccauguucugaucccugagaugcagucaucccuccuucagcaacauauggaguuauuggaguccucaguuauuccccugaugcacccucuggcagacccguccacagucuucaaggauggugaugaggcugaggauuuuguagagguucaccuuccugaugugcacaaacaagucucagggguugaccugggucucccgaacugggggaaauauguauuacugagugcagggacccugauugccuugauguugauaaucuuucuaaugacauguuguagaagagucaaucggccagagucuacgcaccgcagucucggaaggacagggaggaaggugucggucacuucccaaagcgggaaggucauaucuucaugggagucauauaagagugggggugagacuagauuguaa

SEQ ID NO: 63727 - RNA, 1575 nt, Artificial Sequence
  derived and/or modified CDS sequence (wt) from glycoprotein__RABV__KR906753.1
augguuccucaagcucuuuuguuuguaccccuuuugguuuuuccauuguguuucgggaaauucccuaucuacacgauaccagacaaacucggacccuggagcccgauugacauacaucaucucagcugcccaaacaauuugguuguggaggacgaaggaugcacuaaccugucaggguucuccuacauggaacuuaaaguuggauacaucucagccauaaaggugaacggguucacuugcacaggcguugugacagaagcugaaaccuacacuaacuuuguagguuaugucaccaccacguucaaaagaaagcauuuccgcccaauaccagaugcaugcagagccgcauacaacuggaagauggccggcgaccccagauaugaagagucucuacacaauccauacccugacuaccauuggcuucgaacuguaaaaaccaccaaggagucucucguuaucauauccccgaguguggcggauuuagacccauaugacaaaucccuccacucgagggucuucacuagcgggaaaugcucgggaauaacggugucuuccaccuacugcucaacuaaccaugauuacaccauuuggaugccugagaauccgagacuagggacgucuugcaacaucuuugccaauaguaaggggaagagagcauccaaaggggguaaaaccugcggcuuuguagaugaaagaggccuguauaagucucuaaagggagcaugcaaacucaaguuauguggaguucuuggacuuagacucauggauggaacauggguugcgaugcagacaucagaugagaccaaaugguguccuccugaucaguuggugaacaugcacgacuuucgcucggaugaaauugagcaucuuguuguagaggaauuggucaagaaaagagaggagugucuggaugcacuagaguccaucaugaccaccaagucagugaguuucagacgucucagucauuuaagaaaacuugucccuggguucggaaaagcauacaccauauucaauaagaccuugauggaggcugaugcucacuacaagucaguccggacuuggaaugagaucauccccucaaaaggguguuuaagaguuggagggaggugucacccucauguaaacgggguguuuuucaaugguauaauauuagggccugacggccauguucuaauccccgagaugcaauccucccuccuucagcaacauauggaguuguuggaauccucaguuauuccccugaugcacccccuggcagacccguccacaguuuucaaggauggugaugaggcugaggauuuuguggagguucaccuuccugaugugcacaaacaggucucggggguugaccugggucucccgaacugggggaaauauguauuacugagugcaggaacccugauugcuuugauguugauacuuuuucuaaugacauguuguagaagagucaaucgaccagaaucuacgcaacgcagucucggagggacagggaggaaggugucggucacuucccaaagcgggaaggucauaucuucaugggagucauauaaaagugggggugagacuagacuguaa

SEQ ID NO: 63728 - RNA, 1575 nt, Artificial Sequence
  derived and/or modified CDS sequence (wt) from glycoprotein__RABV__KR906755.1
augguuccucaagcucuuuuguuuguacuccuuuugguuuuuccauuguguuucgggaaauucccuaucuacacaauaccagacaaacucggacccuggagcccgauugacauacaucaucucagcugcccaaacaauuugguuguggaggacgaaggaugcaccaaccugucaggguucuccuauauggaacuuaaaguuggauacaucucagcuauaaaggugaacggguucacuugcacaggcguugugacagaggcugaaaccuacacuaacuuuguagguuaugucaccaccacauucaaaagaaagcauuuccgcccaauaccagaugcauguagagccgcauauaacuggaagauggccggugaccccagauaugaagagucucuacacaauccauacccugacuaccauuggcuucgaacuguaaaaaccaccaaggagucucucguuaucauauccccgaguguggcggauuuagacccauaugacaaaucccuucacucgagggucuucacuagcgggaaaugcucgggaauaacggugucuuccaccuacugcucaacuaaccaugauuacaccauuuggaugccugagaauccuagacuagggacgucuugcaacauuuuugucaauaguaaggggaagagagcauccaaaggggguaaaaccugcggcuuuguagaugaaagaggccuguauaagucucuaaagggagcaugcaaacucaaguuauguggaguucuuggacuuagacuuauggauggaacauggguugcgaugcagacaucagaugagaccaaaugguguucuccugaucaguuggugaauaugcacgacuuucgcucggaugaaauugagcaucuuguuguggaggaauuggucaagaaaagagaggagugucuggaugcacuagaguccaucaugaccaccaagucagugaguuucagacgucucagucauuuaagaaaacuugucccuggguucgggaaggcauacaccauauucaauaagaccuugauggaggcugaugcucacuacaagucaguccggacuuggaaugagaucaucccaucaaaaggguguuuaagaguuggagggaggugucacccucauguaaacgggguguuuuucaaugguauaauacuagggccugacggccauguucuaauccccgagaugcaauccucccuccuucagcaacauauggaguuguuggaauccucaguuauuccccugaugcacccccuggcagacccguccacaguuuucaaggauggugaugaggcugaggauuuuguagagguucaccuuccugaugugcacaaacaggucucggggguugaccugggucucccgaacugggggaaauauguauuacugagugcaggaacccugauugcuuugauguugauaauuuuucuaaugacauguuguagaagagucaaucgaccggaaucuacgcaacgcagucucggagggacagggaggaaggugucggucacuucccaaagcgggaaagucauaucuucaugggagucauauaaaagugggggugagacuagacuguaa

SEQ ID NO: 63729 - RNA, 1575 nt, Artificial Sequence
  derived and/or modified CDS sequence (wt) from glycoprotein__RABV__KR906756.1
augguuccucaagcucuuuuguuuguacuccuuuugguuuuuccauuguguuucgggaaauucccuaucuacacaauaccggacaaacucggacccuggagcccgauugacauacaucaucucagcugcccaaacaauuugguuguggaggacgaaggaugcaccaaccugucaggguucuccuauauggaacuuaaaguuggauacaucucagcuauaaaggugaacggguucacuugcacaggcguugugacagaggcugaaaccuacacuaacuuuguagguuaugucaccaccacauucaaaagaaagcauuuccgcccaauaccagaugcauguagagccgcauauaacuggaagauggccggugaccccagauaugaagagucucuacacaauccauacccugacuaccauuggcuucgaacuguaaaaaccaccaaggagucucucauuaucauauccccgaguguggcggauuuagacccauaugacaaaucccuucacucgagggucuucacuagcgggaaaugcucgggaauaacggugucuuccaccuacugcucaacuaaccaugauuacaccauuuggaugccugagaauccuagacuagggacgucuugcaacauuuuugucaauaguaaggggaagagagcauccaaaggggguaaaaccugcggcuuuguagaugaaagaggccuguauaagucucuaaagggagcaugcaaacuuaaguuauguggaguucuuggacuuagacuuauagauggaacauggguugcgaugcaaacaucagaugagaccaaaugguguucuccugaucaguuggugaauaugcacgacuuucgcucggaugaaauugagcaucuuguuguggaggaauuggucaagaaaagagaggagugucuggaugcacuagaguccaucaugaccaccaagucagugaguuucagacgucucagucauuuaagaaaacuugucccuggguucgggaaggcauacaccauauucaauaagaccuugauggaggcugaugcucacuacaagucaguccggacuuggaaugagaucaucccaucaaagggguguuuaagaguuggagggaggugucacccucauguaaacgggguguuuuucaaugguauaauacuagggccugacggccauguucuaauccccgagaugcaauccucccuccuucagcaacauauggaguuguuggaauccucaguuauuccccugaugcacccccuggcagacccuuccacaguuuucaaggauggugaugaggcugaggauuuuguagagguucaccuuccugaugugcacaaacaggucucggggguugaccugggucucccgaacugggggaaauauguauuacugagugcaggaacccugauugcuuugauguugauaauuuuucuaaugacauguuguagaagagucaaucgaccagaaucuacgcaacgcagucucggagggacagggaggaaggugucggucacuucccaaagcgggaaggucauaucuucaugggagucauauaaaagugggggugagacuagacuguaa

SEQ ID NO: 63730 - RNA, 1575 nt, Artificial Sequence
  derived and/or modified CDS sequence (wt) from glycoprotein__RABV__KR906760.1
augguuccucaagcucuuuuguuuguacuccuuuugguuuuuccauuguguuucgggaaauucccuaucuacacaauaccggacaaacucggacccuggagcccgauugacauacaucaucucagcugcccaaacaauuugguuguggaggacgaaggaugcaccaaccugucaggguucuccuauauggaacuuaaaguuggauacaucucagcuauaaaggugaacggguucacuugcacaggcguugugacagaggcugaaaccuacacuaacuuuguagguuaugucaccaccacauucaaaagaaagcauuuccgcccaauaccagaugcauguagagccgcauauaacuggaagauggccggugaccccagauaugaagagucucuacacaauccauacccugacuaccauuggcuucgaacuguaaaaaccaccaaggagucucucauuaucauauccccgaguguggcggauuuagacccauaugacaaaucccuucacucgagggucuucacuagcgggaaaugcucgggaauaacggugucuuccaccuacugcucaacuaaccaugauuacaccauuuggaugccugagaauccuagacuagggacgucuugcaacauuuuugucaauaguaaggggaagagagcauccaaaggggguaaaaccugcggcuuuguagaugaaagaggccuguauaagucucuaaagggagcaugcaaacuuaaguuauguggaguucuuggacuuagacuuauagauggaacauggguugcgaugcaaacaucagaugagaccaaaugguguucuccugaucaguuggugaauaugcacgacuuucgcucggaugaaauugagcaucuuguuguggaggaauuggucaagaaaagagaggagugucuggaugcacuagaguccaucaugaccaccaagucagugaguuucagacgucucagucauuuaagaaaacuugucccuggguucgggaaggcauacaccauauucaauaaaaccuugauggaggcugaugcucacuacaagucaguccggacuuggaaugagaucaucccaucaaagggguguuuaagaguuggagggaggugucacccucauguaaacgggguguuuuucaaugguauaauacuagggccugacggccauguucuaauccccgagaugcaauccucccuccuucagcaacauauggaguuguuggaauccucgguuauuccccugaugcacccccuggcagacccuuccacaguuuucaaggauggugaugaggcugaggauuuuguagagguucaccuuccugaugugcacaaacaggucucggggguugaccugggucucccgaacugggggaaauauguauuacugagugcaggaacccugauugcuuugauguugauaauuuuucuaaugacauguuguagaagagucaaucgaccagaaucuacgcaacgcagucucggagggacagggaggaaggugucggucacuucccaaagcgggaaggucauaucuucaugggagucauauaaaagugggggugagacuagacuguaa

SEQ ID NO: 63731 - RNA, 1575 nt, Artificial Sequence
  derived and/or modified CDS sequence (wt) from glycoprotein__RABV__KR906762.1
augguuccucaagcucguuuguuuguaccccuuuugguuuuuccauuguguuucgggaaauucccuaucuacacgauaccagacaaacucggacccuggagcccgauugacauacaucaucucagcugcccaaacaauuugguuguggaggacgaaggaugcaccaaccugucaggguucuccuacauggaacuuaaaguuggauacaucucagccauaaaggugaacggguucacuugcacaggcguugugacagaagcugaaaccuacacuaacuuuguagguuaugucaccaccacguucaaaagaaagcauuuccgcccaauaccagaugcauguagagccgcauacaacuggaagauggccggugaccccagauaugaagagucucuacacaauccauacccugacuaccauuggcuucgaacuguaaaaaccaccaaggagucucucguuaucauauccccgaguguggcggauuuagacccauaugacaaaucccuucacucgagggucuucacuggcgggaaaugcucgggaauaacggugucuuccaccuacugcucaacuaaccaugauuacaccauuuggaugccugagaauccgagacuagggacguccugcaacauuuuugccaauaguaaggggaagagagcauccaaaggggguaaaaccugcggcuuuguagaugaaagaggccuguauaagucucuaaagggagcaugcaaacucaaguuauguggaguucuuggacuuagacucauggauggaacauggguugcgaugcaaacaucagaugagaccaaaugguguccuccugaucaguuggugaauaugcacgacuuucgcucggaugaaauugagcaucuugucguagaggaauuggucaagaaaagagaggagugucuggaugcacuagaguccaucaugaccacuaagucagugaguuucagacgucucagucauuuaagaaaacuugucccuggguucggaaaagcauacaccauauucaauaagaccuugauggaggcugaugcucacuacaagucaguccggacuuggaaugagaucauccccucaaaaggguguuuaagaguuggagggaggugucacccucaugugaacgggguguuuuucaaugguauaauauuaggaccugacggccauguucuaauccccgagaugcaauccucccuccuucagcaacauauggaguuguuggaauccucaguuauuccccugaugcacccccuggcagacccguccacaguuuucaaggauggugaugaagcugaggauuuuguagagguucaccuuccugaugugcacaaacaggucucggggguugaccugggucucccgaacugggggaaauauauauuacugagugcaggaacccugauugcuuugauguugauaauuuuucuaaugacauguuguagaagagucagucgaccagaaucuacgcaacgcagucucggaaggacagggaggaaggugucggucacuucccaaagcgggaaggucauaucuucaugggagucauauaaaagugggggugagacuagacuguaa

SEQ ID NO: 63732 - RNA, 1575 nt, Artificial Sequence
  derived and/or modified CDS sequence (wt) from glycoprotein__RABV__KR906763.1
augguuccucaaacucuuuuauuuguaccccuuuugguuuucucauuguguuucgggaaauucccuaucuacacgauaccagacaaacuuggacccuggagcccgauugacauacaucaucucagcugcccaaacaauuugguuguggaggacgaaggaugcaccaaccugucaggguucuccuacauggaacuuaaaguuggauacaucucagccauaaaggugaacggguucacuugcacaggcguugugacagaggcugaaaccuacacuaauuuuguagguuaugucaccaccacguucaaaagaaagcauuuccgcccaauaccagaugcauguagagccgcauacaacuggaagauggccggugaccccagauaugaagagucucuacacaauccauacccugacuaccauuggcuucgaacuguaaagaccaccaaggagucucucguuaucauauccccaaguguggcggauuuagacccauaugacaaaucccuucacucgagggucuucccuagcgggaaaugcucaggaauaacggugucuucuaccuacugcucaacuaaccaugauuacaccauuuggaugccugagaauccgagacuagggacgucuugcaacauuuuuacuaauaguagggggaagagagcauccaaagggggcaagaccugcggcuuugucgaugaaagaggccuguauaagucucugaagggagcaugcaaacucaaguuauguggaguucuuggacuuagacucauggauggaacauggguugcgaugcaaacaucagaugagaccaaaugguguccuccugaucaguuggugaauaugcacgacuuucgcucggaugaaaucgagcaucuuguuguagaagaauuggucaagaaaagagaggagugucuggaugcacuagaguccaucaugaccaccaagucaguaaguuuuagacgucucagucaucuaagaaaacuugucccuggguucggaaaagcauacaccauauucaacaagaccuugauggaggcugaugcucacuacaagucaguccggacuuggaaugagaucauccccucaaaaggguguuuaagaguuggagggaggugucacccucauguaaacgggguguuuuucaaugguauaauauuagggccugacggccauguucuaauccccgagaugcaaucuucccuccuucagcaacauauggaguuguuggaauccucaguuauuccccugaugcacccccuggcagacccguccacaguuuucaaggauggugaugaggcggaggauuuuguagagguucaccuuccugaugugcacaaacaggucucggggguugaccugggucucccgaacugggggaaauauguauuacugagugcagggacccugauugcuuugauguugauaauuuuucuaaugacauguuguagaagagucaaucgaccagaaucuacgcaacgcagucucggagggacaaggaggaaggugucggucacuucccaaagcgggaagguuauaucuucaugggagucauauaaaagugggggugagacuagacuguaa

SEQ ID NO: 63733 - RNA, 1575 nt, Artificial Sequence
  derived and/or modified CDS sequence (wt) from glycoprotein__RABV__KR906766.1
augguuccucaaacucuuuuguuuguaccccuuuugguuuucucauuguguuucgggaaauucccuaucuacacgauaccagacaaacuuggacccuggagcccgauugacauacaucaucucagcugcccaaacaauuugguuguggaggacgaaggaugcaccaaccugucaggguucuccuacauggaacuuaaaguuggauacaucucagccauaagggugaacggguucacuugcacaggcguugugacagaggcugaaaccuacacuaacuuuguagguuaugucaccaccacguucaaaagaaagcauuuucgcccaauaccagaugcauguagagccgcauacaacuggaagauggccggugaccccagauaugaagagucucuacacaauccauaccccgacuaccauuggcuucgaacuguaaaaaccaccaaggagucucucguuaucauauccccaaguguggcggauuuagacccauaugacaaaucccuucacucgagggucuucccuagcgggaaaugcucaggaauaacggugucuucuaccuacugcucaacuaaccaugauuacaccauuuggaugccugagaauccgagacuagggacgucuugcaacauuuuuaccaauaguagggggaagagagcauccaaagggggcaagaccugcggcuuugucgaugaaagaggccuguauaagucucugaagggagcaugcaaacucaaguuauguggaguucuuggacuuagacucauggauggaacauggguugcgaugcaaacaucagaugagaccaagugguguccuccugaucaguuggugaauaugcacgacuuucgcucggaugaaaucgagcaucucguuguagaagaauuggucaagaaaagagaggagugucuggaugcacuagaguccaucaugaccaccaagucagugaguuuuagacgucucagucauuuaagaaaacuugucccuggguucggaaaagcauacaccauauucaacaagaccuugauggaggcugaugcucacuacaagucaguccggacuuggaaugagaucauccccucaaaaggguguuuaagaguuggagggaggugucauccucauguaaacgggguguuuuucaaugguauaauauuagggccugacggccauguucuaauccccgagaugcaaucuucccuccuucagcaacauauggaguuguuggaauccucaguuauuccccugaugcacccccuggcagacccguccacaguuuucaaggauggugaugaggcggaggauuuuguagagguucaccuuccugaugugcacaaacaggucucggggguugaccugggucucccgaacugggggaaauauguauuacugagugcagggacccugauugcuuugauguugauaauuuuucuaaugacauguuguagaagagucaaucgaccagaaucuacgcaacgcagucucggagggacaaggaggaaggugucggucacuucccaaagcgggaaggucauaucuucaugggagucauauaaaagugggggugagacuagacuguaa

SEQ ID NO: 63734 - RNA, 1575 nt, Artificial Sequence
  derived and/or modified CDS sequence (wt) from glycoprotein__RABV__KR906767.1
augguuccucaagcucuuuuguuuguaccccuuuugguuuuuccauuguguuucgggaaauucccuaucuacacgauaccagacaaacucggacccuggagcccgauugacauacaucaucucagcugcccaaacaauuugguuguggaggacgagggaugcaccaaccugucaggguucuccuacauggaacuuaaaguuggauacaucucagccauaaaggugaacggguucacuugcacaggcguugugacagaagcugaaaccuacacuaacuuuguagguuaugucaccaccacguucaaaagaaagcauuuccgcccaauaccagaugcauguagagcagcauacaacuggaagauggccggugaccccagauaugaagagucucuacacaauccauacccugacuaccauuggcuucgaacuguaaaaaccaccaaggagucucucguuaucauauccccgaguguggcggauuuagacccauaugacaaaucccuucacucgagggucuucacuagcgggaaaugcucgggaauaacggugucuuccaccuacugcucaacuaaccaugauuacaccauuuggaugccugaaaauccgagacuagggacgucuugcaacauuuuugccaauaguaaggggaagagagcauccaaaggggguaaaaccugcggcuuuguagaugaaagaggccuguauaagucucuaaggggagcaugcaaacucaaguuauguggaguucuuggacuuagacucauggauggaacauggguugcgaugcaaacaucagaugagaccaaaugguguccuccugaucaguuggugaauaugcacgacuuucgcucggaugaaauugagcaucuugucguagaggaauuggucaagaaaagagaagagugucuggaugcacuagaguccaucaugaccacuaagucagugaguuucagacgucucagucauuuaagaaaacuugucccuggguucggaaaagcauacaccauauucaauaagaccuugauggaggcugaugcucacuacaagucaguccggacuuggaaugagaucauccccucaaaaggguguuuaagaguuggagggaggugucacccucaugugaacgggguguuuuucaaugguauaauauuagggccugacggccauguucuaauccccgagaugcaauccucccuccuucagcaacauauggaguuguuggaaucuucaguuauuccccugaugcacccccuggcagacccguccacaguuuucaaggauggugaugaggcugaggauuuuguagagguucaccuuccugaugugcacaaacaggucucggggguugaccugggucucccgaacugggggaaauauguauuacugagugcaggaacccugauugcuuuaauguugauaauuuuucuaaugacauguuguagaagagucagucgaccagaaucuacgcaacgcagucucggagggacagggaggaaggugucggucacuucccaaagcgggaaggucauaucuucaugggagucauauaaaagugggggugagacuagacuguaa

SEQ ID NO: 63735 - RNA, 1575 nt, Artificial Sequence
  derived and/or modified CDS sequence (wt) from glycoprotein__RABV__KR906768.1
augguuccucaagcucguuuguuuguaccccuuuugguuuuuccauuguguuucgggaaauucccuaucuacacgauaccagacaaacucggacccuggagcccgauugacauacaucaucucagcugcccaaacaauuugguuguggaggacgaaggaugcaccaaccugucaggguucuccuacauggaacuuaaaguuggauacaucucagccauaaaggugaacggguucacuugcacaggcguugugacagaagcugaaaccuacacuaacuuuguagguuaugucaccaccacguucaaaagaaagcauuuccgcccaauaccagaugcauguagagcugcauacaauuggaagauggccggugaccccagauaugaagagucucuacacaauccauacccugacuaucauuggcuucgaacuguaaaaaccaccaaggagucucucguuaucauauccccgaguguggcggauuuagacccauaugacagaucccuucacucgagggucuucacuggagggaaaugcucgggaauaacggugucuuccaccuacugcucaacuaaccaugauuacaccauuuggaugccugagaauccgagacuagggacguccugcaacauuuuugccaauaguaaggggaagagagcauccaaaggggguaaaaccugcggcuuuguagaugaaagaggccuguauaagucucuaaagggagcaugcaaacucaaguuauguggaguucuuggacuuagacucauggauggaacauggguugcgaugcaaacaucagaugagaccaaaugguguccuccugaucaguuggugaauaugcacgacuuucgcucggaugaaauugagcaucuugucguagaggaauuggucaagaaaagagaggagugucuggaugcacuagaguccaucaugacuacuaagucagugaguuucagacgucucagucauuuaagaaagcuugucccuggguucggaaaagcauacaccauauucaauaagaccuugauggaggcugaugcucacuacaagucaguccggacuuggaaugagaucauccccucaaaaggguguuuaagaguuggagggaggugucacccucaugugaacgggguguuuuucaaugguauaauauuagggccugacggccauguucuaauccccgagaugcaauccucccuccuucagcaacauauggaguuguuggagucuucaguuauuccccugaugcacccccuggcagacccguccacaguuuucaaggauggugaugaagcugaggauuuuguagagguucaccuuccugaugugcacaaacaggucucggggguugaccugggucucccgaacugggggaaauauguauugcugagugcaggaacccugauugcuuugauguugauaauuuuucuaaugacauguuguagaagagucagucgaccagaaucuacgcaacgcagucucggaaggacagggaggaaggugucggucacuucccaaagcgggaaggucauaucuucaugggagucauauaaaagugggggugagacuagacuguaa

SEQ ID NO: 63736 - RNA, 1575 nt, Artificial Sequence
  derived and/or modified CDS sequence (wt) from glycoprotein__RABV__KR906769.1
augguuccucaagcucuuuuguuuguaccccuuuugguuuuuccauuguguuucgggaaauucccuaucuacacgauaccagacaaacuuggacccuggagcccgauugacauacaucaucucagcugcccaaacaauuugguuguggaggacgaaggaugcaccaaccugucaggguucuccuacauggaacuuaaaguuggauacaucucagccauaaaggugaacggguucacuugcacaggcguugugacagaggcugaaaccuacaccaacuuuguagguuaugucaccaccacguucaaaagaaagcauuuccgcccaauaccagaugcauguagagccgcauauaacuggaagauggccggugaccccagauaugaagagucucuacacaauccguacccugacuaccauuggcuucgaacuguaaaaaccaccaaggagucucucguuaucauauccccaaguguggcggauuuggacccauaugacaaaucccuucacucgagggucuucccuagugggaaaugcucaggaauaacggugucuuccaccuacugcucaacuaaccaugauuacaccauuuggaugccugagaauccgagacuagggacguccugcaacauuuuugccaauaguaaggggaagagagcauccaaaggggguaaaaccugcggcuuuguagaugaaagaggccuguauaagucucuaaagggagcaugcaaacucaaguuauguggaguucuuggacuuagacucauggauggaacauggguugcgaugcaaacaucagaugagaccaaaugguguccuccugaucaguuggugaauaugcacgacuuucgcucggaugaaauugagcaucuugucguagaggaauuggucaagaaaagagaggagugucuggaugcacuagaguccaucaugacuacuaagucagugaguuucagacgucucagucauuuaagaaaacuugucccuggguucggaaaagcauacaccauauucaauaagaccuugauggaggcugaugcucacuacaagucaguccggacuuggaaugagaucauccccucaaaaggguguuuaagaguuggagggaggugucacccucaugugaacgggguguuuuucaaugguauaauauuagggccugacggccauguucuaauccccgagaugcaauccucccuccuucagcaacauauggaguuguuggagucuucaguuauuccccugaugcacccccuggcagacccguccacaguuuucaaggauggugaugaagcugaggauuuuguagagguucaccuuccugaugugcacaaacaggucucggggguugaccugggucucccgaacugggggaaauauguauugcugagugcaggaacccugauugcuuugauguugauaauuuuucuaaugacauguuguagaagagucagucgaccagaaucuacgcaacgcagucucggaaggacagggaggaaggugucggucacuucccaaagcgggaaggucauaucuucaugggagucauauaaaagugggggugagacuagacuguaa

SEQ ID NO: 63737 - RNA, 1575 nt, Artificial Sequence
  derived and/or modified CDS sequence (wt) from glycoprotein__RABV__KR906770.1
augguuccucaagcucuuuuguuuguaccccuuuugguuuuuccauuguguuucgggaaauucccuaucuacacgauaccagacaaacuuggacccuggagcccgauugacauacaucaucucagcugcccaaacaauuugguuguggaggacgaaggaugcaccaaccugucaggguucuccuacauggaacuuaaaguuggauacaucucagccauaaaggugaacggguucacuugcacaggcguugugacagaggcugaaaccuacaccaacuuuguagguuaugucaccaccacguucaaaagaaagcauuuccgcccaauaccagaugcauguagagccgcauauaacuggaagauggccggugaccccagauaugaagagucucuacacaauccguacccugacuaccauuggcuucgaacuguaaaaaccaccaaggagucucucguuaucauauccccaaguguggcggauuuggacccauaugacaaaucccuucacucgagggucuucccuagugggaaaugcucaggaauaacggugucuuccaccuacugcucaacuaaccaugauuacaccauuuggaugccugagaauccgagacuagggacgucuugcgacauuuucaccaauaguagagggaagagagcauccaaaggggguaagaccugcggcuuuguagaugaaagaggccuguauaagucucuaaggggggcaugcaaacucaaauuauguggaguucuuggacuuagacucauggacggaacaugggucgcgaugcaaacaucagaugagaccaaaugguguccuccugaucaguuggugaauaugcaugacuuucgcucggaugaaauugagcaucuuguuguggaggaguuggucaagaaaagagaggagugucuggaugcauuagaguccaucaugaccacuaagucagugaguuucagacgucucagucauuuaagaaaacuugucccuggauucggaaaggcauacaccauauucaacaagaccuugauggaggcugaugcucacuacaagucaguccggacuuggaaugagaucauccccucaaaaggguguuuaagaguuggagggaggugucauccucauguaaacgggguguuuuucaaugguauaauauuagggccugacggccauguucuaauccccgagaugcaaucaucccuccuucagcaacauauggaguuauuggaauccucaguuauuccccugaugcacccccuggcagacccguccacuguuuucaaggagggugaugaggcugaggauuuuguagagguucaccuuccugaugugcacaaacaggucucggggguugacuuaggucucccgaacugggggaaauauguauuacugagugcagggacccugauugcuuugauguugauaauuuuucuaaugacauguuguagaagagucaaucgaccagaaccuacgcaacgcagucuaggagggacagggaggaaggugucggucacuucccaaagcgggaaggucauaucuucaugggagucauauaaaagugggggugagacuagacuguaa

SEQ ID NO: 63738 - RNA, 1575 nt, Artificial Sequence
  derived and/or modified CDS sequence (wt) from glycoprotein__RABV__KR906771.1
augguuccucaagcucuuuuguuuguacuccuuuugguuuuuccauuguguuucgggaaauucccuaucuacacaauaccagacaaacucggacccuggagcccgauugacauacaucaucucagcugcccaaacaauuugguuguggaggacgaaggaugcaccaaccugucaggguucuccuauauggaacuuaaaguuggauacaucucagcuauaaaggugaacggguucacuugcacaggcguugugacagaggcugaaaccuacacuaacuuuguagguuaugucaccaccacauucaaaagaaagcauuuccgcccaauaccagaugcauguagagccgcauauaacuggaagauggccggugaccccagauaugaagagucucuacacaauccauacccugacuaccauuggcuucgaacuguaaaaaccaccaaggagucucucguuaucauauccccgaguguggcggauuuagacccauaugacaaaucccuucacucgagggucuucacuagcgggaaaugcucgggaauaacggugucuuccaccuacugcucaacuaaccaugauuacaccauuuggaugccugagaauccuagacuagggacgucuugcaacauuuuugucaauaguaaggggaagagagcauccaaaggggguaaaaccugcggcuuuguagaugaaagaggccuguauaagucucuaaagggagcaugcaaacucaaguuauguggaguucuuggacuuagacuuauggauggaacauggguugcgaugcagacaucagaugagaccaaaugguguucuccugaucaguuggugaauaugcacgacuuucgcucggaugaaauugagcaucuuguuguggaggaauuggucaagaaaagagaggagugucuggaugcacuagaguccaucaugaccaccaagucagugaguuucagacgucucagucauuuaagaaaacuugucccuggguucgggaaggcauacaccauauucaauaagaccuugauggaggcugaugcucacuacaagucaguccggacuuggaaugagaucaucccaucaaaaggguguuuaagaguuggagggaggugucacccucauguaaacgggguguuuuucaaugguauaauacuagggccuaacggccauguucuaauccccgagaugcaauccucccuccuucagcaacauauggaguuguuggaauccucaguuauuccccugaugcacccccuggcagacccguccacaguuuucaaggauggugaugaggcugaggauuuuguagagguucaccuuccugaugugcacaaacaggucucggggguugaccugggucucccgaacugggggaaauauguauuacugagugcaggaacccugauugcuuugauguugauaauuuuucuaaugacauguuguagaagagucaaucgaccggaaucuacgcaacgcagucucggagggacagggaggaaggugucggucacuucccaaagcgggaaagucauaucuucaugggagucauauaaaagugggggugagacuagacuguaa

SEQ ID NO: 63739 - RNA, 1575 nt, Artificial Sequence
  derived and/or modified CDS sequence (wt) from glycoprotein__RABV__KR906773.1
auggucccucaagcucuuuuguuuguaccccuuuugguuuuuccauuguguuucgggaaauucccuaucuacacaauaccagacaaacucggacccuggagcccgauugacauacaucaucucagcugcccaaacaauuugguuguggaggacgaaggaugcaccaaccugucaggguucuccuauauggaacucaaaguuggauacaucucagcuauaaaggugaacggguucacuugcacaggcguugugacagaggcugaaaccuacacuaacuuuguagguuaugucaccaccacauucaaaagaaagcauuuccgcccaauaccagaugcauguagagccgcauauaacuggaagauggccggugaccccagauaugaagagucucuacacaauccauacccugacuaccauuggcuucgaacuguaaaaaccaccaaggagucucucguuaucauauccccgaguguggcggauuuagacccauaugacaaaucccuucacucgagggucuucacuagcgggaaaugcucgggaauaacggugucuuccaccuacugcucaacgaaccaugauuacaccauuuggaugccugagaauccuagacuagggacgucuugcaacauuuuugucaauaguaaggggaagagagcauccaaaggggguaaaaccugcggcuuuguagaugaaagaggccuguauaagucucuaaagggagcaugcaaacucaaguuauguggaguucuuggacuuagacuuauggauggaacauggguugcgaugcaaacaucagaugagaccaaaugguguucuccugaucaguuggugaauaugcacgacuuucgcucggaugaaauugagcaucuuguuguggaggaauuggucaagaaaagagaggagugucuggaugcacuagaguccaucaugaccaccaagucagugaguuucagacgucucagucauuuaagaaaacuugucccuggguucgggaaagcauacaccauauucaauaagacuuugauggaggcugaugcucacuacaagucaguccggacuuggaaugagaucaucccaucaaaaggguguuuaagaguuggagggaggugucacccucauguaaacgggguguuuuucaaugguauaauauuagggccugacggccauguucuaauccccgagaugcaauccucccuccuucagcaacauauggaguuguuggaauccucaguuauuccccugaugcacccccuggcagacccguccacaguuuucaaggauggugaugaggcugaggauuuuguagagguucaccuuccugaugugcacaaacaggucucggggguugaccugggucucccgaacugggggaaauauguauuacugagugcaggaacccugauugcuuugauguugauaauuuuucuaaugacauguuguagaagagucaaucgaccagaaucuacgcaacgcagucucggagggacagggaggaaggugucggucacuucccaaagcgggaaggucauaucuucaugggagucauacaaaagugggggugagacuagacuguaa

SEQ ID NO: 63740 - RNA, 1575 nt, Artificial Sequence
  derived and/or modified CDS sequence (wt) from glycoprotein__RABV__KR906776.1
augguuccucaagcucuuuuguuuguaccccuuuugguuuuuccauuguguuucgggaaauucccuaucuacacgauaccagacaaacuuggacccuggagcccgauugacauacaucaucucagcugcccaaacaauuugguuguggaggacgaaggaugcaccaaccugucaggguucuccuacauggaacuuaaaguuggauacaucucagccauaaaggugaacggguucacuugcacaggcguugugacagaggcugaaaccuacaccaacuuuguagguuaugucaccaccacguucaaaagaaagcauuuccgcccaauaccagaugcauguagagccgcauauaacuggaagauggccggugaccccagauaugaagagucucuacacaauccguacccugacuaccauuggcuucgaacuguaaaaaccaccaaggagucucucguuaucauauccccaaguguggcggauuuggacccauaugacaaaucccuucacucgagggucuucccuagugggaaaugcucaggaauaacggugucuuccaccuacugcucaacuaaccaugauuacaccauuuggaugccugagaauccgagacuagggacgucuugcgacauuuucaccaauaguagagggaagagagcauccaaaggggguaagaccugcggcuuuguagaugaaagaggccuguauaagucucuaaggggggcaugcaaacucaaauuauguggaguucuuggacuuagacucauggauggaacaugggucgcgaugcaaacaucagaugagaccaaaugguguccuccugaucaguuggugaauaugcacgacuuucgcucggaugaaauugagcaucuuguuguggaggaguuggucaagaaaagagaggagugucuggaugcauuagaguccaucaugaccacuaagucagugaguuucagacgucucagucauuuaagaaaacuugucccuggauucggaaaggcauacaccauauucaacaagaccuugauggaggcugaugcucacuacaagucaguccggacuuggaaugagaucauccccucaaaaggguguuuaagaguuggagggaggugucauccucauguaaacgggguguuuuucaaugguauaauauuagggccugacggccauguucuaauccccgagaugcaaucaucccuccuucagcaacauauggaguuauuggaauccucaguuauuccccugaugcacccccuggcagacccguccacuguuuucaaggagggugaugaggcugaggauuuuguagagguucaccuuccugaugugcacaaacaggucucggggguugacuuaggucucccgaacugggggaaauauguauuacugagugcagggacccugauugcuuugauguugauaauuuuucuaaugacauguuguagaagagucaaucgaccagaaccuacgcaacgcagucuaggagggacagggaggaaggugucggucacuucccaaagcgggaaggucauaucuucaugggagucauauaaaagugggggugagacuagacuguaa

SEQ ID NO: 63741 - RNA, 1575 nt, Artificial Sequence
  derived and/or modified CDS sequence (wt) from glycoprotein__RABV__KR906778.1
augguuccucaagcucuuuuguuuguaccccuuuugguuuuuccauuguguuucgggaaauucccuaucuacacaauaccagacaaacucggacccuggagcccgauugacauacaucaucucagcugcccaaacaauuugguuguggaggacgaaggaugcaccaaccugucaggguucuccuauauggaacuuaaaguuggauacaucucagcuauaaaggugaacggguucacuugcacaggcguugugacagaggcugaaaccuacacuaacuuuguagguuaugucaccaccacauucaaaagaaagcauuuccgcccaauaccagaugcauguagagccgcauauaacuggaagauggccggugaccccagauaugaagagucucuacacaauccauacccugacuaccauuggcuucgaacuguaaaaaccaccaaggagucucucguuaucauauccccgaguguggcggauuuagacccauaugacaaaucccuucacucgagggucuucacuagcgggaaaugcucgggaauaacggugucuuccaccuacugcucaacgaaccaugauuacaccauuuggaugccugagaauccuagacuagggacgucuugcaacauuuuugucaauaguaaggggaagagagcauccaaaggggguaaaaccugcggcuuuguagaugaaagaggccuguauaagucucuaaagggagcaugcaaacucaaguuauguggaguucuuggacuuagacuuauggauggaacauggguugcgaugcaaacaucagaugagaccaaaugguguucuccugaucaguuggugaauaugcacgacuuccgcucggaugaaauugagcaucuuguuguggaggaauuggucaagaaaagagaggagugucuggaugcacuagaguccaucaugaccaccaagucagugaguuucagacgucucagucauuuaagaaaacuugucccuggguucgggaaagcauacaccauauucaauaagaccuugauggaggcugaugcucacuacaagucaguccggacuuggaaugagaucaucccaucaaaaggguguuuaagaguuggagggaggugucacccucauguaaacgggguguuuuucaaugguauaauauuagggccugacggccauguucuaauccccgagaugcaauccucccuccuucagcaacauauggaguuguuggaauccucaguuauuccccugaugcacccccuggcagacccguccacaguuuucaaggauggugaugaggcugaggauuuuguagagguucaccuuccugaugugcacaaacaggucucggggguugaccugggucucccgaacugggggaaauauguauuacugagugcaggaacccugauugcuuugauguugauaauuuuucuaaugacauguuguagaagagucaaucgaccagaaucuacgcaacgcagucucggagggacagggaggaaggugucggucacuucccaaagcgggaaggucauaucuucaugggagucauacaaaagugggggugagacuagacuguaa

SEQ ID NO: 63742 - RNA, 1575 nt, Artificial Sequence
  derived and/or modified CDS sequence (wt) from glycoprotein__RABV__KR906779.1
augguuccucaagcucuuuuguuuguaccccuuuugguuuuuccauuguguuucgggaaauucccuaucuacacgauaccagacaaacuuggacccuggagcccgauugacauacaucaucucagcugcccaaacaauuugguuguggaggacgaaggaugcaccaaccugucaggguucuccuacauggaacuuaaaguuggauacaucucagccauaaaggugaacggguuuacuugcacaggcguugugacagaggcugaaaccuacacuaacuuuguagguuaugucaccaccacguucaaaagaaagcauuuccgcccaauaccagaugcauguagagccgcauauaacuggaagauggccggugaccccagauaugaagagucucuacacaauccguacccugacuaccauuggcuucgaacuguaaaaaccaccaaggagucucucguuaucauauccccaaguguggcggauuuggacccauaugacaaaucccuucacucgagggucuucccuagugggaaaugcucaggaauaacggugucuuccaccuacugcucaacuaaccaugauuacaccauuuggaugccugagaauccgagacuagggacaucuugcgacauuuuuaccaauaguagagggaagagagcauccaaaggggguaagaccugcggcuuuguagaugaaagaggccuguauaagucucuaaagggggcaugcaaacucaaguuauguggaguucuuggacuuagacucauggauggaacaugggucgcgaugcaaacaucagaugagaccaaaugguguccuccugaucaguuggugaauaugcacgacuuucgcucggaugaaauugagcaucuuguuguagaggaguuggucaagaaaagagaggagugucuggaugcacuagaguccaucaugaccaccaagucagugaguuucagacgucucagucauuuaagaaaacuugucccuggauucggaaaagcauacaccauauucaacaagaccuugauggaggcugaugcucacuacaagucaguccggacuuggaaugagaucauccccucaaaaggguguuuaagaguuggagggaggugucauccucauguaaacgggguguuuuucaaugguauaauauuagggccugacggccauguucuaauccccgagaugcaaucaucccuccuucagcaacauauggaguuauuggaauccucaguuauuccccugaugcacccccuggcagacccguccacaguuuucaaggauggugaugaggcugaggauuuuguagagguucaccuuccugaugugcacaaacaggucucggggguugacuuaggucucccgaacugggggaaguauguguuacugagugcagggacccugauugcuuugauguugauaauuuuucuaaugacauguuguagaagagucaaucgaccagaaucuacgcaacgcagucuaggagggacagggaggaaggugucggucacuucccaaagcgggaaggucauaucuucaugggagucauauaaaagugggggugagacuagacuguaa

SEQ ID NO: 63743 - RNA, 1575 nt, Artificial Sequence
  derived and/or modified CDS sequence (wt) from glycoprotein__RABV__KR906780.1
augguuccucaagcucuuuuguuuguaccccuuuugguuuuuccauuguguuucgggaaauucccuaucuacacaauaccagacaaacucggacccuggagcccgauugacauacaucaucucagcugcccaaacaauuugguuguggaggacgaaggaugcaccaaccugucaggguucuccuauauggaacuuaaaguuggauacaucucagcuauaaaggugaacggguucacuugcacaggcguugugacagaggcugaaaccuacacuaacuuuguagguuaugucaccaccacauucaaaagaaagcauuuccgcccaauaccagaugcauguagagccgcauauaacuggaagauggccggugaccccagauaugaagagucucuacacaauccauacccugacuaccauuggcuucgaacuguaaaaaccaccaaggagucucucguuaucauauccccgaguguggcggauuuagacccauaugacaaaucccuucacucgagggucuucacuagcgggaaaugcucgggaauaacggugucuuccaccuacugcucaacgaaccaugauuacaccauuuggaugccugagaauccuagacuagggacgucuugcaacauuuuugucaauaguaaggggaagagagcauccaaaggggguaaaaccugcggcuuuguagaugaaagaggccuguauaagucucuaaagggagcaugcaaacucaaguuauguggaguucuuggacuuagacuuauggauggaacauggguugcgaugcaaacaucagaugagaccaaaugguguucuccugaucaguuggugaauaugcacgacuuucgcucggaugaaauugagcaucuuguuguggaggaauuggucaagaaaagagaggagugucuggaugcacuagaguccaucaugaccaccaagucagugaguuucagacgucucagucauuuaagaaaacuugucccuggguucgggaaagcauacaccauauucaauaagaccuugauggaggcugaugcucacuacaagucaguccggacuuggaaugagaucaucccaucaaaaggguguuuaagaguuggagggaggugucacccucauguaaacgggguguuuuucaaugguauaauauuagggccugacggccauguucuaauccccgagaugcaauccucccuccuucagcaacauauggaguuguuggaauccucaguuauuccccugaugcacccccuggcagacccguccacaguuuucaaggauggugaugaggcugaggauuuuguagagguucaccuuccugaugugcacaaacaggucucggggguugaccugggucucccgaacugggggaaauauguauuacugagugcaggaacccugauugcuuugauguugauaauuuuucuaaugacauguuguagaagagucaaucgaccagaaucuacgcaacgcagucucggagggacagggaggaaggugucggucacuucccaaagcgggaaggucauaucuucaugggagucauacaaaagugggggugagacuagacuguaa

SEQ ID NO: 63744 - RNA, 1575 nt, Artificial Sequence
  derived and/or modified CDS sequence (wt) from glycoprotein__RABV__KR906781.1
augguuccucaagcucuuuuguuuguaccccuuuugguuuuuccauuguguuucgggaaauucccuaucuacacaauaccagacaaacucggacccuggagcccgauugacauacaucaucucagcugcccaaacaauuugguuguggaggacgaagggugcaccaaccugucaggguucuccuauauggaacuuaaaguuggauacaucucagcuauaaaggugaacggguucacuugcacaggcguugugacagaggcugaaaccuacacuaacuuuguagguuaugucaccaccacauucaaaagaaagcauuuccgcccaauaccagaugcauguagagccgcauauaacuggaagauggccggugaccccagauaugaagagucucuacacaauccauacccugacuaccauuggcuucgaacuguaaaaaccaccaaggagucucucguuaucauauccccgaguguggcggauuuagacccauaugacaaaucccuucacucgagggucuucacuagcgggaaaugcucgggaauaacggugucuuccaccuacugcucaacgaaccaugauuacaccauuuggaugccugagaauccuagacuagggacgucuugcaacauuuuugucaauaguaaggggaagagagcauccaaaggggguaaaaccugcggcuuuguagaugaaagaggccuguauaagucucuaaagggagcaugcaaacucaaguuauguggaguucuuggacuuagacuuauggauggaacauggguugcgaugcaaacaucagaugagaccaaaugguguucuccugaucaguuggugaauaugcacgacuuucgcucggaugaaauugagcaucuuguuguggaggaauuggucaagaaaagagaggagugucuggaugcacuagaguccaucaugaccaccaagucagugaguuucagacgucucagucauuuaagaaaacuugucccuggguucgggaaagcauacaccauauucaauaagaccuugauggaggcugaugcucacuacaagucaguccggacuuggaaugagaucaucccaucaaaaggguguuuaagaguuggagggaggugucacccucauguaaacgggguguuuuucaaugguauaauauuagggccugacggccauguucuaauccccgagaugcaauccucccuccuucagcaacauauggaguuguuggaauccucaguuauuccccugaugcacccccuggcagacccguccacaguuuucaaggauggugaugaggcugaggauuuuguagagguucaccuuccugaugugcacaaacaggucucggggguugaccugggucucccgaacugggggaaauauguauuacugagugcaggaacccugauugcuuugauguugauaauuuuucuaaugacauguuguagaagagucaaucgaccagaaucuacgcaacgcagucucggagggacagggaggaaggugucggucacuucccaaagcgggaaggucauaucuucaugggagucauacaaaagugggggugagacuagacuguaa

SEQ ID NO: 63745 - RNA, 1575 nt, Artificial Sequence
  derived and/or modified CDS sequence (wt) from glycoprotein__RABV__KR906782.1
augguuccucaagcucuuuuguuuguacuccuuuugguuuuuccauuguguuucgggaaauucccuaucuacacaauaccagacaaacucggacccuggagcccgauugacauacaucaucucagcugcccaaacaauuugguuguggaggacgaaggaugcaccaaccugucaggguucuccuauauggaacuuaaaguuggauacaucucagcuauaaaggugaacggguucacuugcacaggcguugugacagaggcugaaaccuacacuaacuuuguagguuaugucaccaccacauucaaaagaaagcauuuccgcccaauaccagaugcauguagagccgcauauaacuggaagauggccggugaccccagauaugaagagucucuacacaauccauacccugacuaccauuggcuucgaacuguaaaaaccaccaaggagucucucguuaucauauccccgaguguggcggauuuagacccauaugacaaaucccuucacucgagggucuucacuagcgggaaaugcucgggaauaacggugucuuccaccuacugcucaacuaaccaugauuacaccauuuggaugccugagaauccuagacuagggacgucuugcaacauuuuugucaauaguaaggggaagagagcauccaaaggggguaaaaccugcggcuuuguagaugaaagaggccuguauaagucucuaaagggagcaugcaaacucaaguuauguggaguucuuggacuuagacuuauggauggaacauggguugcgaugcagacaucagaugagaccaaaugguguucuccugaucaguuggugaauaugcacgacuuucgcucggaugaaauugagcaucuuguuguggaggaauuggucaagaaaagagaggagugucuggaugcacuagaguccaucaugaccaccaagucagugaguuucagacgucucagucauuuaagaaaacuugucccuggguucgggaaggcauacaccauauucaauaagaccuugauggaggcugaugcucacuacaagucaguccggacuuggaaugagaucaucccaucaaaaggguguuuaagaguuggagggaggugucacccucauguaaacgggguguuuuucaaugguauaauacuagggccugacggccauguucuaauccccgagaugcaauccucccuccuucagcaacauauggaguuguuggaauccucaguuauuccccugaugcacccccuggcagacccguccacaguuuucaaggauggugaugaggcugaggauuuuguagagguucaccuuccugaugugcacaaacaggucucggggguugaccugggucucccgaacugggggaaauauguauuacugagugcaggaacccugauugcuuugauguugauaauuuuucuaaugacauguuguagaagagucaaucgaccggaaucuacgcaacgcagucucggagggacagggaggaaggugucggucacuucccaaagcgggaaggucauaucuucaugggagucauauaaaagugggggugagacuagacuguaa

SEQ ID NO: 63746 - RNA, 1575 nt, Artificial Sequence
  derived and/or modified CDS sequence (wt) from glycoprotein__RABV__KR906784.1
augguuccucaagcucuuuuguuuguaccccuuuugguuuuuccauuguguuucgggaaauucccuaucuacacgauaccagacaaacuuggacccuggagcccgauugacauacaucaucucagcugcccaaacaauuugguuguggaggacgaaggaugcaccaaccugucaggguucuccuacauggaacuuaaaguuggauacaucucagccauaaaggugaacggguucacuugcacaggcguugugacagaggcugaaaccuacaccaacuuuguagguuaugucaccaccacguucaaaagaaagcauuuccgcccaauaccagaugcauguagagccgcauauaacuggaagauggccggugaccccagauaugaagagucucuacacaauccguacccugacuaccauuggcuucgaacuguaaaaaccaccaaggagucucucguuaucauauccccaaguguggcggauuuggacccauaugacaaaucccuucacucgagggucuucccuagugggaaaugcucaggaauaacggugucuuccaccuacugcucaacuaaccaugauuacaccauuuggaugccugagaauccgagacuagggacgucuugcgacauuuucaccaauaguagagggaagagagcauccaaaggggguaagaccugcggcuuuguagaugaaagaggccuguauaagucucuaaggggggcaugcaaacucaaauuauguggaguucuuggacuuagacucauggauggaacaugggucgcgaugcaaacaucagaugagaccaaaugguguccuccugaucaguuggugaauaugcacgacuuucgcucggaugaaauugagcaucuuguuguggaggaguuggucaagaaaagagaggagugucuggaugcauuagaauccaucaugaccacuaagucagugaguuucagacgucucagucauuuaagaaaacuugucccuggauucggaaaggcauacaccauauucaacaagaccuugauggaggcugaugcucacuacaagucaguccggacuuggaaugagaucauccccucaaaaggguguuuaagaguuggagggaggugucauccucauguaaacgggguguuuuucaaugguauaauauuagggccugacggccauguucuaauccccgagaugcaaucaucccuccuucagcaacauauggaguuauuggaauccucaguuauuccccugaugcacccccuggcagacccguccacuguuuucaaggagggugaugaggcugaggauuuuguagagguucaccuuccugaugugcacaaacaggucucggggguugacuuaggucucccgaacugggggaaauauguauuacugagugcagggacccugauugcuuugauguugauaauuuuucuaaugacauguuguagaagagucaaucgaccagaaccuacgcaacgcagucuaggagggacagggaggaaggugucggucacuucccaaagcgggaaggucauaucuucaugggagucauauaaaagugggggugagacuagacuguaa

SEQ ID NO: 63747 - RNA, 1575 nt, Artificial Sequence
  derived and/or modified CDS sequence (wt) from glycoprotein__RABV__KR906785.1
augguuccucaagcucuuuuguuuguaccccuuuugguuuuuccauuguguuucgggaaauucccuaucuacacgauaccagacaaacuuggacccuggagcccgauugacauacaucaucucagcugcccaaacaauuugguuguggaggacgaaggaugcaccaaccugucaggguucuccuacauggaacuuaaaguuggauacaucucagccauaaaggugaacggguucacuugcacaggcguugugacagaggcugaaaccuacacuaacuuuguagguuaugucaccaccacguucaaaagaaagcauuuccgcccaauaccagaugcauguagagccgcauauaacuggaagauggccggugaccccagauaugaagagucucuacacaauccguacccugacuaccauuggcuucgaacuguaaaaaccaccaaggagucucucguuaucauauccccaaguguggcggauuuggacccauacgacaaaucccuucacucgagggucuucccuagugggaaaugcucaggaauaacggugucuuccaccuacugcucaacuaaccaugauuacaccauuuggaugccugagaauccgagacuagggacgucuugcgacauuuucaccaauaguagagggaagagagcauccaaaggggguaagaccugcggcuuuguagaugaaagaggccuguauaagucucuaaggggggcaugcaaacucaaauuauguggaguucuuggacuuagacucauggauggaacaugggucgcgaugcaaacaucagaugagaccaaaugguguccuccugaucaguuggugaauaugcacgacuuucgcucggaugaaauugagcaucuuguuguagaagaguuggucaagaaaagagaggagugucuggaugcauuagaguccaucaugaccacuaagucagugaguuucagacgucucagucauuuaagaaaacuugucccuggauucggaaaagcauacaccauauucaacaagaccuugauggaggcugaugcucacuacaagucaguccggacuuggaaugagaucauccccucaaaaggguguuuaagaguuggagggaggugucauccucauguaaacgggguguuuuucaaugguauaauauuagggccugacggccauguucuaauccccgagaugcaaucaucccuccuucagcaacauauggaguuauuggaauccucaguuauuccccugaugcacccccuggcagacccguccacuguuuucaaggagggugaugaggcugaggauuuuguagagguucaccuuccugaugugcacaaacaggucucggggguugacuuaggucucccgaacugggggaaauauguauuacugagugcagggacccugauugcuucgauguugauaauuuuucuaaugacauguuguagaagagucaaucgaccagaaccuacgcaacgcagucuaggagggacagggaggaaggugucggucacuucccaaagcgggaaggucauaucuucaugggagucauauaaaagugggggggagacuagacuguaa

SEQ ID NO: 63748 - RNA, 1575 nt, Artificial Sequence
  derived and/or modified CDS sequence (wt) from glycoprotein__RABV__KR906787.1
augguuccucaagcucuuuuguuuguacuccuuuugguuuuuccauuguguuucgggaaauucccuaucuacacaauaccagacaaacucggacccuggagcccaauugacauacaucaucucagcugcccaaacaauuugguuguggaggacgaaggaugcaccaaccugucaggguucuccuauauggaacuuaaaguuggauacaucucagcuauaaaggugaacggguucacuugcacaggcguugugacagaggcugaaaccuacacuaacuuuguagguuaugucaccaccacauucaaaagaaagcauuuccgcccaauaccagaugcauguagagccgcauauaacuggaagauggccggugaccccagauaugaagagucucuacacaauccauacccugacuaccauuggcuucgaacuguaaaaaccaccaaggagucucucguuaucauauccccgaguguggcggauuuagacccauaugacaaaucccuucacucgagggucuucacuagcgggaaaugcucgggaauaacggugucuuccaccuacugcucaacuaaccaugauuacaccauuuggaugccugagaauccuagacuagggacgucuugcaacauuuuugucaauaguaaggggaagagagcauccaaaggggguaaaaccugcggcuuuguagaugaaagaggccuguauaagucucuaaagggagcaugcaaacucaaguuauguggaguucuuggacuuagacuuauggauggaacauggguugcgaugcagacaucagaugagaccaaaugguguucuccugaucaguuggugaauaugcacgacuuucgcucggaugaaauugagcaucuuguuguggaggaauuggucaagaaaagagaggagugucuggaugcacuagaguccaucaugaccaccaagucagugaguuucagacgucucagucauuuaagaaaacuugucccuggguucgggaaggcauacaccauauucaauaagaccuugauggaggcugaugcucacuacaagucaguccggacuuggaaugagaucaucccaucaaaaggguguuuaagaguuggagggaggugucacccucauguaaacgggguguuuuucaaugguauaauacuagggccugacggccauguucuaauccccgagaugcaauccucccuccuucagcaacauauggaguuguuggaauccucaguuauuccccugaugcacccccuggcagacccguccacaguuuucaaggauggugaugaggcugaggauuuuguagagguucaccuuccugaugugcacaaacaggucucggggguugaccugggucucccgaacugggggaaauauguauuacugagugcaggaacccugauugcuuugauguugauaauuuuucuaaugacauguuguagaagagucaaucgaccggaaucuacgcaacgcagucucagagggacagggaggaaggugucggucacuucccaaagcgggaaagucauaucuucaugggagucauauaaaagugggggugagacuagacuguaa

SEQ ID NO: 63749 - RNA, 1575 nt, Artificial Sequence
  derived and/or modified CDS sequence (wt) from glycoprotein__RABV__KR906788.1
augguuccucaagcucuuuuguuuguaccccuuuugguuuuuccauuguguuucgggaaauucccuaucuacacaauaccagacaaacucggacccuggagcccgauugacauacaucaucucagcugcccaaacaauuugguuguggaggacgaaggaugcaccaaccugucaggguucuccuauauggaacuuaaaguuggauacaucucagcuauaaaggugaacggguucacuugcacaggcguugugacagaggcugaaaccuacacuaacuuuguagguuaugucaccaccacauucaaaagaaagcauuuccgcccaauaccagaugcauguagagccgcauauaacuggaagauggccggugaccccagauaugaagagucucuacacaauccauacccugacuaccauuggcuucgaacuguaaaaaccaccaaggagucucucguuaucauauccccgaguguggcggauuuagacccauaugacaaaucccuucacucgagggucuucacuagcgggaaaugcucgggaauaacggugucuuccaccuacugcucaacuaaccaugauuacaccauuuggaugccugagaaucccagacuagggacgucuugcaacauuuuugucaauaguaaggggaagagagcauccaaaggggguaaaaccugcggcuuuguagaugaaagaggccuguauaagucucuaaagggagcaugcaaacucaaguuauguggaguucuuggacuuagacuuauggauggaacauggguugcgaugcaaacaucagaugagaccaaaugguguucuccugaucaguuggugaauaugcacgacuuucgcucggaugaaauugagcaucuuguuguggaggaauuggucaagaaaagagaggagugucuggaugcacuagaguccaucaugaccaccaagucagugaguuucagacgucucagucauuuaagaaaacuugucccuggguucgggaaagcauacaccauauucaauaagaccuugauggaggcugaugcucacuacaagucaguccggacuuggaacgagaucaucccaucaaaaggguguuuaagaguuggaggaaggugucacccucauguaaacgggguguuuuucaaugguauaauauuagggccugacggccauguucuaauccccgagaugcaauccucccuccuucagcaacauauggaguuguuggaauccucaguuauuccccugaugcacccccuggcagacccguccacaguuuucaaggauggugaugaggcugaggauuuuguagagguucaccuuccugaugugcacaaacaggucucggggguugaccugggucucccgaacugggggaaauauguauuacugagugcagggacccugauugcuuugauguugacaauuuuucuaaugacauguuguagaagagucaaucgaccagaaucuacgcaacgcagucucggagggacagggaggaaggugucggucacuucccaaagcgggaaggucauaucuucaugggagucauauaaaagugggggugagacuagacuguaa

SEQ ID NO: 63750 - RNA, 1575 nt, Artificial Sequence
  derived and/or modified CDS sequence (wt) from glycoprotein__RABV__KR906790.1
augguuccucaagcucuuuuguuuguaccccuuuugguuuuuccauuguguuucgggaaauucccuaucuacacgauaccagacaaacuuggacccuggagcccgauugacauacaucaucucagcugcccaaacaauuugguuguggaggacgaaggaugcaccaaccugucaggguucuccuacauggaacuuaaaguuggauacaucucagccauaaaggugaacggguuuacuugcacaggcguugugacagaggcugaaaccuacacuaacuuuguagguuaugucaccaccacguucaaaagaaagcauuuccgcccaauaccagaugcauguagagccgcauauaacuggaagauggccggugaccccagauaugaagagucucuacacaauccguacccugacuaccauuggcuucgaacuguaaaaaccaccaaggagucucucguuaucauauccccaaguguggcggauuuggacccauaugacaaaucccuucacucgagggucuucccuagugggaaaugcucaggaauaacggugucuuccaccuacugcucaacuaaccaugauuacaccauuuggaugccugagaauccgagacuagggacgucuugcgacauuuuuaccaauaguagagggaagagagcauccaaaggggguaagaccugcggcuuuguagaugaaagaggccuguauaagucucuaaagggggcaugcaaacucaaguuauguggaguucuuggacuuagacucauggauggaacaugggucgcgaugcaaacaucagaugagaccaaaugguguccuccugaucaguuggugaauaugcacgacuuucgcucggaugaaauugagcaucuuguuguagaggaguuggucaagaaaagagaggagugucuggaugcacuagaguccaucaugaccaccaagucagugaguuucagacgucucagucauuuaagaaaacuugucccuggauucggaaaagcauacaccauauucaacaagaccuugauggaggcugaugcucacuacaagucaguccggacuuggaaugagaucauccccucaaaaggguguuuaagaguuggagggaggugucauccucauguaaacgggguguuuuucaaugguauaauauuagggccugacggccauguucuaauccccgagaugcaaucaucccuccuucagcaacauauggaguuauuggaauccucaguuaucccccugaugcacccccuggcagacccguccacaguuuucaaggauggugaugaggcugaggauuuuguagagguucaccuuccugaugugcacaaacaggucucggggguugacuuaggucucccgaacugggggaaguauguguuacugagugcagggacccugauugcuuugauguugauaauuuuucuaaugacauguuguagaagagucaaucgaccagaaucuacgcaacgcagucuaggagggacagggaggaaggugucggucacuucccaaagcgggaaggucauaucuucaugggagucauauaaaagugggggugagacuagacuguaa

SEQ ID NO: 63751 - RNA, 1575 nt, Artificial Sequence
  derived and/or modified CDS sequence (wt) from glycoprotein__RABV__KT023100.1
augauccuucaggcccuucuguuugugccucucuuaaucucuucguugugucucgggaaauuccccaucuacacaauaccagacaagcuugguccuuggagccccaucgauauacaucaccucagcuguccaaauaauuuaguuguggaggacgaagggugcaccaaucuaucaggauucucuuacauggaacuaaaggugggauacaucucugccauaaaggugaacggguucacuuguaccggugucgugacagaggcugaaaccuauaccaacuuuguugguuaugucaccaccacauucaagaggaaacauuuccgcccuauaccggaugcaugcagggcugcauacaacuggaagauggcuggugauccuagauaugaggagucucuucaaaauccuuauccugauuaccacuggcuacggaccguaaagaccacuaaggagucucuuaucaucauaucuccaaguguggcugauuuagacccauacgacaaaucccuucauucuaggguguucccuggugggaaauguuugggaauaacaguuucuuccaccuacugcucaaccaaccaugauuacaccaucuggaugcccgaggaaccaagacucgggacaucuugcgacauuuuuaccagcagcaaagggaaaaaggcaucuaaaggaggcaagacuugcggauuuguggaugaaaggggauuguacaagucucuaaaaggagcauguaaacucaagcugugcggaguucucggacucagacuuauggauggaaccuggguuucaauucaaacaucagacgauaccaaauggugcccuccagaucaauuggugaaucuacaugacuuucacucagacgaaauagagcaucucgucguggaggagcuggucaagaagagggaagaguguuuggacgcauuggaguccaucaugaccaccaaaucuguaaguuuuagacgucucagcuauuugagaaaacuugucccuggguuuggaaaggcauacacuauauucaacaagacuuugauggaggcugacgcccacuacaagucaguucggacuuggaacgagaucauccccucaaaaggguguuugaaagucagagagaggugucauccuccuguggacggaguguucuucaauggcauaauucuggguccggacgggaauguccugauaccagagaugcaaucgucucuacuucaacaacauauggagcuguuggagucuucuguaaucccccuaaugcaucccuuggcagacccgucaacagucuucaaggagggggaugaagcggaggauuuuguugaaguccaccucccagauguucacaaacagaucucagggguugaccuuggucucccgaguugggggaaauaucuucugaugauugcagguggucuggcgacacugguucugauaaucugcucgauggcaugcuguagaagaaccaagcgaacagagucaagaagacgaggcucucgagagucagagaaaaagguaacggcagccccccagacuaggaaagucguaucuucaugggagcuguacaagagugaaggcgaugccaggcuguga

SEQ ID NO: 63752 - RNA, 1575 nt, Artificial Sequence
  derived and/or modified CDS sequence (wt) from glycoprotein__RABV__KT221112.1
augauuccccaagcucuucuguuugugccccuccuagucuucucguuguguuucgggaaauuccccaucuauacgauacccgacaaacucgguccauggagucccauugacauacaucaucucagcuguccaaacaauuugguuguggaggaugaaggaugcaccaaucuaucuggauucuccuacauggaacucaaaguaggauacaucucagccauuaaagugaauggauucaccuguacagguguggugacggaagcagagaccuacacuaacuuugucgguuacgucaccaccacguuuaagagaaagcacuuccgcccaacaccagaugcgugcagagccgcauacaacuggaagauggcuggugacccuagguaugaggagucucuaaacaauccguacccugacuaccauuggcuucggacuguaaagaccaccaaggagucccuuguugucauaucuccaaguguggcagauuuagacccguacgauaaaucccuucacucgagaguuuuuccuagcggaaaaugcucaggaauaacaguguccucuaccugcugcucuacuaaccacgacuacaccaucuggaugccugagaaucccagacuggggacuucuugugacauuuucgucaauagcagagggaagagagcaucaaaagggagcaagacuuguggguuuguggaugagagaggccuguacaagucucuaaaaggggcaugcaaacuaaaacuaugugggguucuugggcuuagacuuauggauggaacaugggucgcaauucagacgucagaugagaccaaauggugcccuccugaucaacuagugaaucuacacgacuuucgcucggaugagauugaacaucuuguuguagaggaguuggucaagaaaagggaagagugucuggaugcacuggaguccaucaugaccacaaaguccgugaguuuuagacgccuuagucacuugaggaagcuugucccuggguuuggaaaggcauauacuauauucaacaaaaccuugauggaagcugaugcucacuacaaaucaguccggacuuggaacgaaaucauccccucuaaagggugcuuaagaguuggggggagaugucauccucaugugaaugggguguucuucaaugguaucauacuggguccugacggacauguccugauuccagagaugcaaucaucccuccuccagcagcacauggaguuguuggaguccucagucaucccauugaugcaucccuuggcagacccgucaacgauuuuuaaggacggugacgaggcggaggacuuuguugagguucaccucccggacgugcacaagcaggucucgggggucgaucucggucucccgaacugggggaaguaugugcuaaugagcgcaggcgcucugauugcauugauguugaugauuuucucaaugacguguugcaggaagacugauagaauaggaucaacacaccacgguccuggagagacggggaggaaagugucuguaacuucccaaaacggaagggucauagcuucaugggagucauauaagagcggaggugaaaccaagcuguga

SEQ ID NO: 63753 - RNA, 1575 nt, Artificial Sequence
  derived and/or modified CDS sequence (wt) from glycoprotein__RABV__KT221113.1
augauuccccaagcucuuuuguuugugccccuccuagucuucucguuguguuucgggaaguuucccauuuauacgauacccgacaaacuugguccauggagucccauugacauacaucaucuaagcugcccaaacaauuugguuguggaggaugaaggaugcaccaaccugucuggauuuuccuacauggaacucaaaguaggauacaucucagccauuaaggugaauggauucaccuguacagguguggugacggaagcagagacuuacacuaacuuuguugguuacguuaccaccacguuuaagagaaagcacuuucgcccgacgccagaugcgugcagagccgcacacaacuggaagauggcuggugaccccagguaugaggagucucugcacaauccauacccugacuaccauuggcuucggacugugaagaccaccaaggagucacuuguuaucauaucuccaaguguggcagauuuagacccguacgauaaaucccuucacucgagagucuuuccuagcggaaaaugcucaggaauaacaguguccucuaccuacugcucuaccaaccacgacuacaccaucuggaugccugagaaucccagacuggggacuucuugugacaucuucgucaauagcagagggaagagggcaucaaaagggagcaagacuuguggauuuguggaugaaagaggccuguacaagucucuaaaaggggcaugcaaacuaaaacuaugugggguucuuggacuuagacuuauggauggaaccuggguugcaauucagacaucagaugagaccaaauggugcccuccugaucagcuagugaaucuacaugacuuucgcucggacgagauugaacaucuuguuguggaggagcuggucaagaaaagggaagagugucuggaugcacuggaguccaucaugaccacaaagucugugaguuuuagacgccuuagucacuugaggaagcuugucccuggguuuggaaaggcguauacuauauucaacaaaaccuugauggaagcugacgcucacuacaaaucaguccggacuuggaaugaaaucauccccucuaaagggugcuuaagaguuggagggagaugucauccucauguaaaugggguguucuucaaugguaucauacugggcccugauggacauguucugauuccugagaugcaaucaucccuccuucagcagcauauggaguuguuggaguccucaguuaucccauugaugcaucccuuagcagacccaucaacgaucuuuaaggacggugacgaggcggaggacuuuguugagguucaccuuccggacgugcacaggcaggucucggggguugaucucggucucccaaacugggggaaguauguacuaaugagcgcaggcgcucuaguugcauugauguugaugauuuucuuaaugacguguugcgugaagaccgauagaacaggaucaacacaccacaguccuggagagacggggaggaaagugucuguaacuucccaaaacggaagagucauagcuucaugggaaucauacaaaagcggaggugaaaccaagcuguga

SEQ ID NO: 63754 - RNA, 1575 nt, Artificial Sequence
  derived and/or modified CDS sequence (wt) from glycoprotein__RABV__KT221114.1
augauuccccaagcucuuuuguuugugccccuccuagucuucucguuguguuucgggaaguuccccauuuauacgauacccgacaaacuugguccauggagucccauugacauacaucaucuaagcugcccaaacaauuugguuguggaggaugaaggaugcaccaaccugucuggauuuuccuacauggaacucaaaguaggauacaucucagccauuaaagugaauggauucaccuguacagguguggugacggaagcagagacuuacacuaacuuuguugguuacguuaccaccacguuuaagagaaagcacuuucgcccgacgccagaugcgugcagagccgcacacaacuggaagauggcuggugauuccagguaugaggagucucugcacaauccauacccugacuaccauuggcuucggacugugaagaccaccaaggagucacuuguuaucauaucuccaaguguggcagauuuagacccguacgauaaaucccuucacucgagagucuuuccuagcggaaaaugcucaggaauaacaguguccucuaccuacugcucuaccaaccacgacuacaccaucuggaugccugagaaucccagacuggggacuucuugugacaucuucgucaauagcagagggaagagggcaucaaaagggagcaagacuuguggauuuguggaugaaagaggccuguacaagucucuaaaaggggcaugcaaacuaaaacuaugugggguucuuggacuuagacuuauggauggaaccuggguugcaauucagacaucagaugagaccaaauggugcccuccugaucagcuagugaaucuacaugacuuucgcucggacgaaauugaacaucuuguuguggaggagcuggucaagaaaagggaagagugucuggaugcacuggaguccaucaugaccacaaagucugugaguuuuagacgccuuagucacuugaggaagcuugucccuggguuuggaaaggcguauacuauauucaacaaaaccuugauggaagcugacgcucacuacaaaucaguccggacuuggaaugaaaucauccccucuaaagggugcuuaagaguuggagggagaugucauccucauguaaaugggguguucuucaaugguaucauacugggcccugauggacauguucugauuccugagaugcaaucaucccuccuucagcagcauauggaguuguuggaguccucaguuaucccauugaugcaucccuuagcagacccaucaacgaucuuuaaggacggugacgaggcggaggacuuuguugagguucaccuuccggacgugcacaggcaggucucggggguugaucucggucucccaaacugggggaaguauguacuaaugagcgcaggcgcucuaguugcauugauguugaugauuuucuuaaugacguguugcgugaagaccgauagaacaggaucaacacaccacaguccuggagagacggggaggaaagugucuguaacuucccaaaacggaagggucauagcuucaugggaaucauacaaaagcggaggugaaaccaagcuguga

SEQ ID NO: 63755 - RNA, 1575 nt, Artificial Sequence
  derived and/or modified CDS sequence (wt) from glycoprotein__RABV__KT221115.1
augauuccccaagcucuuuuguuugugccccuccuagucuucucguuguguuucgggaaguuccccauuuauacgauacccgacaaacuugguccauggagucccauugacauacaucaucuaagcugcccaaacaauuugguuguggaggaugaaggaugcaccaaccugucuggauuuuccuacauggaacucaaaguaggauacaucucagccauuaaagugaauggauucaccuguacagguguggugacggaagcagagacuuacacuaacuuuguugguuacguuaccaccacguuuaagagaaagcacuuucgcccgacgccagaugcgugcagagccgcacacaacuggaagauggcuggugaccccagguaugaggagucucugcacaauccauacccugacuaccauuggcuucggacugugaagaccaccaaggagucacuuguuaucauaucuccaaguguggcagauuuagacccguacgauaaaucccuucacucgagagucuuuccuagcggaaaaugcucaggaauaacaguguccucuaccuacugcucuaccaaccacgacuacaccaucuggaugccugagaaucccagacuggggacuucuugugacaucuucgucaauagcagagggaagagggcaucaaaagggagcaagacuuguggauuuguggaugaaagaggccuguacaagucucuaaaaggggcaugcaaacuaaaacuaugugggguucuuggacuuagacuuauggauggaaccuggguugcaauucagacaucagaugagaccaaauggugcccuccugaucagcuagugaaucuacaugacuuucgcucggacgaaauugaacaucuuguuguggaggagcuggucaagaaaagggaagagugucuggaugcacuggaguccaucaugaccacaaagucugugaguuuuagacgccuuagucacuugaggaagcuugucccuggguuuggaaaggcguauacuauauucaacaaaaccuugauggaagcugacgcucacuacaaaucaguccggacuuggaaugaaaucauccccucuaaagggugcuuaagaguuggagggagaugucauccucauguaaaugggguguucuucaaugguaucauacugggcccugauggacauguucugauuccugagaugcaaucaucccuccuucagcagcauauggaguuguuggaguccucaguuaucccauugaugcaucccuuagcagacccaucaacgaucuuuaaggacggugacgaggcggaggacuuuguugagguucaccuuccggacgugcacaggcaggucucggggguugaucucggucucccaaacugggggaaguauguacuaaugagcgcaggcgcucuaguugcauugauguugaugauuuucuuaaugacguguugcgugaagaccgauagaacaggaucaacacaccacaguccuggagagacggggaggaaagugucuguaacuucccaaaacggaagggucauagcuucaugggaaucauacaaaagcggaggugaaaccaagcuguga

SEQ ID NO: 63756 - RNA, 1575 nt, Artificial Sequence
  derived and/or modified CDS sequence (wt) from glycoprotein__RABV__KT221117.1
augauuccccaagcucuucuguuugugccccuccuagucuucucguuguguuucgggaaauuccccaucuauacgauacccgacaaacucgguccauggagucccauugacauacaucaucucagcuguccaaacaauuugguuguggaggaugaaggaugcaccaaucuaucuggauucuccuacauggaacucaaaguaggauacaucucagccauuaaagugaauggauucaccuguacagguguggugacggaagcagagaccuacacuaacuuugucgguuacgucaccacaacguuuaagagaaagcacuuccgcccaacgccagaugcgugcagagcugcauacaacuggaagauggcuggugacccuagguaugaggagucucuacacaauccguacccugacuaccauuggcuucggacuguaaagaccaccaaggagucccuuguugucauaucuccaaguguggcagauuuggacccguacgauaaaucccuucacucgagaguuuuuccuagcggaaaaugcucaggaauaacaguguccucuaccuacugcucuacuaaccaugacuauaccaucuggaugccugagaaucccagacuggggacuucuugugacauuuucgucaauagcagagggaagagagcaucaaaagggagcaagacuuguggguuuguggaugagagaggccuguacaagucucuaaaaggggcaugcaaacugaaacuaugugggguucuugggcuuagacuuauggauggaacaugggucgcaauccagacgucagaugagaccaaauggugcccuccugaucaauuagugaaucuacaugacuuucgcucggaugagauugaacaucuuguuguggaggaguuggucaagaaaagggaagagugucuggaugcacuggaguccaucaugaccacaaaguccgugaguuuuagacgccuuagucacuugaggaagcuugucccuggguuuggaaaggcauauacuauauucaacaaaaccuugauggaagcugaugcucacuacaaaucaguccggacuuggaacgaaaucauccccucuaaagggugcuuaagaguuggggggagaugucauccucaugugaaugggguguucuucaaugguaucauacuggguccugacggacauguccugaucccagagaugcaaucaucccuccuccagcagcacauggaguuguuggaguccucagucaucccauugaugcaucccuuagcagacccaucaacgauuuuuaaggacggugacgaggcggaggacuuuguugagguucaccucccggacgugcacaagcaggucucgggggucgaucucggucucccaaacugggggaaguaugugcuaaugagcgcaggcgcucugauugcauugauguugaugguuuuccuaaugacgugcugcaggaagacugauagaacaggaucaacacaccacaguccuggagagacggggaggaaagugucuguaacuucccaaaacgaaagggucauagcuucaugggagucauacaagagcggaggugaaaccaagcuguga

SEQ ID NO: 63757 - RNA, 1575 nt, Artificial Sequence
  derived and/or modified CDS sequence (wt) from glycoprotein__RABV__KT221118.1
augguuccucaagcccuucuguuuguaccccuucuggccguuccauuguguuuugggaaauuccccauuuacacgauaccagacaaacucggucccuggagucccauugauauacaucaucucagcuguccgaauaauuugguuguggaggaugaaggauguaccaaucugucaggauuuucauacauggaacuuaaaguaggauacauuucagccauaaaggugaacggguucacuuguacggguguggugacggaagcagaaaccuacaccaacuuuguuggcuaugucaccaccacguuuaagagaaagcacuuucgaccaacaccggaugcgugcagauccgcauacaauuggaagauggcuggugaccccagauacgaagagucucugcacaaucccuauccugauuaucauuggcuccggacuguaaaaaccaccaaagaguccuuugucaucauaucuccaaguguggcagaucuagauccguacgauaaaucccuucauucgagaguuuuuccuagaggaaaaugcucaggaauaacggugucuucuaccuacugcucuacuaaccaugacuacaccaucuggaugccugaaaaucccagacuggggaccucuugugauauuuucaccaacagcagagggaagagagcauccaaagggagcaagaccuguggauuuguagaugagagaggcuuguacaaaucucuaaaaggagcaugcaaacugaagcugugugggguucuuggacuuagacuuauggauggaacaugggucgcgauucagacaucagacgagaccaaguggugcccuccugaccagcuagugaaucuacaugacuuucauucggaugagauugaacaucuuguuguggagguguuggucaagaaaagggaagagugucuagaugcacuggaguccaucaugaccaccaaguccgugaguuuccgacgucucagucacuugaggaaacuugugccuggauucggaaaagcauacaccauauucaauaagaccuugauggaggcugaugcucacuacaaaucgguccggacuuggaacgagaucauccccucuaaaggguguuugagaguuggaggcagaugucauccccaugugaacgggguguuuuuuaaugguauuauccuaggcccugacggccaugucuugaucccggaaaugcagucaucucuccuucagcagcauauggaguuguuggaaucaucggucauccccuuaaugcauccuuuggcagauccaucaacgguuuuuaaagauggugacgaggcggaggauuuuguugagguucaccuuccagaugugcauaagcaggucucaggggucgaucucggucucccaagcugggggaaguauguguugaugagcgcaggcauuuugacugcacugauguugaugauuuucuuaaugacguguugccgaaggaccaauagagcagaaucaauacaacacagucuuggagagacagggaggaaaguuucgguaaccucccaaaacgggagggucauaucuucaugggagucauacaaaagcggaggugagaccaagcuguaa

SEQ ID NO: 63758 - RNA, 1575 nt, Artificial Sequence
  derived and/or modified CDS sequence (wt) from glycoprotein__RABV__KT221120.1
augauuccucaaguucuuuuguuuguuccccuucuaguuuucucgucguguuuugggaaauuccccauuuacacgauaccagacaaacuugguccauggagucccaucgauauacaucaucucagcuguccgaacaaucugguuguggaagaugaaggaugcaccaaucugucuggauuuuccuacauggaacucaaagugggauauauuucagccauaaaagugaacggauucaccuguacagguguggugacagaagcagaaaccuacacgaacuuuguugguuaugucaccaccacguuuaagagaaagcacuuucgcccuacgccagaugcgugcagagccgcguacaacuggaagauggcuggugaccccagguaugaagagucucugcacaauccguacccugauuaucacuggcuccgaacugucaagaccuccaaggagucccuugucaucauaucuccgagcguugcggauuuggacccguacgauaaaucccuucacucgagaguuuuuccuggcggaaaaugcucuggaauaaccguguccuccacuugcugcucuacuaaccacgacuacaccaucuggaugccugaaaauccuagacugggaacuucgugugacauuuucaccaauaguagagggaagagggcaucaaaagggggcaagacuuguggauuuguggaugaaagaggcuuguacaagucucuaaagggagcaugcaagcugaagcuaugugggguucuaggacuuagacuuauggacggaacaugggucgcaauucagacaucagaugagaucaaauggugcucuccugaucagcuaguaaaucuacacgacuuucacucagaugagauugaacaucuuguuguggaggaguuggucaaaaagagggaagagugucuggacgcacuggagacuauuaugaccacaaaguccgugaguuucaggcgucuuagucauuugaggaagcuagucccuggguuuggaaaggcguauaccauauucaacaaaaccuugauggaggcugaugcucacuauaaaucaauccggacuuggaaugaaaucauccccucuaaaggguguuuaagaguuggggggagaugucauccucaugugaacgggguguucuucaacggcauuauacuggguccugacggacauguucuaaucccagagaugcaaucgucccuccuccaccagcauauggaauuguuggaguccucagucaucccuuugaugcaucccuuagcagacccgucaacaguuuuuaaagacggcgacgaggcagaggacuuuguugagguucaccuuccggaugugcacaagcagaucucggggguugaucuuggucucccaaacugggggaaguacgugcugguaagugcaggugcucugacugcauuaauguugaugauuuucuuaaugacguguugcagaaagacuaauagagcagagucaauacaacacaguccuggagagacagggaggaaagugucgguaacuucucacaacggaagggucauaucuucaugggaaucauauaaaaguggaggugagaccaagcuguga

SEQ ID NO: 63759 - RNA, 1575 nt, Artificial Sequence
  derived and/or modified CDS sequence (wt) from glycoprotein__RABV__KT221122.1
augauuccucaaguucuuuuguuuguucccuuucuaguuuucucgucguguuuugggaaauuccccauuuacacgauaccagacaaacuugguccauggagucccaucgauauacaucaucucagcuguccgaacaaucugguuguggaagaugaaggaugcaccaaucugucuggauuuuccuacauggaacucaaagugggauauauuucagccauaaaagugaacggauucaccuguacagguguggugacagaagcagaaaccuacacgaacuuuguugguuaugucaccaccacguuuaagagaaagcacuuucgcccuacgccagaugcgugcagagccgcguacaacuggaagauggcuggugaccccagguaugaagagucucugcacaauccguacccugauuaucacuggcuccgaacugucaagaccuccaaggagucccuugucaucauaucuccgagcguugcagauuuggacccguacgauaaaucccuucacucgagaguuuuuccuggcggaaaaugcucuggaauaaccguguccuccacuugcugcucuacuaaccacgacuacaccaucuggaugccugaaaauccuagacugggaacuucgugugacauuuucaccaauaguagagggaagagggcaucaaaagggggcaagacuuguggauuuguggaugaaagaggcuuguacaagucucuaaagggagcaugcaagcugaagcuaugugggguucuaggacuuagacuuauggacggaacaugggucgcaauucagacaucagaugagaucaaauggugcucuccugaucagcuaguaaaucuacacgacuuucacucagaugaaauugaacaucuuguuguggaggaguuggucaaaaagagggaagagugucuggacgcacuggagacuauuaugaccacaaaguccgugaguuucaggcgucuuagucauuugaggaagcuagucccuggguuuggaaaggcguauaccauauucaacaaaaccuugauggaggcugaugcucacuauaaaucaauccggacuuggaaugaaaucauccccucuaaaggguguuuaagaguuggggggagaugucauccucaugugaacgggguguucuucaacggcauuauacuggguccugacggacauguucuaaucccagagaugcaaucgucccuccuccaccagcauauggaauuguuggaguccucagucaucccuuugaugcaucccuuagcagacccgucaacaguuuuuaaagacggcgacgaggcagaggacuuuguugagguucaccuuccggaugugcacaagcagaucucggggguugaucuuggucucccaaacugggggaaguacgugcugguaagugcaggugcucugacugcauuaauguugaugauuuucuuaaugacguguugcagaaagacuaauagagcagagucaauacaacacaguccuggagagacagggaggaaagugucgguaacuucucacaacggaagggucauaucuucaugggaaucauauaaaaguggaggugagaccaagcuguga

SEQ ID NO: 63760 - RNA, 1575 nt, Artificial Sequence
  derived and/or modified CDS sequence (wt) from glycoprotein__RABV__KT221125.1
augauuccucaaguucuuuuguuuguuccccuucuaguuuucucgucguguuuugggaaauuccccauuuacacgauaccagacaaacuugguccauggagucccaucgauauacaucaucucagcuguccgaacaaucugguuguggaagaugaaggaugcaccaauuugucuggauuuuccuacauggaacucaaagugggauauauuucagccauaaaagugaacggauucaccuguacagguguggugaccgaagcagaaaccuacacuaacuuuguugguuaugucaccaccacguuuaagagaaagcacuuucgcccuaugccggaugcgugcagagccgcauacaacuggaagauggcuggugaccccagguaugaagagucucugcacaauccguaccccgacuaccacuggcuccgaacugucaagaccaccaaggagucccuugucaucauaucuccgagcguugcagauuuggacccguacgauaaaucccuucacucgagaguuuuuccuggcggaaaaugcucaggaauaaccguguccuccacuugcugcucuacuaaccacgacuacaccaucuggaugccugaaaauccuagacugggaacuucaugugacauuuucaccaauaguagagggaagagggcaucaaaagggggcaagacuuguggauuuguggaugaaagaggcuuguacaagucucuaaagggagcaugcaagcugaagcuaugugggguucuaggacuuagacuuauggacggaacaugggucgcgauucagacaucagaugagaucaaauggugcccuccugaucagcuaguaaaucuacacgacuuucacucggaugagauugaacaucuuguuguggaggaguuggucaaaaagagggaagagugucuggacgcacuggagacuauuaugaccacaaaguccgugaguuucagacgucuuagucauuugagaaagcuagucccuggguuuggaaaggcguauaccauauucaacaaaaccuugauggaggcugaugcccacuacaaaucaauccggacuuggaaugaaaucauccccuccaaaggguguuuaagaguuggggggagaugucauccucaugugaacgggguguucuucaacggcauuauacuggguccugacggacauguucuaaucccagagaugcagucgucccuccuccaccagcauauggaacuguuggaguccucagucaucccuuugaugcaucccuuagcagacccgucaacagucuuuaaagacggcgacgaggcagaggacuuuguugagguucaccuuccggaugugcacaagcagaucucggggguugaucuuggucucccaaacugggggaaguaugugcugauaagugcaggugcuuugacugcauuaauguugacgauuuucuuaaugacguguugcagaaagacuaauagagcagggucaauacaacacaguccuggagagacagggaggaaagugucggugacuucucacaacggaagggucauaucuucaugggaaucauauaaaagcggaagugagaccaagcuguga

SEQ ID NO: 63761 - RNA, 1575 nt, Artificial Sequence
  derived and/or modified CDS sequence (wt) from glycoprotein__RABV__KT221126.1
augauuccucaaguucuuuuguuuguuccccuucuaguuuucucgucguguuuugggaaauuccccauuuacacgauaccagacaaacuugguccauggagucccaucgauauacaucaucucagcuguccgaacaaucugguuguggaagaugaaggaugcaccaauuugucuggauuuuccuacauggaacucaaagugggauauauuucagccauaaaagugaacggauucaccuguacagguguggugaccgaagcagaaaccuacacuaacuuuguugguuaugucaccaccacguuuaagagaaagcacuuucgcccuaugccggaugcgugcagagccgcauacaacuggaagauggcuggugaccccagguaugaagagucucugcacaauccguaccccgacuaccacuggcuccgaacugucaagaccaccaaggagucccuugucaucauaucuccgagcguugcagauuuggacccguacgauaaaucccuucacucgagaguuuuuccuggcggaaaaugcucaggaauaaccguguccuccacuugcugcucuacuaaccacgacuacaccaucuggaugccugaaaauccuagacugggaacuucaugugacauuuucaccaauaguagagggaagagggcaucaaaagggggcaagacuuguggauuuguggaugaaagaggcuuguacaagucucuaaagggagcaugcaagcugaagcuaugugggguucuaggacuuagacuuauggacggaacaugggucgcgauucagacaucagaugagaucaaauggugcccuccugaucagcuaguaaaucuacacgacuuucacucggaugagauugaacaucuuguuguggaggaguuggucaaaaagagggaagagugucuggacgcacuggagacuauuaugaccacaaaguccgugaguuucagacgucuuagucauuugaggaagcuagucccuggguuuggaaaggcguauaccauauucaacaaaaccuugauggaggcugaugcccacuacaaaucaauccggacuuggaaugaaaucauccccuccaaaggguguuuaagaguuggggggagaugucauccucaugugaacgggguguucuucaacggcauuauacuggguccugacggacauguucuaaucccagagaugcagucgucccuccuccaccagcauauggaauuguuggaguccucagucaucccuuugaugcaucccuuagcagacccgucaacagucuuuaaagacggcgacgaggcagaggacuuuguugagguucaccuuccggaugugcacaagcagaucucggggguugaucuuggucucccaaacugggggaaguaugugcugauaagugcaggugcuuugacugcauuaauguugacgauuuucuuaaugacguguugcagaaagacuaauagagcagggucaauacaacacaguccuggagagacagggaggaaagugucggugacuucucacaacggaagggucauaucuucaugggaaucauauaaaagcggaagugagaccaagcuguga

SEQ ID NO: 63762 - RNA, 1575 nt, Artificial Sequence
  derived and/or modified CDS sequence (wt) from glycoprotein__RABV__KT221127.1
augguuccucaagcccuucuguuuguaccccuucuggccguuccauuguguuuugggaaauuccccauuuacacgauaccagacaaacucggucccuggagucccauugauauacaucaucucagcuguccgaauaauuugguuguggaggaugaaggauguaccaaucugucagguuuuucauacauggaacuuaaaguaggauacauuucagccauaaaggugaacggguucacuuguacggguguggugacggaagcagaaaccuacaccaacuuuguuggcuaugucaccaccacguuuaagagaaagcacuuucgaccaacaccggaugcgugcagauccgcauacaauuggaagauggcuggugaccccagauacgaagagucucugcacaaucccuauccugauuaucauuggcuccggacuguaaaaaccaccaaagaguccuuugucaucauaucuccaaguguggcagaucuagauccguacgauaaaucccuucauucgagaguuuuuccuagaggaaaaugcucaggaauaacggugucuucuaccuacugcucuacuaaccaugacuacaccaucuggaugccugaaaaucccagacuggggaccucuugugauauuuucaccaacagcagagggaagagagcauccaaagggagcaagaccuguggauuuguggaugagagaggcuuguacaaaucucuaaaaggagcaugcaaacugaagcugugugggguucuuggacuuagacuuauggauggaacaugggucgcgauucagacaucagacgagaccaaguggugcccuccugaccagcuagugaaucuacaugacuuucauucggaugagauugaacaucuuguuguggaggaguuggucaagaaaagggaagagugucuagaugcacuggaguccaucaugaccaccaaguccgugaguuuccgacgucucagucacuugaggaaacuugugccuggauucggaaaagcauacaccauauucaacaagaccuugauggaggcugaugcucacuacaaaucgguccggacuuggaacgagaucauccccucuaaaggguguuugagaguuggaggcagaugucauccccaugugaacgggguguuuuuuaaugguauuauccuaggcccugacggccaugucuugaucccggaaaugcagucaucucuccuucagcagcauauggaguuguuggaauccucggucauccccuuaaugcauccuuuggcagauccaucaacgguuuuuaaagauggugacgaggcggaggauuuuguugagguucaccuuccagaugugcauaagcaggucucaggggucgaucucggucucccaagcugggggaaguauguguugaugagcgcaggcauuuugacugcauugauguugaugauuuucuuaaugacguguugccgaaggaccaauagagcagaaucaauacaacacagucuuggagagacagggaggaaagucucgguaaccucccaaaacgggagggucauaucuucaugggagucauacaaaagcggaggugagaccaagcuguaa

SEQ ID NO: 63763 - RNA, 1575 nt, Artificial Sequence
  derived and/or modified CDS sequence (wt) from glycoprotein__RABV__KT221128.1
augauuccucaaguucuuuuguuuguuccccuucuaguuuucucgucguguuuugggaaauuccccauuuacacgauaccagacaaacuugguccauggagucccaucgauauacaucaucucagcuguccgaacaaucugguuguggaagaugaaggaugcaccaauuugucuggauuuuccuacauggaacucaaagugggauauauuucagccauaaaagugaacggauucaccuguacagguguggugaccgaagcagaaaccuacacuaacuuuguugguuaugucaccaccacguuuaagagaaagcacuuucgcccuaugccggaugcgugcagagccgcauacaacuggaagauggcuggugaccccagguaugaagagucucugcacaauccguaccccgacuaccacuggcuccgaacugucaagaccaccaaggagucccuugucaucauaucuccgagcguugcagauuuggacccguacgauaaaucccuucacucaagaguuuuuccuggcggaaaaugcucaggaauaaccguguccuccacuugcugcucuacuaaccacgacuacaccaucuggaugccugaaaauccuagacugggaacuucaugugacauuuucaccaauaguagagggaagagggcaucaaaagggggcaagacuuguggauuuguggaugaaagaggcuuguacaagucucuaaagggagcaugcaagcugaagcuaugugggguucuaggacuuagacuuauggacggaacaugggucgcgauucagacaucagaugagaucaaauggugcucuccugaucagcuaguaaaucuacacgacuuucacucggaugagauugaacaucuuguuguggaggaguuggucaaaaagagggaagagugucuggacgcacuggagacuauuaugaccacaaaguccgugaguuucagacgucuuagucauuugaggaagcuagucccuggguuuggaaaggcguauaccauauucaacaaaaccuugauggaggcugaugcucacuacaaaucaauccggacuuggaaugaaaucauccccuccaaaggguguuuaagaguuggggggagaugucauccucaugugaacgggguguucuucaacggcauuauacuggguccugacggacauguucuaaucccagagaugcagucgucccuccuccaccagcauauggaauuguuggaguccucagucaucccuuugaugcaucccuuagcagacccgucaacagucuuuaaagacggcgacgaggcagaggacuuuguugagguucaccuuccggaugugcacaagcagaucucggggguugaucuuggucucccaaacugggggaaguaugugcugauaagugcaggugcuuugacugcauuaauguugacgauuuucuuaaugacguguugcagaaagacuaauagagcagggucaauacaacacaguccuggagagacagggaggaaagugucggugacuucucacaacggaagggucauaucuucaugggaaucauauaaaagcggaagugagaccaagcuguga

SEQ ID NO: 63764 - RNA, 1575 nt, Artificial Sequence
  derived and/or modified CDS sequence (wt) from glycoprotein__RABV__KT221129.1
augauuccucaaguucuuuuguuuguuccccuucuaguuuucucgucguguuuugggaaauuccccauuuacacgauaccagacaaacuugguccauggagucccaucgauauacaucaucucagcuguccgaacaaucugguuguggaagaugaaggaugcaccaauuugucuggauuuuccuacauggaacucaaagugggauauauuucagccauaaaagugaacggauucaccuguacagguguggugaccgaagcagaaaccuacacuaacuuuguugguuaugucaccaccacguuuaagagaaagcacuuucgcccuaugccggaugcgugcagagccgcauacaacuggaagauggcuggugaccccagguaugaagagucucugcacaauccauaccccgacuaccacuggcuccgaacugucaagaccaccaaggagucccuugucaucauaucuccgagcguugcagauuuggacccguacgauaaaucccuucacucgagaguuuuuccuggcggaaaaugcucaggaauaaccguguccuccacuugcugcucuacuaaccacgacuacaccaucuggaugccugaaaauccuagacugggaacuucaugugacauuuucaccaauaguagagggaagagggcaucaaaagggggcaagacuuguggauuuguggaugaaagaggcuuguacaagucucuaaagggagcaugcaagcugaagcuaugugggguucuaggacuuagacuuauggacggaacaugggucgcgauucagacaucagaugagaucaaauggugcucuccugaucagcuaguaaaucuacacgacuuucacucggaugagauugaacaucuuguuguggaggaguuggucaaaaagagggaagagugucuggacgcacuggagacuauuaugaccacaaaguccgugaguuucagacgucuuagucauuugaggaagcuagucccuggguuuggaaaggcguauaccauauucaacaaaaccuugauggaggcugaugcucacuacaaaucaauccggacuuggaaugaaaucauccccuccaaaggguguuuaagaguuggggggagaugucauccucaugugaacgggguguucuucaacggcauuauacuggguccugacggacauguucuaaucccagagaugcagucgucccuccuccaccagcauauggaauuguuggaguccucagucaucccuuugaugcaucccuuagcagacccgucaacagucuuuaaagacggcgacgaggcagaagacuuuguugagguucaccuuccggaugugcacaagcagaucucggggguugaucuuggucucccaaacugggggaaguaugugcugauaagugcaggugcuuugacugcauuaauguugacgauuuucuuaaugacguguugcagaaagacuaauagagcagggucaauacaacacaguccuggagagacagggaggaaagugucggugacuucucacaacggaagggucauaucuucaugggaaucauauaaaagcggaagugagaccaagcuguga

SEQ ID NO: 63765 - RNA, 1575 nt, Artificial Sequence
  derived and/or modified CDS sequence (wt) from glycoprotein__RABV__KT221130.1
augguuccuccaguucuuuuguuuguuccccuucuauuuuucucgucauguuucgggaaauuccccauuuacccgauaccagacaaacuugguccauggagucccaucgauauacaucaucucaccuguccaaacaaucuuguuguggaaaaugaagggugcaccauucugucuggauuuuccuacauggaacucaaagugggauauauuucacccauaaaagugaacggauucaccuguacagguguggugacaaaagcaaaaaccuacacaaacuuuguugguuauguuaccaccacguuuaaaaaaaagcacuuucccccuaugccggaugcgugcaaagccgcauacaacuggaaaauggcuggugaccccagguaugaaaagucucugcacaauccguacccugacuaccacuggcuccaaacugucaagaccaccaaggagucccuugucaucauaucuccaagcguugcaaauuuggacccguacgauaaaucccuucacucaagaguuuuuccuggcggaaaaugcucaggaauaaccguguccuccacuugcugcucuacuaaccacgacuacaccaucuggaugccugaaaauccuaaacugggaacuucgugugacauuuucaccaauaguagagggaagagggcaucaaaagggggcaagacuuguggauuuguggaugaaagaggcuuguacaagucucuaaagggagcaugcaagcugaagcuaugugggguucuaggacuuagacuuauggacggaacauggguugcaauucagacaucagaugagaucaaauggugcucuccugaucagcuaguaaaucuacacgacuuucacucggaugagauugaacaucuuguuguggaggaguuggucaaaaagagggaagagugucuggacgcacuggagacuauuaugaccacaaaguccgugaguuucagacgucuuagucauuugaggaagcuagucccuggguuuggaaaggcauauaccauauucaacaaaaccuugauggaggcugaugcucacuauaaaucaauccggacuuggaaugaaaucauccccucuaaaggguguuuaagaguuggggggagaugucauccucaugugaacgggguguucuucaacggcauuauacuggguccugacggacauguucuaaucccagagaugcaaucgucccuccuccaucagcauauggaauuguuggaguccucagucaucccguugaugcaucccuuagcagacccgucaacagucuuuaaagacggcgacgaggcagaggacuuuguugagguucaccuuccggaugugcacaagcagaucucggggguugaucuuggucucccaaacugggggaaguaugugcugauaagugcaggugcucugacugcauuaauguugaugauuuucuuaaugacguguugcagaaaggcuaauagagcagagucaauacaacacaauccuggagagacagggaggaaagugucgguaacuucucacaacggaagggucauaucuucaugggaaucauauaaaagcggaggugagaccaaacuguga

SEQ ID NO: 63766 - RNA, 1575 nt, Artificial Sequence
  derived and/or modified CDS sequence (wt) from glycoprotein__RABV__KT221132.1
augauuccucaaguucuuuuguuuguucaccuucuaguuuucucgucguguuuugggaaauuccccauuuacacgauaccagacaaacuugguccauggagucccaucgauauacaucaucucagcuguccgaacaaucugguuguggaagaugaaggaugcaccaauuugucuggauuuuccuacauggaacucaaagugggauauauuucagccauaaaagugaacggauucaccuguacagguguggugaccgaagcagaaaccuacacuaacuuuguugguuaugucaccaccacguuuaagagaaagcacuuucgcccuaugccggaugcgugcagagccgcauacaacuggaagauggcuggugaccccagguaugaagagucucugcacaauccguaccccgacuaccacuggcuccgaacugucaagaccaccaaggagucccuugucaucauaucuccgagcguugcagauuuggacccguacgauaaaucccuucacucaagaguuuuuccuggcggaaaaugcucaggaauaaccguguccuccacuugcugcucuacuaaccacgacuacaccaucuggaugccugaaaauccuagacugggaacuucaugugacauuuucaccaauaguagagggaagagggcaucaaaagggggcaagacuuguggauuuguggaugaaagaggcuuguacaagucucuaaagggagcaugcaagcugaagcuaugugggguucuaggacuuagacuuauggacggaacaugggucgcgauucagacaucagaugagaucaaauggugcucuccugaucagcuaguaaaucuacacgacuuucacucggaugagauugaacaucuuguuguggaggaguuggucaaaaagagggaagagugucuggacgcacuggagacuauuaugaccacaaaguccgugaguuucagacgucuuagucauuugaggaagcuagucccuggguuuggaaaggcguauaccauauucaacaaaaccuugauggaggcugaugcucacuacaaaucaauccggacuuggaaugaaaucauccccuccaaaggguguuuaagaguuggggggagaugucauccucaugugaacgggguguucuucaacggcauuauacuggguccugacggacauguucuaaucccagagaugcagucgucccuccuccaccagcauauggaauuguuggaguccucagucaucccuuugaugcaucccuuagcagacccgucaacagucuuuaaagacggcgacgaggcagaggacuuuguugagguucaccuuccggaugugcacaagcagaucucggggguugaucuuggucucccaaacugggggaaguaugugcugauaagugcaggugcuuugacugcauuaauguugacgauuuucuuaaugacguguugcagaaagacuaauagagcagggucaauacaacacaguccuggagagacagggaggaaagugucggugacuucucacaacggaagggucauaucuucaugggaaucauauaaaagcggaagugagaccaagcuguga

SEQ ID NO: 63767 - RNA, 1575 nt, Artificial Sequence
  derived and/or modified CDS sequence (wt) from glycoprotein__RABV__KT221133.1
augauuccucaaguucuuuuguuuguuccccuucuaguuuucucgucguguuuugggaaauuccccauuuacacgauaccagacaaacuugguccauggagucccaucgauauacaucaucucagcuguccgaacaaucugguuguggaagaugaaggaugcaccaaucugucuggauuuuccuacauggaacucaaagugggauauauuucagccauaaaagugaacggauucaccuguacagguguggugacagaagcagaaaccuacacgaacuuuguugguuaugucaccaccacguuuaagagaaagcacuuucgcccuacgccagaugcgugcagagccgcguacaacuggaagauggcuggugaccccagguaugaggagucucugcacaauccguacccugauuaucacuggcuccgaacugucaagaccuccaaggagucccuugucaucauaucuccgagcguugcggauuuggacccguacgauaaaucccuucacucgagaguuuuuccuggcggaaaaugcucuggaauaaccguguccuccacuugcugcucuacuaaccacgacuacaccaucuggaugccugaaaauccuagacugggaacuucgugugacauuuucaccaauaguagagggaagagggcaucaaaagggggcaagacuuguggauuuguggaugaaagaggcuuguacaagucucuaaagggagcaugcaagcugaagcuaugugggguucuaggacuuagacuuauggacggaacaugggucgcaauucagacaucagaugagaucaaauggugcucuccugaucagcuaguaaauuuacacgacuuucacucagaugagauugaacaucuuguuguggaggaguuggucaaaaagagggaagagugucuggacgcacuggagacuauuaugaccacaaaguccgugaguuucaggcgucuuagucauuugaggaagcuagucccuggguuuggaaaggcguauaccauauucaacaaaaccuugauggaggcugaugcucacuauaaaucaauccggacuuggaaugaaaucauccccucuaaaggguguuuaagaguuggggggagaugucauccucaugugaacgggguguucuucaacggcauuauacuggguccugacggacauguucuaaucccagagaugcaaucgucccuccuccaccagcauauggaauuguuggaguccucagucaucccuuugaugcaucccuuagcagacccgucaacaguuuuuaaagacggcgacgaggcagaggacuuuguugagguucaccuuccggaugugcacaagcagaucucggggguugaucuuggucucccaaacugggggaaguacgugcugguaagugcaggugcucugacugcauuaauguugaugauuuucuuaaugacguguugcagaaagacuaauagagcagagucaauacaacacaguccuggagagacagggaggaaagugucgguaaccucucacaacggaagggucauaucuucaugggaaucauauaaaaguggaggugagaccaagcuguga

SEQ ID NO: 63768 - RNA, 1575 nt, Artificial Sequence
  derived and/or modified CDS sequence (wt) from glycoprotein__RABV__KT221134.1
augauuccucaaguucuuuuguuuguuccccuucuaguuuucucgucguguuuugggaaauuccccauuuacacgauaccagacaaacuugguccauggagucccaucgauauacaucaucucagcuguccgaacaaucugguuguggaagaugaaggaugcaccaaucuaucuggauuuuccuacauggaacucaaagugggauauauuucagccauaaaagugaacggauucaccuguacagguguggugacagaagcagaaaccuacacgaacuuuguugguuaugucaccaccacguuuaagagaaagcacuuucgcccuacgccagaugcgugcagagccgcguacaacuggaagauggcuggugaccccagguaugaagagucucugcacaauccguacccugauuaucacuggcuccgaacugucaagaccuccaaggagucccuugucaucauaucuccgagcguugcagauuuggacccguacgauaaaucccuucacucgagaguuuuuccuggcggaaaaugcucuggaauaaccguguccuccacuugcugcucuacuaaccacgacuacaccaucuggaugccugaaaauccuagacugggaacuucgugugacauuuucaccaauaguagagggaagagggcaucaaaagggggcaagacuuguggauuuguggaugaaagaggcuuguacaagucucuaaagggagcaugcaagcugaagcuaugugggguucuaggacuuagacuuauggacggaacaugggucgcaauucagacaucagaugagaucaaauggugcucuccugaucagcuaguaaaucuacacgacuuucacucagaugagauugaacaucuuguuguggaggaguuggucaaaaagagggaagagugucuggacgcacuggagacuauuaugaccacaaaguccgugaguuucaggcgucuuagucauuugaggaagcuagucccuggguuuggaaaggcguauaccauauucaacaaaaccuugauggaggcugaugcucacuauaaaucaauccggacuuggaaugaaaucauccccucuaaaggguguuuaagaguuggggggagaugucauccucaugugaacgggguguucuucaacggcauuauacuggguccugacggacauguucuaaucccagagaugcaaucgucccuccuccaccagcauauggaauuguuggaguccucagucaucccuuugaugcaucccuuagcagacccgucaacaguuuuuaaagacggcgacgaggcagaggacuuuguugagguucaccuuccggaugugcacaagcagaucucggggguugaucuuggucucccaaacugggggaaguacgugcugguaagugcaggugcucugacugcauuaauguugaugauuuucuuaaugacguguugcagaaagacuaauagagcagagucaauacaacacaguccuggagagacagggaggaaagugucgguaacuucucacaacggaagggucauaucuucaugggaaucauauaaaaguggaggugagaccaagcuguga

SEQ ID NO: 63769 - RNA, 1575 nt, Artificial Sequence
  derived and/or modified CDS sequence (wt) from glycoprotein__RABV__KT221136.1
augguuccucaagcccuucuguuuguaccccuucuggccauuccauuguguuuugggaaauuccccauuuacacgauaccagacaaacucggucccuggagucccauugauauacaucaccucagcuguccgaauaauuugguuguggaggaugaaggauguaccaaucugucaggauucucauacauggaacucaaaguaggauacauuucagccauaaaggugaacggguucacuuguacggguguggugacggaagcagaaaccuacacuaacuuuguuggcuaugucaccacuacguuuaagagaaagcacuuucgaccaacaccggaugcaugcagauccgcauacaauuggaagauggcuggugaccccagauacgaagagucccugcacaaucccuauccugauuaucauuggcuucggacuguaaaaaccaccaaagaguccuuuguuaucauaucuccaaguguggcagaucuagauccguacgauaaaucccuccauucgagaguuuuuccuagaggaaaaugcucaggaauaacggugucuucuaccuacugcucuaccaaccaugacuacaccaucuggaugccugaaaaucccagacuggggaccucuugugauauuuucaccaauaguagagggaagagagcauccaaagggagcaagaccuguggauuuguagaugagagaggcuuguacaaaucucuaaaaggagcaugcaaacugaagcugugugggguucuuggacuuagacuuauggauggaacaugggucgcgauucagacaucagacgagaccaaguggugcccuccugaccagcuagugaaucuacaugacuuucauucggaugagauugaacaucuuguuguggaggaguuggucaagaaaagggaagagugccuagaugcacuagaguccaucaugaccaccaaguccgugaguuuccgacgucucagucacuugaggaaacuugugccuggguucggaaaagcauacaccauauucaauaagaccuugauggaggcugaugcucacuacaagucgguccggacuuggaacgagaucauccccucuaaaggguguuugagaguuggaggcagaugucauccccaugugaacgggguguuuuuuaaugguauuauccuaggcccugacggccaugucuuaaucccggaaaugcagucaucucuccuucagcagcauauggaguuguuggaauccucggucaucccccuaaugcauccucuggcagauccaucaacgguuuuuaaagauggugacgaggcggaggauuuuguugagguucaccuuccagaugugcauaagcaggucucaggggucgaucucggucucccaagcugggggaaguauguguugaugagcgcaggcauuuugacugcacugaugcugaugaucuucuuaaugacguguugccgaaggacuaauagagcagagucaauacaacgcagucuuggagagacagggaggaaagugucgguaaccucccaaagcgggagggucauaucuucaugggagucauacaaaagcggaggugagaccaaguuguaa

SEQ ID NO: 63770 - RNA, 1575 nt, Artificial Sequence
  derived and/or modified CDS sequence (wt) from glycoprotein__RABV__KT221138.1
augauuccucaaguucuuuuguuuguuccccuucuaguuuucucgucguguuuugggaaauuccccauuuacacgauaccagacaaacuugguccauggagucccaucgauauacaucaucucagcuguccgaacaaucugguuguggaagaugaaggaugcaccaauuugucuggauuuuccuacauggaacucaaagugggauauauuucagccauaaaagugaacggauucaccuguacagguguggugaccgaagcagaaaccuacacuaacuuuguugguuaugucaccaccacguuuaagagaaagcacuuucgcccuaugccggaugcgugcagagccgcauacaacuggaagauggcuggugaccccagguaugaagagucucugcacaauccauaccccgacuaccacuggcuccgaacugucaagaccaccaaggagucccuugucaucauaucuccgagcguugcagauuuggacccguacgauaaaucccuucacucgagaguuuuuccuggcggaaaaugcucaggaauaaccguguccuccacuugcugcucuacuaaccacgacuacaccaucuggaugccugaaaauccuagacugggaacuucaugugacauuuucaccaauaguagagggaagagggcaucaaaagggggcaagacuuguggauuuguggaugaaagaggcuuguacaagucucuaaagggagcaugcaagcugaagcuaugugggguucuaggacuuagacuuauggacggaacaugggucgcgauucagacaucagaugagaucaaauggugcccuccugaucagcuaguaaaucuacacgacuuucacucggaugagauugaacaucuuguuguggaggaguuggucaaaaagagggaagagugucuggacgcacuggagacuauuaugaccacaaaguccgugaguuucagacgucuuagucauuugaggaagcuagucccuggguuuggaaaggcguauaccauauucaacaaaaccuugauggaggcugaugcccacuacaaaucaauccggacuuggaaugaaaucauccccuccaaaggguguuuaagaguuggggggagaugucauccucaugugaacgggguguucuucaacggcauuauacuggguccugacggacauguucuaaucccagagaugcagucgucccuccuccaccagcauauggaauuguuggaguccucagucaucccuuugaugcaucccuuagcagacccgucuacagucuuuaaagacggcgacgaggcagaggacuuuguugagguucaccuuccagaugugcacaagcagaucucggggguugaucuuggucucccaaacugggggaaguaugugcugauaagugcaggugcuuugacugcauuaauguugacgauuuucuuaaugacguguugcagaaagacuaauagagcagggucaauacaacacaguccuggagagacagggaggaaagugucggugacuucucacaacggaagggucauaucuucaugggaaucauauaaaagcggaagugagaccaagcuguga

SEQ ID NO: 63771 - RNA, 1575 nt, Artificial Sequence
  derived and/or modified CDS sequence (wt) from glycoprotein__RABV__KT221139.1
augauuccucaaguucuuuuguuuguuacccuucuaguuuucucgucguguuuugggaaauuccccauuuacacgauaccagacaaacuugguccauggagucccaucgauauacaucaucucagcuguccgaacaaucugguuguggaagaugaaggaugcaccaauuugucuggauuuuccuacauggaacucaaagugggauauauuucagccauaaaagugaacggauucaccuguacagguguggugaccgaagcagaaaccuacacuaacuuuguugguuaugucaccaccacguuuaagagaaagcacuuucgcccuaugccggaugcgugcagagccgcauacaacuggaagauggcuggugaccccagguaugaagagucucugcacaauccguaccccgacuaccacuggcuccgaacugucaagaccaccaaggagucccuugucaucauaucuccgagcguugcagauuuggacccguacgauaaaucccuucacucgagaguuuuuccuggcggaaaaugcucaggaauaaccguguccuccacuugcugcucuacuaaccacgacuacaccaucuggaugccugaaaauccuagacugggaacuucaugugacauuuucaccaauaguagagggaagagggcaucaaaagggggcaagacuuguggauuuguggaugaaagaggcuuguacaagucucuaaagggagcaugcaagcugaagcuaugugggguucuaggacuuagacuuauggacggaacaugggucgcgauucagacaucagaugagaucaaauggugcccuccugaucagcuaguaaaucuacacgacuuucacucggaugagauugaacaucuuguuguggaggaguuggucaaaaagagggaagagugucuggacgcacuggagacuauuaugaccacaaaauccgugaguuucagacgucuuagucauuugaggaagcuagucccuggguuuggaaaggcguauaccauauucaacaaaaccuugauggaggcugaugcccacuacaaaucaauccggacuuggaaugaaaucauccccuccaaaggguguuuaagaguuggggggagaugucauccucaugugaacgggguguucuucaacggcauuauacuggguccugacggacauguucuaaucccagagaugcagucgucccuccuccaccagcauauggaauuguuggaguccucagucaucccuuugaugcaucccuuagcagacccgucaacagucuuuaaagacggcgacgaggcagaggacuuuguugagguucaccuuccggaugugcacaagcagaucucggggguugaucuuggucucccaaacugggggaaguaugugcugauaagugcaggugcuuugacugcauuaauguugacgaucuucuuaaugacguguugcagaaagacuaauggagcagggucaauacaacacaguccuggagagacagggaggaaagugucggugacuucucacaacggaagggucauaucuucaugggaaucauauaaaagcggaagugagaccaagcuguga

SEQ ID NO: 63772 - RNA, 1575 nt, Artificial Sequence
  derived and/or modified CDS sequence (wt) from glycoprotein__RABV__KT221140.1
augauuccucaaguucuuuuguuuguuacccuucuaguuuucucgucguguuuugggaaauuccccauuuacacgauaccagacaaacuugguccauggagucccaucgauauacaucaucucagcuguccgaacaaucugguuguggaggaugaaggaugcaccaauuugucuggauuuuccuacauggaacucaaagugggauauauuucagccauaaaagugaacggauucaccuguacagguguggugaccgaagcagaaaccuacacuaacuuuguugguuaugucaccaccacguuuaagagaaagcacuuucgcccuaugccggaugcgugcagagccgcauacaacuggaagauggcuggugaccccagguaugaagagucucugcacaauccguaccccgacuaccacuggcuccgaacugucaagaccaccaaggagucccuugucaucauaucuccgagcguugcagauuuggacccguacgauaaaucccuucacucgagaguuuuuccuggcggaaaaugcucaggaauaaccguguccuccacuugcugcucuacuaaccacgacuacaccaucuggaugccugaaaauccuagacugggaacuucaugugacauuuucaccaauaguagagggaagagggcaucaaaagggggcaagacuuguggauuuguggaugaaagaggcuuguacaagucucuaaagggagcaugcaagcugaagcuaugugggguucuaggacuuagacuuauggacggaacaugggucgcgauucagacaucagaugagaucaaauggugcccuccugaucagcuaguaaaucuacacgacuuucacucggaugagauugaacaucuuguuguggaggaguuggucaaaaagagggaagagugucuggacgcacuggagacuauuaugaccacaaaguccgugaguuucagacgucuuagucauuugaggaagcuagucccuggguuuggaaaggcguauaccauauucaacaaaaccuugauggaggcugaugcccacuacaaaucaauccggacuuggaaugaaaucauccccuccaaaggguguuuaagaguuggggggagaugucauccucaugugaacgggguguucuucaacggcauuauacuggguccugacggacauguucuaaucccagagaugcagucgucccuccuccaccagcauauggaauuguuggaguccucagucaucccuuugaugcaucccuuagcagacccgucaacagucuuuaaagacggcgacgaggcagaggacuuuguugagguucaccuuccggaugugcacaagcagaucucggggguugaucuuggucucccaaacugggggaaguaugugcugauaagugcaggugcuuugacugcauuaauguugacgaucuucuuaaugacguguugcagaaagacuaauggagcagggucaauacaacacaguccuggagagacagggaggaaagugucggugacuucucacaacggaagggucauaucuucaugggaaucauauaaaagcggaagugagaccaagcuguga

SEQ ID NO: 63773 - RNA, 1575 nt, Artificial Sequence
  derived and/or modified CDS sequence (wt) from glycoprotein__RABV__KT276368.1
augauccuucaggcccuucuguuugugccucuccuaaucucuucguugugucucgggaaauuccccaucuacacaauaccagacaagcuugguccuuggagccccaucgauauacaucaccucagcuguccaaauaauuuaguuguggaggacgaagggugcaccaaucuaucaggauucucuuacauggaacuaaaggugggauacaucucugccauaaaggugaacggguucacuuguaccggugucgugacagaggcugaaaccuauaccaacuuuguugguuaugucaccaccacauucaagaggaaacauuuccgcccuauaccggaugcaugcagggcugcauacaacuggaagauggcuggugauccuagauaugaggagucucuucaaaauccuuauccugauuaccacuggcuacggaccguaaagaccacuaaggagucucuuaucaucauaucuccgaguguggcugauuuagacccauacgacaaaucccuucauucuaggguguucccuggugggaaauguuugggaauaacaguuucuuccaccuacugcucaaccaaccaugauuacaccauuuggaugcccgaggaaccaagacucgggacaucuugcgacauuuuuaccagcagcaaagggaaaaaggcaucuaaaggaggcaagacuugcggauuuguggaugaaaggggcuuguacaagucucuaaaaggagcauguaaacucaagcugugcggaguucucggacuuagacuuauggauggaaccuggguuucaauucaaacaucagacgauaccaaauggugcccuccagaucaauuggugaaucuacaugacuuucacucagacgaaauagagcaucucgucguggaggagcuggucaagaagagggaagaguguuuggacgcauuggaguccaucaugaccaccaaaucuguaaguuuuagacgucucagcuauuugagaaaacuugucccuggguuuggaaaggcauacacuauauucaacaagacuuugauggaggcugacgcccacuacaagucaguucggacuuggaacgagaucauccccucaaaaggguguuugaaagucagagagaggugucauccuccuguggacggaguguucuucaauggcauaauucuggguccggacgggaauguccugauaccagagaugcaaucgucucuacuucaacaacauauggagcuguuggagucuucuguaaucccccuaaugcaucccuuggcggacccgucaacagucuucaaggagggggaugaagcggaggauuuuguugaaguccaccucccagauguucacaaacagaucucagggguugaccuuggucucccgaguugggggaaauaucuucugaugauugcagguggucuggcgacacugguucugauaaucugcucgauggcaugcuguagaagaaccaagcaaacagagucaagaagacgaggcucuagagagucagagaaaaagguaacggcagccccccagacuaggaaagucguaucuucaugggaguuguacaagagugaaggcgaugccaggcuguga

SEQ ID NO: 63774 - RNA, 1575 nt, Artificial Sequence
  derived and/or modified CDS sequence (wt) from glycoprotein__RABV__KT336432.1
augguuccucaggcucuuuuguuuguaccccuuuugguuuuuccauuguguuucgggaaauucccuaucuacacgauaccagacaaacuuggacccuggagcccgauugacauacaucaucucagcugcccaaacaauuugguuguggaggaugaaggaugcaccaaccugucaggguucuccuacauggaacuuaaagucggauacaucucagccauaaaggugaacggguucacuugcacaggcguugugacagaggcugaaaccuacacuaacuuuguagguuaugucaccaccacguucaaaagaaagcauuuccgcccacuaccagaugcauguagagccgcauacaacuggaagauggccggugaccccagauaugaagagucucuacacaauccguacccugauuaccacuggcuucgaacuguaaaaaccaccaaggagucucucguuaucauauccccaaguguggcggauuuggacccauaugacaaaucccuucacucaagggucuucccuagugggaagugcucaggaauaacggugucuucuaccuucugcucaacuaaccaugauuacaccauuuggaugccugaaaauccgagacuggggacgucuugcgacauuuucgccaauaguagagggaagagagcaucuaaaggggguaagaccugcggcuuuguagaugaaagaggccuguauaagucucuaaagggagcaugcaaacucaaguuauguggaguucuuggacuuagacucauggauggaacaugggucgcaauacaaacaucagaugagaccaaaugguguccuccugaucaguuggugaauaugcacgacuuucgcucggaugaaauugagcaucuuguuguagaggaguuaguuaagaaaagagaggagugucuggaugcacuagaguccaucaugaccaccaagucagugaguuucagacgucucagucauuuaagaaaacuugucccuggguucggaaaagcauacaccauauucaacaagaccuugauggaggcugaugcucacuacaagucaguccggacuuggaaugagaucauccccucaaaaggauguuuaagaguuggagggaggugucauccccauguaaacgggguguuuuucaaugguauaauauuagggccugacggccauguucugauccccgagaugcaaucaucccuccuucagcaacauauggaguuguuggaauccucaguuauuccccugaugcacccucuggcagacccguccacaguuuucaaggauggugaugaggcggaggauuucguagagguucaccuuccugaugugcacaaacaagucucagggguugaccugggucucccgaacugggggaaauauguauuacugagugcaggaacccugauugccuugauguugauaacuuuucuaaugacauguuguagaagagucaaucgaccagagucuacgaaacgcagucucggagggacagggaggaaggugucggucacuucccaaagcgggaaggucauaucuucaugggagucuuauaaaagugggggugagacuagacuguaa

SEQ ID NO: 63775 - RNA, 1575 nt, Artificial Sequence
  derived and/or modified CDS sequence (wt) from glycoprotein__RABV__KT336433.1
augguuccucaggcucuucuguuuguaccccuuuugguuuuuucauuguguuucgggaaauucccuaucuacacgauaccagacaaacuuggacccuggagcccgauugacauacaucaucucagcugcccaaacaauuugguuguggaggacgaaggaugcaccaaccugucaggguucuccuacauggagcuuaaaguuggauacaucucagccauaaaggugaacggguucacuugcacaggcguugugacagaggcugaaaccuacacuaacuuuguagguuaugucaccaccacauucaaaagaaagcauuuccgcccaauaccagaugcauguagagccgcauacaacuggaaaauggccggugaccccagauaugaagagucucuacacaauccguacccugacuaccauuggcuucgaacuguaaaaaccaccaaggagucucucguuaucauauccccaaguguggcggauuuggacccauaugacaaaucccuucacucgagggucuucccuagcgggaagugcucaggaauaacggugucuucuaccuacugcucaacuaaccacgauuacacaauuuggaugccugagaauccgagacuagggacgucuugcgacauuuucgccaauaguagagggaagagagcuuccaaaggggguaagaccugcggcuuuguagaugaaagaggccuguauaagucucuaaagggagcaugcaaacucaaguuauguggaguucuuggacuuagacucauggauggaacaugggucgcgaugcaaacaucagaugagaccaaaugguguccuccugaucaguuggugaauaugcacgacuuucgcucggaugaaauugagcaucuuguuguagaggaguuggucaagaaaagagaggagugucuggaugcacuagaguccaucauaaccaccaaggcagugaguuucagacgucucagucauuuaagaaaacuugucccuggguuuggaaaagcauacaccauauucaacaagaccuugauggaggcugaugcucacuacaagucaguccggacuuggaaugagaucauccccucaaaaggguguuugagaguuggagggaggugucauccccauguaaacgggguguuuuucaaugguauaauauuagggcccgacggccgcguucuaauccccgagaugcaaucaucccuccuucagcaacauauggaguuauuggaauccucaguuauuccccugaugcacccccuggcagacccguccacaguuuuuaaggauggugaugaggcugaggauuuuguagagguucaccuuccugaugugcacaaacaggucucagggguugaccugggucucccgaacugggggaaauauguauuacugagcgcagggacccugauugccuugauguugacaauuuuucuaauaacauguuguagaagagucaaucgaccagaauuuacgcaacgcagucucggagggacagggaggaaggugucggucacuucccaaagcgggaaggucauaucuucaugggagucauauaaaagugggggugagacuagacuguaa

SEQ ID NO: 63776 - RNA, 1575 nt, Artificial Sequence
  derived and/or modified CDS sequence (wt) from glycoprotein__RABV__KT336434.1
augguuccucaggcucuuuuguuuguaccccuuuugguuuuuucauuguguuucgggaaauucccuaucuacacgauaccagacaaacuuggacccuggagcccgauugacauacaucaucucagcugcccaaacaauuugguuguggaggacgaaggaugcaccaacuugucaggauucucuuacauggaacuuaaaguuggauacaucucagccauaaaggugaacggguucacuugcacaggcguugugacagaggcugaaaccuacacuaacuuuguagguuaugucaccaccacguucaaaagaaagcauuuccgcccaauaccagaugcauguagagccgcauacaacuggaagauggccggugaccccagauaugaagagucucuacacaauccguacccugacuaccacuggcuucgaacuguaaaaaccaccaaggagucucucguuaucauauccccaaguguggcggauuuggacccauaugacaaaucccuucacucgagggucuucccuagcgggaagugcucaggaauaacggugucuucuaccuucugcucaacuaaccacgauuacaccauuuggaugccugaaaauccgagacuagggacgucuugcgacauuuucgccaauaguagagggaagagagcaucuaaaggggguaagaccugcggcuuuguagaugaaagaggccuguauaagucucuaaagggagcauguaaacucaaguuauguggaguucuuggacuuagacucauggauggaaccugggucgcgaugcaaacaucagaugagaccaaaugguguccuccugaccaguuggugaauaugcacgacuuucgcucggaugaaauugagcaucuuguuguagaggaauuaguuaagaaaagagaggagugucuggaugcacuagaguccaucaugaccaccaagucagugaguuucagacgucucagucauuuaaggaaacuugucccuggguucggaaaagcauacaccauauucaacaagaccuugauggaggcugaugcucacuacaagucaguccggacuuggaaugagaucauccccucaaaaggguguuuaagaguuggagggaggugucauccccauguaaacgggguguuuuucaaugguauaauauuagggccugacggccauguucugauccccgagaugcaaucaucccuccuucagcaacauauggaguuauuggaauccucaguuauuccccugaugcacccucuggcagacccguccacaguuuucaaggauggugaugaggcugaggauuuuguagagguucaccuuccugauguacacaaacaggucucagggguugaccugggucucccgaacuggggaaaauauguguuacugagugcagggacucugauugccuugauguugauaauuuuucuaaugacauguuguaggagagucaaucgaccagagucuacggaccgcagucucggagggacagggaggaaggugucggucacuucccaaagcgggaaggucauaucuucaugggagucauauaagagugggggugagacuagauuguaa

SEQ ID NO: 63777 - RNA, 1575 nt, Artificial Sequence
  derived and/or modified CDS sequence (wt) from glycoprotein__RABV__KT336435.1
augguuccucaggcucuuuuguuuuuaccccuuuugguuuuuccauuguguuucgggaaauucccuaucuacacgauaccagacaaacuuggacccuggagcccgauugacauacaucaucucagcugcccaaacaauuugguuguggaggaugaaggaugcaccaaccugucaggguucuccuacauggaacucaaaguuggauacaucucagccauaaaggugaacggguucacuugcacaggcguugugacugaggcugaaaccuacacuaacuuuguagguuaugucaccaccacguucaaaagaaagcauuuccgcccaauaccagaugcauguagagccgcauacaacuggaagauggccggugaccccagauaugaagagucucuacacaauccguacccugacuaccacuggcuucgaacuguaaaaaccaccaaggagucucucguuaucauauccccaaguguggcggauuuggacccauaugacaaaucccuucacucgagggucuucccuagcgggaagugcucaggaauaacggugucuucuaccuucugcucaacuaaccacgauuacaccauuuggaugccugaaaauccgagacuagggacgucuugcgacauuuucgccaauaguagagggaagagagcaucuaaaggggguaagaccugcggcuuuguagaugaaagaggccuguauaagucucuaaagggagcauguaaacucaaguuauguggaguucuuggacuuagacucauggauggaacauggguugcgaugcaaacaucagaugagaccaaaugguguccuccugaucaguugguaaauauacacgacuuucgcucggaugaaauugagcaucuuguuguagaggaguuaguuaagaaaagagaggagugucuggaugcacuagaguccaucaugaccaccaagucagugaguuucagacgucucagucacuuaagaaaacuugucccuggguucggaaaagcauacaccauauucaacaagaccuugauggaggcugaugcucacuacaagucaguccggacuuggaaugagaucauccccucaaaaggguguuuaagaguuggagggaggugucauccccauguaaacgggguguucuucaaugguauaauauuagggccugacggccauguucuaauccccgagaugcaaucaucccuccuucagcaacauauggaguuauuggaauccucaguuauuccccugaugcacccucuggcagacccguccacaguuuucaaggauggugaugaggcagaggauuuuguagagguucaccuuccugaugugcacaaacaggucucggggguugaccugggucucccgaacugggggaaauauguauuacugagugcagggacccugauugccuugauguuaauaauuuuccuaaugacauguuguagaagagucaaucgaccagagucuacggaacgcagucucggaaggacagggaggaaggugucggucacuucccaaagcggaaaggucauaucuucaugggagucauauaaaagugggggugagacuagauuguaa

SEQ ID NO: 63778 - RNA, 1575 nt, Artificial Sequence
  derived and/or modified CDS sequence (wt) from glycoprotein__RABV__KT336436.1
augguuccucaggcucuucuguuuguaccccuuuugguuuucccauuguguuucgggaaauucccuaucuacacgauaccagacaaacuuggacccuggagcccgauugacauacaucaucucagcuguccaaacaauuugguuguggaggacgaaggauguaccaaccugucaggguucuccuacauggaacuuaaagucggauacaucucagccauaaaggugaacggguucacuugcacaggcguugugacagaggcugaaaccuacacuaacuuuguagguuaugucaccaccacguucaaaagaaagcauuuccgcccaauaccagaugcauguagagccgcauacaacuggaagauggccggugaccccagauaugaagagucucuacacaauccguacccugacuaccacuggcuucgaacuguaaaaaccaccaaggagucucucguuaucauauccccaaguguggcggauuuggacccauaugacaaaucccuucauucaagggucuucccuagcgggaagugcucaggaauaacggugucuucuaccuucugcucaacuaaccaugauuacaccauuuggaugccugaaaauccgagacuggggacgucuugcgacauuuucgccaauaguagagggaagagagcaucuaaaggggguaagaccugcggcuuuguagaugaaagaggccuguauaagucucuaaagggagcaugcaaacucaaguuaugcggaguucuuggacuuagacucauggauggaacaugggucgcgaugcaaacaucagaugagaccaaaugguguccuccugaucaguuggugaacaugcacgacuuucgcucggaugaaauugagcaucuuguuguagaggaguuaguuaagaaaagagaggagugucuggaugcacuagaguccaucaugaccaccaagucagugaguuucagacgucucagucauuuaagaaaacuugucccuggguucggaaaagcauacaccauauucaacaagaccuugauggaggcugaugcucacuacaagucaguccggacuuggaaugagaucauccccucaaaaggguguuuaagaguuggagggaggugucauccccauguaaacgggguguuuuuuaaugguauaauauuagggccugacggccauguucugauccccgagaugcaaucaucccuccuucaacaacauauggaguuguuggaauccucaguuauuccccugaugcacccucuggcagacccguccacaguuuucaaggauggugaugaggcugaggauuuuguagagguucaccuuccugauguacacaaacaagucucagggguugaccugggucucccgaacugggggaaauauguauuacugagugcaggaacccugauugcccugauguugauaacuuuucuaaugacauguuguagaagagucaaucgaccagagucuacgaaacgccgucucggagggacagggaggaaggugucggucacuucccaaagcgggaaggucauaucuucaugggagucuuauaaaagugggggugagacuagacuguaa

SEQ ID NO: 63779 - RNA, 1575 nt, Artificial Sequence
  derived and/or modified CDS sequence (wt) from glycoprotein__RABV__KT336437.1
augguuccucaggcucuuuuguuuuuaccccuuuugguuuuuccauuguguuucgggaaauucccuaucuacacgauaccagacaaacuuggacccuggagcccgauugacauacaucaucucaacugcccaaacaauuugguuguggaggaugaaggaugcaccaaccugucagguuucuccuacauggaacucaaaguuggauacaucucagccauaaaggugaacggguucacuugcacaggcguugugacugaggcugaaaccuacacuaacuuuguagguuaugucaccaccacguucaaaagaaagcauuuccgcccaauaccagaugcauguagagccgcauacaacuggaagauggccggugaccccagauaugaagagucucuacacaauccguacccugacuaccacuggcuucgaacuguaaaaaccaccaaggagucucucguuaucauauccccaaguguggcggauuuggacccauaugacaaaucccuucacucgagggucuucccuagcgggaagugcucaggaauaacggugucuucuaccuucugcucaacuaaccacgauuacaccauuuggaugccugaaaauccgagacuagggacgucuugcgacauuuucgccaauaguagagggaagagagcaucuaaaggggguaagaccugcggcuuuguagaugaaagaggccuguauaagucucuaaagggagcaugcaaacucaaguuaugcggaguucuuggacuuagacucauggauggaacauggguugcgaugcaaacaucagaugagaccaaaugguguccuccugaucaguugguaaauauacacgacuuucgcucggaugaaauugagcaucuuguuguagaggaguuaguuaagaaaagagaggagugucuggaugcacuagaguccaucaugaccaccaagucagugaguuucagacgucucagucacuuaagaaaacuugucccuggguucggaaaagcauacaccauauucaacaagaccuugauggaggcugaugcucacuacaagucaguccggacuuggaaugagaucauccccucaaaaggguguuuaagaguuggagggaggugucauccccauguaaacgggguguucuucaaugguauaauauuagggccugacggccauauucuaauccccgagaugcaaucaucccuccuucagcaacauauggaguuauuggaauccucagucauuccccugaugcacccucuggcagacccguccacaguuuucaaggauggugaugaggcagaggauuuuguagagguucaccuuccugaugugcacaaacaggucucggggguugaccugggucucccgaacugggggaaauauguauuacugagugcagggacccugauugccuugauguuaauaauuuuccuaaugacauguuguagaagagucaaucgaccagagucuacggaacgcagucucggagggacagggaggaaggugucggucacuucccaaagcggaaaggucauaucuucgugggagucauauaaaagugggggugagacuagauuguaa

SEQ ID NO: 63780 - RNA, 1575 nt, Artificial Sequence
  derived and/or modified CDS sequence (wt) from glycoprotein__RABV__KU198460.1
augguuccucaggcucuuuuguuugugccccuucuggcuuuuccaauguguuucgggaaauuccccaucuacacaauaccagacaaacuuggucccuggagcccgauugacauacaucaucucagcuguccaaauaacuugguuguggaagacgaaggaugcaccaacuugucggguuucuccuacauggaacuuaaagugggauacauuucggccauaaaagugaacggguucacgugcacaggugugguuacagaggcugagacuuacacuaacuuugucgguuauguuaccaccacguucaagagaaagcauuuccgcccaacaccagaugcaugucgagcugcuuacaacuggaaaauggccggugaccccagauaugaagaaucucuucauaauccguacccugacuaccauuggcuucgaaccgugaaaaccacgaaggagucucucaucaucauauccccaaguguagcagaccuagacccauaugacaaaucccuucacucgagggucuuuccuagcgggaagugcuugggaauaacaauaucaucuaccuacugcucgacuaaccaugauuacaccaucuggaugcccgagaaucugagauuagggacaucuugugacaucuuuaccaauaguagagggaagagagcauccaaagggagcaagacuugcggauuuguugacgaaagaggcuuguauaagucuuugaagggggcaugcaagcucaaauuaugugggguucugggacuuagacuuauggacggaacgugggucgcgaugcaaacaucggaugagaccaagugguguucccccgaucaguugguaaaucuacacgacuuucgcucggacgagaucgaacaucuugucguggaggaguuggucaagaaaagagaggagugucuggaugcccuagaguccaucaugacuaccaagucggugaguuuuagacgucucagccacuugagaaaacuugucccuggguuuggaaaagcauacaccauauucaacaaaacccugauggaagcugaugcucacuacaagucagucaggacuuggagcgagaucauccccuccaaggggugucugagaguuggagggaggugucauccccauguaaacggaguguuuuuuaacggcauaauacugggcccugacggccauguucugaucccagagaugcaaucaucccuccuucagcaacauauggaguuguuggaaucaucaguuaucccucugaugcauccuuuagcagacccgucuacaguuuucaaggacggugaugaagcagaggauuuuguugagguucaccuucccgaugugcacaaacaaaucucagggguugaccugggucucccuaacuggggaagguaugucuuaauaauugcagggguauugauugccaugauauugacaaucuucuuaaugacauguuguggaagagguaaucgacccaaguccacacaacacagucuuggaggaauagggaggaaggugucagccacuucccaaagcgggaaggucauauccucgugggagucauauaaaagcgggggugagaccagacuguga

SEQ ID NO: 63781 - RNA, 1575 nt, Artificial Sequence
  derived and/or modified CDS sequence (wt) from glycoprotein__RABV__KU198461.1
augguuccucaggcucuuuuguuugugccccuucuggcuuuuccaauguguuucgggaaauuccccaucuacacaauaccagacaaacuuggucccuggagcccgauugacauacaucaucucagcuguccaaauaacuugguuguggaagacgaaggaugcaccaacuugucggguuucuccuacauggaacuuaaagugggauacauuucggccauaaaagugaacggguucacgugcacaggugugguuacagaggcugagacuuacacuaacuuugucgguuauguuaccaccacguucaagagaaagcauuuccgcccaacaccagaugcaugucgagcugcuuacaacuggaaaauggccggugaccccagauaugaagaaucucuucauaauccguacccugacuaccauuggcuucgaaccgugaagaccacgaaggagucucucaucaucauauccccaaguguagcagaccuagacccauaugacaaaucccuucacucgagggucuuuccuagcgggaagugcuugggaauaacaauaucaucuaccuacugcucgacuaaccaugauuacaccaucuggaugcccgagaaucugagauuagggacaucuugugacaucuuuaccaauaguagagggaagagagcauccaaagggagcaagacuugcggauuuguugacgaaagaggcuuguauaagucuuugaagggggcaugcaagcucaaauuaugugggguucugggacuuagacuuauggacggaacgugggucgcgaugcaaacaucggaugagaccaagugguguucccccgaucaguugguaaaucuacacgacuuucgcucggacgagaucgaacaucuugucguggaggaguuggucaagaaaagagaggagugucuggaugcccuagaguccaucaugacuaccaagucggugaguuuuagacgucucagccacuugagaaaacuugucccuggguuuggaaaagcauacaccauauucaacaaaacccugauggaagcugaugcucacuacaagucagucaggaccuggaacgagaucauccccuccaaggggugucugagaguuggagggaggugucauccccauguaaacggaguguuuuuuaacggcauaauacugggcccugacggccauguucugaucccagagaugcaaucaucccuccuucagcaacauauggaguuguuggaaucaucaguuaucccucugaugcauccuuuagcagacccgucuacaguuuucaaggacggugaugaagcagaggauuuuguugagguucaccuucccgaugugcacaaacaaaucucagggguugaccugggucucccuaacuggggaaaguaugucuuaauaauugcagggguauugauugccaugauauugacaaucuucuuaaugacauguuguggaagagguaaucgacccaaguccacacaacacagucuuggaggaauagggaggaaggugucagccacuucccaaagcgggaaggucauauccucgugggagucauauaaaagcgggggugagaccagacuguga

SEQ ID NO: 63782 - RNA, 1575 nt, Artificial Sequence
  derived and/or modified CDS sequence (wt) from glycoprotein__RABV__KU198462.1
auggucccucaagcucuuuuguuugugccccuucuggcuuuuccaauguguuucgggaaauuccccaucuacacaauaccagacaaacuuggucccuggaguccgauugauauacaucaucucagcuguccaaauaacuugguuguggaggacgaaggaugcacaaacuugucggguuucuccuacauggaacuuaaagugggauacauuucagccauaaaagugaacggguucacgugcacagguguggugacagaggcugagacuuacacuaacuuugucgguuauguuaccaccacguucaagagaaagcauuuccgcccaacaccagaugcgugucgagcugcuuacaacuggaaaauggccggugaccccagauaugaagaaucucuucauaauccguacccugacuaccauuggcuucgaaccgugaaaaccacgaaggagucucucaucaucauauccccaaguguagcagaccuagacccauaugacaaaucccuucacucgagggucuuuccuagcgggaagugcuugggaauaacaauaucaucuaccuacugcucgacuaaccaugauuacaccaucuggaugcccgagaaucugagauuagggacaucuugugacaucuuuaccaauaguagagggaagagagcauccaaagggagcaagacuugcggauuuguugacgaaagaggcuuguauaagucuuugaagggggcaugcaagcuuaaauuaugugggguucugggacuuagacuuauggacggaacaugggucgcgaugcaaacaucggaugagaccaaguggugucccccugaucaguugguaaaucuacacgacuuucgcucggacgagaucgaacaucuugucguggaggaguuggucaagaaaagagaggagugucuggaugcccuagaguccaucaugacuaccaagucggugaguuuuagacgucucagccacuugagaaaacuugucccuggguucggaaaagcauacaccauauucaacaaaacccugauggaagcugaugcucacuacaagucaguucggaccuggaaugagaucauccccuccaaggggugucugagaguuggagggaggugucauccccauguaaacggaguguuuuuuaacggcauaauauuaggcccugacggccauguucugaucccagagaugcaaucaucccuccuucagcaacauauggaguuguuggaaucgucaguuaucccucugaugcauccuuuagcagacccgucuacaguuuucaaggacggugaugaagcagaggauuuuguugagguucaccuucccgaugugcacaaacaaaucucagggguugaccugggucucccuaacuggggaaaguaugucuuaauaauugcagggguauugauugccaugauauugacaaucuucuuaaugacauguuguggaagagguaaucgacccaaguccacacaacacaguccuggagggauagggaggaaggugucagccacuucccaaagcgggaaggucauaucuucgugggagucauauaaaagcgggggugagacuagacuguga

SEQ ID NO: 63783 - RNA, 1575 nt, Artificial Sequence
  derived and/or modified CDS sequence (wt) from glycoprotein__RABV__KU198463.1
auggucccucaagcucuuuuguuugugccccuucuggcuuuuccaauguguuucgggaaauuccccaucuacacaauaccagacaaacuuggucccuggaguccgauugacauacaucaucucagcuguccaaauaacuugguuguggaggacgaaggaugcacaaacuugucggguuucuccuacauggaacuuaaagugggauacauuucggccauaaaagugaacggguucacgugcacagguguggugacagaggcugagacuuacacuaacuuugucgguuauguuaccaccacguucaagagaaagcauuuccgcccaacaccagaugcgugucgagcugcuuacaacuggaaaauggccggugaccccagauaugaagaaucucuucauaauccguacccugacuaccauuggcuucgaaccgugaaaaccacgaaggagucucucaucaucauauccccaaguguagcagaccuagacccauaugacaaaucccuucacucgagggucuuuccuagcgggaagugcuugggaauaacaauaucaucuaccuacugcucgacuaaccaugauuacaccaucuggaugcccgagaaucugagauuagggacaucuugugacaucuuuaccaauaguagagggaagagagcauccaaagggagcaagacuugcggauuuguugacgaaagaggcuuguauaagucuuugaagggggcaugcaagcuuaaauuaugugggguucugggacuuagacuuauagacggaacaugggucgcgaugcaaacaucggaugagaccaaguggugucccccugaucaguugguaaaucuacacgacuuucgcucggacgagaucgaacaucuugucguggaggaguuggucaagaaaagagaggagugucuggaugcccuagaguccaucaugacuaccaagucggugaguuuuagacgucucagccacuugagaaaacuugucccuggguucggaaaagcauacaccauauucaacaaaacccugauggaagcugaugcucacuacaagucaguccggaccuggaaugagaucauccccuccaaggggugucugagaguuggagggaggugucauccccauguaaacggaguguuuuuuaacggcauaauauuaggcccugacggccauguucugaucccagagaugcaaucaucccuccuucagcaacauauggaguuguuggaaucgucaguuaucccucugaugcauccuuuagcagacccgucuacaguuuucaaggacggugaugaagcagaggauuuuguugagguucaccuucccgaugugcacaaacaaaucucagggguugaccugggucucccuaacuggggaaaguaugucuuaauaauugcagggguauugauugccaugauauugacaaucuucuuaaugacauguuguggaagagguaaucgacccaaguccacacaacacagucuuggagggauagggaggaaggugucagccacuucccaaagcgggaaggucauaucuucgugggagucauauaaaagcgggggugagacuagacuguga

SEQ ID NO: 63784 - RNA, 1575 nt, Artificial Sequence
  derived and/or modified CDS sequence (wt) from glycoprotein__RABV__KU198464.1
augguuccucaagcucuuuuguuugugccccuucuggcuuuuccaauguguuucgggaaauuccccaucuacacaauaccagacaaacuuggucccuggagcccgauugacauacaucaucucagcuguccaaauaacuugguuguggaagacgaaggaugcaccaacuugucggguuucuccuacauggaacuuaaagugggauacauuucggccauaaaagugaacggguucacgugcacaggugugguuacagaggcugagacuuacacuaacuuugucgguuauguuaccaccacguucaagagaaagcauuuccgcccaacaccagaugcaugucgagcugcuuacaacuggaaaauggccggugaccccagauaugaagaaucucuucauaauccguacccugacuaccauuggcuucgaaccgugaaaaccacgaaggagucucucaucaucauauccccaaguguagcagaccuagacccauaugacaaaucccuucacucgagggucuuuccuagcgggaagugcuugggaauaacaauaucaucuaccuacugcucgacuaaccaugauuacaccaucuggaugcccgagaaucugagauuagggacaucuugugacaucuuuaccaauaguagagggaagagagcauccaaagggagcaagacuugcggauuuguugacgaaagaggcuuguauaagucuuugaagggggcaugcaagcucaaauuaugugggguucugggacuuagacuuauggacggaacgugggucgcgaugcaaacaucggaugagaccaaguggugucccccugaucaguugguaaaucuacacgacuuucgcucggacgagaucgaacaucuugucguggaggaguuggucaagaaaagagaggagugucuggaugcccuagaguccaucaugacuaccaagucggugaguuuuagacgucucagccacuugagaaaacuugucccuggguuuggaaaagcauacaccauauucaacaaaacccugauggaagcugaugcucacuacaagucagucaggacuuggagcgagaucauccccuccaaggggugucugagaguuggagggaggugucauccccauguaaacggaguguuuuuuaacggcauaauacugggcccugacggccauguucugaucccagagaugcaaucaucccuccuucagcaacauauggaguuguuggaaucaucaguuaucccucugaugcauccuuuagcagacccgucuacaguuuucaaggacggugaugaagcagaggauuuuguugagguucaccuucccgaugugcacaaacaaaucucagggguugaccugggucucccuaacuggggaaaguaugucuuaauaauugcagggguauugauugccaugauauugacaaucuucuuaaugacauguuguggaagauguaaucgacccaaguccacacaacacagucuuggaggaauagggaggaaggugucagccacuucccaaagcgggaaggucauauccucgugggagucauauaaaagcgggggugagaccagacuguga

SEQ ID NO: 63785 - RNA, 1575 nt, Artificial Sequence
  derived and/or modified CDS sequence (wt) from glycoprotein__RABV__KU198465.1
augguuccucaggcucuuuugcuugugccccuucuggcuuuuccaauguguuucgggaaauuccccaucuacacaauaccagacaaacuuggccccuggagcccgauugacauacaucaucucagcuguccaaauaacuugguuguggaagacgaaggaugcaccaacuugucugguuucuccuacauggaacuuaaagugggguacauuucagccauaaaagugaacggguucacgugcacagguguggugacagaggcugagacuuacacuaacuuugucgguuauguuaccacuacguucaagagaaagcauuuccgcccaacaccagaugcaugucgagcugcuuacaacuggaaaauggccggugaccccagauaugaagaaucucuucauaauccguacccugacuaccauuggcuucgaacuguaaaaaccacgaaggagucccucaucaucauauccccaaguguagcggaccuagacccauaugacaaaucccuucacucgagggucuuuccuagugggaagugcuugggaauaacaauaucaucuaccuacugcucgacuaaccaugauuacaccaucuggaugcccgagaaucugagauuagggacaucuugugacaucuuuaccaauaguagagggaagagagcauccaaagggagcaagacuugcggauuuguugacgaaagaggcuuguauaagucuuugaagggggcaugcaagcucaaauuaugugggguucugggacuuagacuuauggacggaacaugggucgcgaugcaaacaucggaugagaccaaguggugucccccugaucaguugguaaaucuacacgacuuucgcucggacgagaucgaacaucuugucguagaggaguuggucaagaaaagagaggagugucuggaugcccuggaguccaucaugacuaccaagucugugaguuuuagacgucucagccacuugagaaaacuugucccuggguucggaaaagcauacaccauauucaacaaaacccugauggaagcugaugcucacuacaagucaguccggacuuggagcgagaucauccccucaaagggguguuugagaguuggagggaggugucauccucauguaaacggaguguuuuuuaacggcauaauacugggcccugacggccauguucugaucccagagaugcaaucaucccuccuucagcagcauauggaguuguuggaaucaucaguuaucccucugaugcauccuuuagcagauccgucuacagucuucaaggacggugaugaagcagaggacuuuguugagguucaccuucccgaugugcacaaacaaaucucagggguugaccugggucucccuaacuggggaaaguaugucuuaauaauugcagggguccugauugccaugauauugacaaucuucuugaugacauguuguggaagagguaaucgacccaaguccacacaacacagucuuggggggauaggaaggaaggugucagccacuucccaaagcgggaaggucauaucuucgugggagucauauaaaagcggaagugagacuagacuguga

SEQ ID NO: 63786 - RNA, 1575 nt, Artificial Sequence
  derived and/or modified CDS sequence (wt) from glycoprotein__RABV__KU198466.1
augguuccucaagcucuuuuguuugugccccuucuggcuuuuccaauguguuucgggaaauuccccaucuacacaauaccagacaaacuuggucccuggagcccgauugacauacaucaucucagcuguccaaauaacuugguuguggaagacgaaggaugcaccaacuugucggguuucuccuacauggaacuuaaggugggauacauuucggccauaaaagugaacggguucacgugcacagguguggugacagaggcugagacuuacacuaacuuugucgguuauguuaccaccacguuuaagagaaagcauuuccgcccaacaccagaugcauguagagcugcuuacaacuggaaaauggccggugaucccagauaugaagaaucucuucauaauccguacccugacuaccauuggcuucgaaccgugaaaaccacgaaggagucucucaucaucauauccccaaguguagcagaccuagacccauaugacaaaucccuucacucgagggucuuuccuagugggaagugcuugggaauaacaauaucaucuaccuacugcucgacuaaccaugauuacaccaucuggaugcccgagaaugugagauuagggacaucuugugacaucuuuaccaacaguagagggaagagagcauccaaagggagcaagaccuguggauuuguugacgaaagaggcuuguauaagucuuugaagggggcaugcaagcucaaauuauguggaguucugggacuuagacuuauggacggaacgugggucgcgaugccaacaucggaugagaccaaguggugucccccugaucaguugguaaaucuacacgacuuucgcucggacgagaucgaacaucuugucguggaggaguuggucaggaaaagagaggagugucuggaugcccuagaguccaucaugacuaccaagucggugaguuuuagacgucuaagccacuugagaaaacuugucccuggauucggaaaagcauacaccauauucaacaaaacccugauggaagccgaugcucacuacaagucaguccggacuuggagcgagaucauccccuccaaggggugucugagaguuggagggaggugucauccccauguaaacggaguguuuuuuaacggcauaauacugggcccugacggccauguucuaaucccagagaugcaaucaucccuccuucagcaacauauggaguuguuggaaucaucaguuaucccucugaugcauccuuuagcagacccgucuacaguuuucaaggacggugaugaagcagaggacuuuguugagguucaccuucccgaugugcacaaacagaucucagggguugaccugggucucccuaacuggggaaaguaugucuuaauaauugcagggguauugauugccaugauauugacaaucuucuuaaugacauguuguggaagagguaaucgacccaaguccacacaacacagucuuggagggauagggaggaaggugucauccacuucccaaagcgggaaggucauaucuucgugggagucauauaaaagcgggggugagaccagacuguga

SEQ ID NO: 63787 - RNA, 1575 nt, Artificial Sequence
  derived and/or modified CDS sequence (wt) from glycoprotein__RABV__KU198467.1
augguuccucaagcucuuuuguuugugccccuucuggcuuuuccaauguguuucgggaaauuccccaucuacacaauaccagacaaacuuggucccuggagcccgauugacauacaucaucucagcuguccaaauaacuugguuguggaagacgaaggaugcaccaacuugucggguuucuccuacauggaacuuaaggugggauacauuucggccauaaaagugaacggguucacgugcacagguguggugacagaggcugagaccuacacuaacuuugucgguuauguuaccaccacguuuaagagaaagcauuuccgcccaacaccagaugcauguagagcugcuuacaacuggaaaauggccggugaucccagauaugaagaaucucuucauaauccguacccugacuaccauuggcuucgaaccgugaaaaccacgaaggagucucucaucaucauauccccaaguguagcagaccuagacccauaugacaaaucccuucacucgagggucuuuccuagcgggaagugcuugggaauaacaauaucaucuaccuacugcucgacuaaccaugauuacaccaucuggaugcccgagaaugugagauuagggacaucuugugacaucuuuaccaacaguagagggaagagagcauccaaagggagcaagacuuguggauuuguugacgaaagaggcuuguauaagucuuugaagggggcaugcaagcucaaauuauguggaguucugggacuuagacuuauggacggaacgugggucgcgaugccaacaucggaugagaccaaguggugucccccugaucaguugguaaaucuacacgacuuucgcucggacgagaucgaacaucuugucguggaggaguuggucaggaaaagagaggagugucuggaugcccuagaguccaucaugacuaccaagucggugaguuuuagacgucuaagccacuugagaaaacuugucccuggauucggaaaagcauacaccauauucaacaaaacccugauggaagccgaugcucacuacaagucaguccggacuuggagcgagaucauccccuccaaggggugucugagaguuggagggaggugucauccccauguaaacggaguguuuuuuaacggcauaauacugggcccugacggccauguucuaaucccagagaugcaaucaucccuccuucagcaacauauggaguuguuggaaucaucaguuaucccucugaugcauccuuuagcagacccgucuacaguuuucaaggacggugaugaagcagaggauuuuguugagguucaccuucccgaugugcacaaacagaucucagggguugaccugggucucccuaacuggggaaaguaugucuuaauaauugcagggguauugauugccaugauauugacaaucuucuuaaugacauguuguggaagagguaaucgacccaaguccacacaacacagucuuggagggauagggaggaaggugucauccacuucccaaagcgggaaggucauaucuucgugggagucauauaaaagcgggggugagaccagacuguga

SEQ ID NO: 63788 - RNA, 1575 nt, Artificial Sequence
  derived and/or modified CDS sequence (wt) from glycoprotein__RABV__KU198468.1
auggucccucaggcucuuuuguuugugccccuucuggcuuuuccaauguguuucgggaaauuccccaucuacacaauaccagacaaacuuggucccuggagcccgauugacauacaucaucucagcugcccaaauaacuugauuguggaagacgaaggaugcaccaacuugucugguuucuccuacauggaacuuaaagugggauacauuucagccauaaaagugaacggguucacgugcacaggcguggugacagaggcugagacuuacacuaacuuugucgguuaugucaccacuacguucaagagaaagcauuuccgcccaacaccagaugcaugucgugcugcuuacaacuggaaaauggccggcgaccccagauaugaagaaucucuucauaauccguacccugacuaccauuggcuucgaaccguaaaaaccacgaaggagucccucaucaucauauccccuaguguagcggaccuagacccauaugacaaaucccuucauucgagggucuuuccuagcgggaagugcuugggaauaacaauaucaucuaccuacugcucgacuaaccaugauuacaccaucuggaugcccgagaaucugagauuagggacaucuugugacaucuuuaccaauaguagagggaagagagcauccaaagggagcaagaccugcggauuuguugacgaaaggggcuuguauaagucuuugaagggggcaugcaagcucaaauuaugugggguucugggacuuagacuuauggacggaacaugggucgcgaugcaaacaucggaugagaccaaguggugucccccuaaucaguuggugaaucuacacgacuuucgcucggacgaaaucgaacaucuugucguggaggaguuggucaagaaaagagaggaguguuuggaugcccuagaguccaucaugacuaccaagucugugaguuuuagacgucucagccacuugagaaaacuugucccuggguucggaaaagcauacaccauauucaacaaaacccugauggaagcugaugcucacuacaagucaguccggaccuggaaugagaucauccccucaaaggggugucugagaguuggagggaggugucauccccauguaaacggaguguuuuuuaacggcauaauacugggcccugacggccauguucugaucccagagaugcaaucaucccuccuucagcagcauauggaguuguuggaaucaucaguuaucccucugaugcauccuuuagcagacccgucuacagucuucaaggacggugaugaagcagaggauuuuguugagguucaccuucccgaugugcacaaacaaaucucagggguugaccugggucucccuaacuggggaaaguaugucuuaauaauugcagggguccugauugccaugauauugacaaucuucuugaugacauguuguggaagagguaaucgacccaaguccacacaacacagucuuggagggauaggaaggaaggugucagccacuucccaaagcgggaaggucauaucuucgugggagucauauaaaagcgggggugagaccagacuguga

SEQ ID NO: 63789 - RNA, 1575 nt, Artificial Sequence
  derived and/or modified CDS sequence (wt) from glycoprotein__RABV__KU198469.1
augguuccucaggcucuuuuguuugugccccuucuggcuuuuccaauguguuucgggaaauuccccaucuacacgauaccagacaaacuuggucccuggagcccgauugacauacaucaucucagcugcccaaauaacuugguuguggaagacgaaggaugcaccaacuugucugguuucuccuacauggaacuuaaagugggauacauuucagccauaaaagugaacggguucacgugcacagguguagugacagaggcugagacuuacaccaacuuuguugguuaugucaccacuacguucaagagaaagcauuuccgcccaacaccagaugcaugucgugcugcuuacaacuggaaaauggccggugaccccagauaugaagaaucucuucauaauccguacccugacuaccauuggcuuagaaccguaaaaaccacgaaggagucccucaucauuauauccccuaguguagcggaccuagacccauaugacaaaucccuucauucgagggucuuuccuagcgggaagugcuugggaauaacaauaucaucuaccuacugcucgacuaaccaugauuacaccaucuggaugcccgagaaucugagauuagggacaucuugugacaucuuuaccaauaguagagggaagagagcauccaaagggagcaagacuugcggauuuguugacgaaaggggcuuguauaagucuuugaagggggcgugcaagcucaaauuaugugggguucugggacuuagacuuauggacggaacgugggucgcgaugcaaacaucggaugagaccaaguggugucccccugaccaguuggugaaucuacacgacuuucgcucggacgaaaucgagcaucuugucguggaggaguuggucaagaaaagagaggaguguuuggaugcccuagaguccaucaugacuaccaagucggugaguuuuagacgucucagccacuugagaaaacuugucccuggguucggaaaagcauacaccauauucaacaaaacccugauggaagcugaugcucacuacaagucaguccggaccuggaaugagaucauccccucaaagggguguuugagaguuggagggaggugucauccccauguuaacggaguguuuuuuaacggcauaauacugggcccugacggccauguucugaucccagagaugcaaucaucccuccuucagcagcauauggaguuguuggaaucaucaguuaucccucugaugcauccuuuggcagacccaucuacagucuucaaggacggugaugaagcagaggauuuuguugagguucaccuucccgaugugcacaaacaaaucucagggguugaccugggucucccuaacuggggaaaguaugucuuaauaauugcagggguccugauugccaugauauugacaaccuucuugaugacauguuguggaagagguaaucgacccaaguccacacaacacagucuuggagggauaggaaggaaggugucagccacuucccaaagcgggaaggucauaucuucgugggagucauauaaaagcgggggugagaccagacuguga

SEQ ID NO: 63790 - RNA, 1575 nt, Artificial Sequence
  derived and/or modified CDS sequence (wt) from glycoprotein__RABV__KU198470.1
augguuccucaagcucuuuuguuugugccccuucuggcuuuuccaauguguuucgggaaauuccccaucuacacaauaccagacaaacuuggucccuggagcccgauugacauacaucaucucagcuguccaaauaacuugguuguggaagacgaaggaugcaccaacuugucggguuucuccuacauggaacuuaaggugggauacauuucggccauaaaagugaacggguucacgugcacagguguggugacagaggcugagaccuacacuaacuuugucgguuauguuaccaccacguuuaagagaaagcauuuccgcccaacaccagaugcauguagagcugcuuacaacuggaaaauggccggugaucccagauaugaagaaucucuucauaauccguacccugacuaccauuggcuucgaaccgugaaaaccacgaaggagucucucaucaucauauccccaaguguagcagaccuagacccauaugacaaaucccuucacucgagggucuuuccuagcgggaagugcuugggaauaacaauaucaucuaccuacugcucgacuaaccaugauuacaccaucuggaugcccgagaaugugagauuagggacaucuugugacaucuuuaccaacaguagagggaagagagcauccaaagggagcaagacuuguggauucguugaugaaagaggcuuguauaagucuuugaagggggcaugcaagcucaaauuauguggaguucugggacuuagacuuauggacggaacgugggucgcgaugccaacaucggaugagaccaaguggugucccccugaucaguugguaaaucuacacgacuuucgcucggacgagaucgaacaucuugucguggaggaguuggucaggaaaagagaggagugucuggaugcccuagaguccaucaugacuaccaagucggugaguuuuagacgucuaagccacuugagaaaacuugucccuggauucggaaaagcauacaccauauucaacaaaacccugauggaagccgaugcucacuacaagucaguccggaccuggaaugagaucauccccuccaaggggugucugagaguuggagggaggugucauccccauguaaacggaguguuuuuuaacggcauaauacugggcccugacggccauguucuaaucccagagaugcaaucaucccuccuucagcaacauauggaguuguuggaaucaucaguuaucccucugaugcauccuuuagcagacccgucuacaguuuucaaggacggugaugaagcagaggauuuuguugagguucaccuucccgaugugcacaaacagaucucagggguugaccugggucucccuaacuggggaaaguaugucuuaauaauugcagggguauugauugccaugauauugacaaucuucuuaaugacauguuguggaagagguaaucgacccaaguccacacaacacagucuuggagggauagggaggaaggugucauccacuucccaaagcgggaaggucauaucuucgugggagucauauaaaagcgggggugagaccagacuguga

SEQ ID NO: 63791 - RNA, 1575 nt, Artificial Sequence
  derived and/or modified CDS sequence (wt) from glycoprotein__RABV__KU198471.1
auggucccucaagcucuuuuguuugugccccuucuggcuuuuccaauguguuucgggaaauuccccaucuacacaauaccagacaaacuuggucccuggaguccgauugacauacaucaucucagcuguccaaauaacuugguuguggaggacgaaggaugcacaaacuugucggguuucuccuacauggaacuuaaagugggauacauuucggccauaaaagugaacggguucacgugcacagguguggugacagaggcugagacuuacacuaauuuugucgguuauguuaccaccacguucaggagaaagcauuuccgcccaacaccagaugcgugucgagcugcuuacaacuggaaaauagccggugaccccagauaugaagaaucucuucauaauccguacccugacuaccauuggcuucgaaccgugaaaacaacgaaggagucucucaucaucauauccccaaguguagcagaccuagacccauaugacaaaucccuucacucgagggucuuuccuagcgggaagugcuugggaauaacaauaucaucuaccuacugcucgacuaaccaugauuacaccaucuggaugcccgagaaucugagauuagggacaucuugugacaucuuuaccaauaguagagggaagagagcauccaaagggagcaggacuugcggauuuguugacgaaagaggcuuguauaagucuuugaagggggcaugcaagcuuaaauuaugugggguucugggacuuagacuuauggacggaacaugggucgcgaugcaaacaucggaugagaccaaguggugucccccugaucaguugguaaaucugcacgacuuucgcucagacgagaucgaacaucuugucguggaggaguuggucaagaaaagagaggagugucuggaugcccuagaguccaucaugacuaccaagucggugaguuuuagacgucucagccacuugagaaaacuugucccuggguucggaaaagcauacaccauauucaacaaaacccugauggaagcugaugcucacuacaagucaguccggaccuggaaugagauuauccccuccaaggggugucugagaguuggagggaggugucauccccaugucaacggaguguuuuuuaacggcauaauauuaggcccugacggccauguucugaucccagagaugcaaucaucccuccuucagcaacauauggaguuguuggaaucgucaguuaucccucugaugcauccuuuggcagacccgucuacaguuuucaaggacggugaugaagcagaggauuuuguugagguucaccuucccgaugugcacaaacaaaucucagggguugaccugggucucccuaacuggggaaaguaugucuuaauaauugcagggguauugauugccaugauauugacaaucuucuuaaugacauguuguggaagagguaaucgacccaaguccacacaacacagucuuggagggauagggaggaaggugucagccacuucccaaagcgggaaggucauaucuucgugggagucauauaaaaacgggggugagacuagacuguga

SEQ ID NO: 63792 - RNA, 1575 nt, Artificial Sequence
  derived and/or modified CDS sequence (wt) from glycoprotein__RABV__KU198472.1
augguuccucaagcucuuuuguuugugccccuucuggcuuuuccaauguguuucgggaaauuccccaucuacacaauaccagacaaacuuggucccuggagcccgauugacauacaucaucucagcuguccaaacaacuugguuguggaagacgaaggaugcaccaacuugucggguuucuccuacauggaacuuaaggugggauacauuucggccauaaaagugaacggguucacgugcacagguguggugacagaggcugagaccuacacuaacuuugucgguuauguuaccaccacguuuaagagaaagcauuuccgcccaacaccagaugcauguagagcugcuuacaacuggaaaauggccggugaucccagauaugaagaaucucuucauaauccguacccugacuaccauuggcuucgaaccgugaaaaccacgaaggagucucucaucaucauauccccaaguguaucagaccuagacccauaugacaaaucccuucacucgagggucuuuccuagcgggaagugcuugggaauaacaauaucaucuaccuacugcucgacuaaccaugauuacaccaucuggaugcccgagaaugugagauuagggacaucuugugacaucuuuaccaacaguagagggaagagagcauccaaagggagcaagacuuguggauuuguugacgaaagaggcuuguauaagucuuugaagggggcaugcaagcucaaauuauguggaguucugggacuuagacuuauggacggaacgugggucucgaugccaacaucggaugagaccaaguggugucccccugaucaguugguaaaucuacacgacuuucgcucggacgagaucgaacaucuugucguggaggaguuggucaggaaaagagaggagugucuggaugcccuagaguccaucaugacuaccaagucggugaguuuuagacgucuaagccacuugagaaaacuugucccuggauucggaaaagcauacaccauauucaacaaaacccugauggaagccgaugcucacuacaagucaguccggacuuggagcgagaucauccccuccaaggggugucugagaguuggagggaggugucauccccacguaaacggaguguuuuuuaacggcauaauacugggcccugacggccauguucuaaucccagagaugcaaucaucccuccuucagcaacauauggaguuguuggaaucaucaguuaucccucugaugcauccuuuagcagacccgucuacaguuuucaaggacggugaugaagcagaggauuuuguugagguucaccuucccgaugugcacaaacagaucucagggguugaccugggucucccuaacuggggaaaguaugucuuaauaauugcagggguauugauugccaugauauugacaauccucuuaaugacauguuguggaagagguaaucgacccaaguccacacaacacagucuuggagggauagggaggaaggugucauccacuucccaaagcgggaaggucauaucuucgugggagucauauaaaagcgggggugagaccagacuguga

SEQ ID NO: 63793 - RNA, 1575 nt, Artificial Sequence
  derived and/or modified CDS sequence (wt) from glycoprotein__RABV__KU198473.1
augguuccucaagcucuuuuguuugugccccuucuggcuuuuccaauguguuucgggaaauuccccaucuacacaauaccagacaaacuuggucccuggagcccgauugacauacaucaucucagcuguccaaacaacuugguuguggaagacgaaggaugcaccaacuugucggguuucuccuacauggaacuuaaggugggauacauuucggccauaaaagugaacggguucacgugcacagguguggugacagaggcugagaccuacacuaacuuugucgguuauguuaccaccacguuuaagagaaagcauuuccgcccaacaccagaugcauguagagcugcuuacaacuggaaaauggccggugaucccagauaugaagaaucucuucauaauccguauccugacuaccauuggcuucgaaccgugaaaaccacgaaggagucucucaucaucauauccccaaguguagcagaccuagacccauaugacaaaucccuucacucgagggucuuuccuagcgggaagugcuugggaauaacaauaucaucuaccuacugcucgacuaaccaugauuacaccaucuggaugcccgagaaugugagguuagggacaucuugugacaucuuuaccaacaguagagggaagagagcauccaaagggagcaagacuuguggauuuguugacgaaagaggcuuguauaagucuuugaagggggcaugcaagcucaaauuauguggaguucugggacuuagacuuauggacggaacgugggucucgaugccaacaucggaugagaccaaguggugucccccugaucaguugguaaaucuacacgacuuucgcucggacgagaucgaacaucuugucguggaggaguuggucaggaaaagagaggagugucuggaugcccuagaguccaucaugacuaccaagucggugaguuuuagacgucuaagccacuugagaaaacuugucccuggauucggaaaagcauacaccauauucaacaaaacccugauggaagccgaugcucacuacaagucaguccggaccuggaaugagaucauccccuccaaggggugucugagaguuggagggaggugucauccccacguaaacggaguguuuuuuaacggcauaauacugggcccugacggccauguucuaaucccagagaugcaaucaucccuccuucagcaacauauggaguuguuggaaucaucaguuaucccucugaugcauccuuuagcagacccgucuacaguuuucaaggacggugaugaagcagaggauuuuguugagguucaccuuccugaugugcacaaacagaucucagggguugaccugggucucccuaacuggggaaaguaugucuuaauaauugcagggguauugauugccaugauauugacaaucuucuuaaugacauguuguggaagagguaaucgacccaaguccacacaacacagucuuggagggauagggaggaaggugucauccacuucccaaagcgggaaggucauaucuucgugggagucauauaaaagcgggggugagaccagacuguga

SEQ ID NO: 63794 - RNA, 1575 nt, Artificial Sequence
  derived and/or modified CDS sequence (wt) from glycoprotein__RABV__KU198474.1
augguuccucaagcucuuuuguuugugccccuucuggcuuuuccaauguguuucgggaaauuccccaucuacacaauaccagacaaacuuggucccuggagcccgauugacauacaucaucucagcuguccaaacaacuugguuguggaagacgaaggaugcaccaacuugucggguuucuccuacauggaacucaaggugggauacauuucggccauaaaagugaacggguucacgugcacagguguggugacagaggcugagaccuacacgaacuuugucgguuauguuacuaccacguuuaagagaaagcauuuccgcccaacaccagaugcauguagagcugcuuacaacuggaaaauggccggugaucccagauaugaagaaucucuucauaauccguacccugacuaccauuggcuucgaaccgugaaaaccacgaaggagucucucaucaucauauccccaaguguagcagaccuagacccauaugacaaaucccuucacucgagggucuuuccuagcgggaagugcuugggaauaacaauaucaucuaccuacugcucgacuaaccaugauuacaccaucuggaugcccgagaaugugagauuagggacaucuugugacaucuuuaccaacaguagagggaagagagcauccaaagggagcaagacuuguggauuuguugacgaaagaggcuuguauaagucuuugaagggggcaugcaagcucaaauuauguggaguucugggacuuagacuuauggacggaacgugggucucgaugccaacaucggaugagaccaaguggugucccccugaucaguugguaaaucuacacgacuuucgcucggacgagaucgaacaucuugucguggaggaguuggucaggaaaagagaggagugucuggaugcccuagaguccaucaugacuaccaagucggugaguuuuagacgucuaagccacuugagaaaacuugucccuggauucggaaaagcauacaccauauucaacaaaacccugauggaagccgaugcucacuacaagucaguccggaccuggaaugagaucauccccuccaaggggugucugagaguuggagggaggugucauccccacguaaacggaguguuuuuuaacggcauaauacugggcccugacggccauguucuaaucccagagaugcaaucaucccuccuucagcaacauauggaguuguuggaaucaucaguuaucccucugaugcauccuuuagcagacccgucuacaguuuucaaggacggugaugaagcagaggauuuuguugagguucaccuucccgaugugcacaaacagaucucagggguugaccugggucucccuaacuggggaaaguaugucuuaauaauugcagggguauugauugccaugauauugacaaucuucuuaaugacauguuguggaagagguaaucgacccaaguccacacaacacagucuuggagggauagggaggaaggugucauccacuucccaaagcgggaaggucauaucuucgugggagucauauaaaagcgggggugagaccagacuguga

SEQ ID NO: 63795 - RNA, 1575 nt, Artificial Sequence
  derived and/or modified CDS sequence (wt) from glycoprotein__RABV__KU198475.1
augguuccucaagcucuuuuguuugugccccuucuggcuuuuccaauguguuucgggaaauuccccaucuacacaauaccagacaaacuuggucccuggagcccgauugacauacaucaucucagcuguccaaacaacuugguuguggaagacgaaggaugcaccaacuugucggguuucuccuacauggaacuuaaggugggauacauuucggccauaaaagugaacggguucacgugcacagguguggugacagaggcugagaccuacacuaacuuugucgguuauguuaccaccacguuuaagagaaagcauuuccgcccaacaccagaugcauguagagcugcuuacaacuggaaaauggccggugaucccagauaugaagaaucucuucauaauccguacccugacuaccauuggcuucgaaccgugaaaaccacgaaggagucucucaucaucauauccccaaguguaucagaccuagacccauaugacaaaucccuucacucgagggucuuuccuagcgggaagugcuugggaauaacaauaucaucuaccuacugcucgacuaaccaugauuacaccaucuggaugcccgagaaugugagauuagggacaucuugugacaucuuuaccaacaguagagggaagagagcauccaaagggagcaagacuuguggauuuguugacgaaagaggcuuguauaagucuuugaagggggcaugcaagcucaaauuauguggaguucugggacuuagacuuauggacggaacgugggucucgaugccaacaucggaugagaccaaguggugucccccugaucaguugguaaaucuacacgacuuucgcucggacgagaucgaacaucuugucguggaggaguuggucaggaaaagagaggagugucuggaugcccuagaguccaucaugacuaccaagucggugaguuuuagacgucuaagccacuugagaaaacuugucccuggauucggaaaagcauacaccauauucaacaaaacccugauggaagccgaugcucacuacaagucaguccggaccuggaaugagaucauccccuccaaggggugucugagaguuggagggaggugucauccccacguaaacggaguguuuuuuaacggcauaauacugggcccugacggccauguucuaaucccagagaugcaaucaucccuccuucagcaacauauggaguuguuggaaucaucaguuaucccucugaugcauccuuuagcagacccgucuacaguuuucaaggacggugaugaagcagaggauuuuguugagguucaccuucccgaugugcacaaacagaucucagggguugaccugggucucccuaacuggggaaaguaugucuuaauaauugcagggguauugauugccaugauauugacaauccucuuaaugacauguuguggaagagguaaucgacccaaguccacacaacacagucuuggagggauagggaggaaggugucauccacuucccaaagcgggaaggucauaucuucgugggagucauauaaaagcgggggugagaccagacuguga

SEQ ID NO: 63796 - RNA, 1575 nt, Artificial Sequence
  derived and/or modified CDS sequence (wt) from glycoprotein__RABV__KU198476.1
augguuccucaagcucuuuuguuugugccccuucuggcuuuuccaauguguuucgggaaauuccccaucuacacaauaccagacaaacuuggucccuggagcccgauugacauacaucaucucagcuguccaaauaacuugguuguggaagacgaaggaugcaccaacuugucggguuucuccuacauggaacuuaaggugggauacauuucggccauaaaagugaacggguucacgugcacagguguggugacagaggcugagaccuacacuaacuuugucgguuauguuaccaccacguuuaagagaaagcauuuccgcccaacaccagaugcauguagagcugcuuacaacuggaaaauggccggugaucccagauaugaagaaucucuucauaauccguacccugacuaccauuggcuucgaaccgugaaaaccacgaaggagucucucaucaucauauccccaaguguagcagaccuagacccauaugacaaaucccuucacucgagggucuuuccuagcgggaagugcuugggaauaacaauaucaucuaccuacugcucgacuaaccaugauuacaccaucuggaugcccgagaaugugagauuagggacgucuugugacaucuuuaccaacaguagagggaagagagcauccaaagggagcaagacuuguggauuuguugacgaaagaggcuuguauaagucuuugaagggggcaugcaagcucaaauuauguggaguucugggacuuagacuuauggacggaacgugggucgcgaugccaacaucggaugagaccaaguggugucccccugaucaguugguaaaucuacacgacuuucgcucggacgagaucgaacaucuugucguggaggaguuggucaggaaaagagaggagugucuggaugcccuagaguccaucaugacuaccaagucggugaguuuuagacgucuaagccacuugagaaaacuugucccuggauucggaaaagcauacaccauauucaacaaaacccugauggaagccgaugcucacuacaagucaguccggaccuggaaugagaucauccccuccaaggggugucugagaguuggagggaggugucauccccauguaaacggaguguuuuuuaacggcauaauacugggcccugacggccauguucuaaucccagagaugcaaucaucccuccuucagcaacauauggaguuguuggaaucaucaguuaucccucugaugcauccuuuagcagacccgucuacaguuuucaaggacggugaugaagcagaggauuuuguugagguucaccuucccgaugugcacaaacagaucucagggguugaccugggucucccuaacuggggaaaguaugucuuaauaauugcagggguauugauugccaugauauugacaaucuucuuaaugacauguuguggaagagguaaucgacucaaguccacacaacacagucuuggagggauagggaggaaggugucauccacuucccaaagcgggaaggucauaucuucgugggagucauauaaaagcgggggugagaccagacuguga

SEQ ID NO: 63797 - RNA, 1575 nt, Artificial Sequence
  derived and/or modified CDS sequence (wt) from glycoprotein__RABV__KU198478.1
augguuccucaagcucuuuuguuugugccccuucuggcuuuuccaauguguuucgggaaauuccccaucuacacaauaccagacaaacuuggucccuggagcccgauugacauacaucaucucagcuguccaaauaacuugguuguggaagacgaaggaugcaccaacuugucggguuucuccuacauggaacuuaaggugggauacauuucggccauaaaagugaacggguucacgugcacagguguggugacagaggcugagacuuacacuaacuuugucgguuauguuaccaccacguuuaagagaaagcauuuccgcccaacaccagaugcauguagagcugcuuacaacuggaaaauggccggugaucccagauaugaagaaucucuucauaauccguacccugacuaccauuggcuucgaaccgugaaaaccacgaaggagucucucaucaucauauccccaaguguagcggaccuagacccauaugacaaaucccuucacucgagggucuuuccuagcgggaagugcuugggaauaacaauaucaucuaccuacugcucgacuaaccaugauuacaccaucuggaugcccgagaaugugagauuagggacaucuugugacaucuuuaccaacaguagagggaagagagcauccaaagggagcaagacuugcggauuuguugacgaaagaggcuuguauaagucuuugaagggggcaugcaagcucaaauuauguggaguucugggacuuagacuuauggacggaacgugggucgcgaugccaacaucagaugagaccaaguggugucccccugaucaguugguaaaucuacacgacuuucgcucggacgagaucgaacaucuugucguggaggaguuggucaggaaaagagaggagugucuggaugcccuagaguccaucaugacuaccaagucggugaguuuuagacgucucagccacuugagaaaacuugucccuggauucggaaaagcauacaccauauucaacaaaacccugauggaggcugaugcucacuacaagucaguccggaccuggaaugagaucauccccuccaaggggugucugagaguuggagggaggugucauccccauguaaacggaguguuuuuuaauggcauaauacugggcccugacggucauguucugaucccagagaugcaaucaucccuccuucagcaacauauggaguuguuggaaucaucaguuaucccucugaugcauccuuuagcagacccgucuacaguuuucaaggacggugaugaagcagaggauuuuguugagguucaccuucccgaugugcacaaacagaucucagggguugaccugggucucccuaauuggggaaaguaugucuuaauaauugcagggguauugaucgccaugauauugacaaucuucuuaaugacauguuguggaagagguaaucggcccaaguccacacaacacagucuuggagggauagggaggaaggugucauccacuucccaaagcgggaaggucauaucuucgugggagucauauaaaagcgggggugagaccagacuguga

SEQ ID NO: 63798 - RNA, 1575 nt, Artificial Sequence
  derived and/or modified CDS sequence (wt) from glycoprotein__RABV__KU198479.1
augguuccucaagcucuuuuguuugugccccuucuggcuuuuccaauguguuucgggaaauuccccaucuacacaauaccagacaaacuuggucccuggagcccgauugacauacaucaucucagcuguccaaacaacuugguuguggaagacgaaggaugcaccaacuugucggguuucuccuacauggaacuuaaggugggauacauuucggccauaaaagugaacggguucacgugcacagguguggugacagaggcugagaccuacacuaacuuugucgguuauguuaccaccacguuuaagagaaagcauuuccgcccaacaccagaugcauguagagcugcuuacaacuggaaaauggccggugaucccagauaugaagaaucucuucauaauccguacccugacuaccauuggcuucgaaccgugaaaaccgcgaaggagucucucaucaucauauccccaaguguagcagaccuagacccauaugacaaaucccuucacucgagggucuuuccuagcgggaagugcuugggaauaacaauaucaucuaccuacugcucgacuaaccaugauuacaccaucuggaugcccgagaaugugagauuagggacaucuugugacaucuuuaccaacaguagagggaagagagcauccaaagggagcaagacuuguggauuuguugacgaaagaggcuuguauaagucuuugaagggggcaugcaagcucaaauuauguggaguucugggacuuagacuuauggacggaacgugggucucgaugccaacaucggaugagaccaaguggugucccccugaucaguugguaaaucuacacgacuuucgcucggacgagaucgaacaucuugucguggaggaguuggucaggaaaagagaggagugucuggaugcccuagaguccaucaugacuaccaagucggugaguuuuagacgucuaagccacuugagaaaacuugucccuggauucggaaaagcauacaccauauucaacaaaacccugauggaagccgaugcucacuacaagucaguccggaccuggaaugagaucauccccuccaaggggugucugagaguuggagggaggugucauccccacauaaacggaguguuuuuuaacggcauaauacugggcccugacggccauguucuaaucccagagaugcaaucaucccuccuucagcaacauauggaguuguuggaaucaucaguuaucccucugaugcauccuuuagcagacccgucuacaguuuucaaggacggugaugaagcagaggauuuuguugagguucaccuucccgaugugcacaaacagaucucagggguugaccugggucucccuaacuggggaaaguaugucuuaauaauugcagggguauugauugccaugauauugacaaucuucuuaaugacauguuguggaagagguaaucgacccaaguccacacaacacagucuuggagggauagggaggaaggugucauccacuucccaaagcgggaaggucauaucuucgugggagucauauaaaagcgggggugagaccagacuguga

SEQ ID NO: 63799 - RNA, 1575 nt, Artificial Sequence
  derived and/or modified CDS sequence (wt) from glycoprotein__RABV__KU534939.1
augguuccucaaguucuuuuguuuguaccccuucugguuuucucaauguguuucgggaaauuuccuaucuauacgauaccagacaaacuuggucccuggagcccgauugacauacaucaucucagcuguccaaacaaccugguuguggaagaugaaggaugcacuaacuugucggguuucuccuacauggaacuuaaggugggauacaucucggccauaaaaguaaacggguucacgugcacaggugugguaacagaggcagagacuuacacuaacuuugucgguuauguuaccaccacguucaaaagaaagcauuuccgcccaacaccagaugcaugucgagcugcuuacaacuggaagauggcaggugaccccagauaugaagaaucgcugcacaauccguacccugacuaccacuggcuucgaaccguuaaaaccacaaaggagucccucgucaucauauccccaaguguagcggaccuggacccauacgacaaaucccuucauucgagggucuuuccuagcgggaagugcucgggaauaacaauaucaucuacuuacugcucuacuaaccaugauuacacaaucuggaugccugagaauccgagacuggggacaucuugugacaucuuuaccaacaguagagggaagagagcauccaaagggggcaaaacuugcggauuuguugaugaaagaggcuuguauaagucuuugaaaggggcaugcaaacucaaguuguguggaguucucggccuuagacuuauggauggaacguggguugcgaugcaaacaucggacgaaaccaagugguguccuccugaucaguugguaaaucuacacgacuuucgcucggacgagaucgaacaucuuguuguagaggaguuggucaagaaaagagaggagugucuggaugcacuagaguccaucaugacuaccaagucggugaguuucagacgucucagccacuugaggaaacuugucccuggguucggaaaagcauacaccauauucaacaaaaccuugauggaagcagaugcccauuacaagucaguccgaaccuggaaugaaaucauccccuccaaaggguguuugagaguuggagggaggugucauccucacgugaaggggguguuuuuuaacgguauaauacuggguccugacggccauguucuaaucccagaaaugcaaucgucccuccuucagcagcauauggaguuguuggaauccucaguuauuccccugaugcacccuuuggcagacccgucuacaguuuucaaggacggugaugaagcagaggauuuuguugagguucaccuucccgacgugcacaaacaaauuucagguguugaccugggucuccccagcuggggaagguauguuuuggugagugcaggggucuugguuguccugauguugacaauuuucauaauaacauguugcggaagaguccaucgacccaaaucuacacaacacggucucggggggacagggaggaaggugucggucacuucccaaagcgggaaggucauaucuucaugggagucauauaagagugggggugagaccagacuguga

SEQ ID NO: 63800 - RNA, 1575 nt, Artificial Sequence
  derived and/or modified CDS sequence (wt) from glycoprotein__RABV__KU534940.1
augguuccucagguucuuuuguuuguaccccuucugguuuucucaauguguuucgggaaauuuccuaucuauacgauaccagacaaacuuggucccuggagcccgauugacauucaucaucucagcuguccaaacaaccugguuguggaagaugaaggaugcacuaacuugucggguuucuccuacauggaacuuaaggugggauacaucucggccauaaaaguaaacggguucacgugcacagguguggugacagaggcagagacuuacacuaacuuugucgguuauguuaccaccacguucaaaagaaagcauuuccgcccaacaccagaugcaugucgagcugcuuacaacuggaagauggccggugaccccagauaugaagaaucgcugcacaauccguacccugacuaccacuggcuucgaaccguuaaaaccacaaaggagucccucgucaucauauccccaaguguagcggaccuggacccauacgacaaaucccuucauucgagggucuuuccuagcgggaagugcucgggaauaacaauaucaucuacuuacugcucuacuaaccaugauuacacaaucuggaugcccgagaauccgagacuggggacaucuugugacaucuuuaccaacaguagagggaagagagcauccaaagggggcaaaacuugcggguuuguugaugaaagaggcuuguauaagucuuugaaaggggcaugcaaacucaaguuguguggaguucuuggccuuagacuuauggauggaacguggguugcgaugcaaacaucggacgaaaccaagugguguccuccugaucaguugguaaaucuacacgacuuucgcucggacgaaaucgaacaucuuguuguggaggaguuggucaagaaaagagaggagugucuggaugcccuagaguccaucaugacuaccaagucggugaguuucagacgucucagccacuugagaaaacuugucccuggguucggaaaagcauauaccauauucaacaaaaccuugauggaagcagaugcccauuacaagucaguccgaaccuggaaugaaaucaucccauccaaaggguguuugagaguuggagggaggugucauccucacgugaaggggguguuuuuuaacgguauaauacuggguccugacggccauguucuaaucccagagaugcaaucaucccuccuucagcagcauauggaguuguuggaauccucaguuaucccccugaugcacccuuuagcagauccgucuacaguuuucaaggacggugaugaagcagaggauuuuguugagguucaccuucccgacgugcacaaacaaauuucagguguugaccugggucuccccagcuggggaaaguauguuuuggcgagugcaggggucuugguuguccugauguugacaauuuucauaauaacauguugcggaagaguccaucgacccaagucuacacaacacggucucggggggacagggaggaaggugucagucacuucccaaagcgggaaggucauaucuucaugggagucauauaagaguggaggugagaccagacuguga

SEQ ID NO: 63801 - RNA, 1575 nt, Artificial Sequence
  derived and/or modified CDS sequence (wt) from glycoprotein__RABV__KU534941.1
augguuccucaagcucuuuuguuugugccccuucuggcuuuuccaauguguuucgggaaauuccccaucuacacaauaccagacaaacuuggucccuggagcccgauugacauacaucaucucagcuguccaaauaacuugguuguggaagacgaaggaugcaccaacuugucggguuucuccuacauggaacuuaaagugggauacauuucggccauaaaagugaacggguucacgugcacaggugugguuacagaggcugagacuuacacuaacuuugucgguuauguuaccaccacguucaagagaaagcauuuccgcccaacaccagaugcaugucgagcugcuuacaacuggaaaauggccggugaccccagauaugaagaaucucuucauaauccguacccugacuaccauuggcuucgaaccgugaaaaccacgaaggagucucucaucaucauauccccaaguguagcagaccuagacccauaugacaaaucccuucacucgagggucuuuccuagcgggaagugcuugggaauaacaauaucaucuaccuacugcucgacuaaccaugauuacaccaucuggaugcccgagaaucugagauuagggacaucuugugacaucuuuaccaauaguagagggaagagagcauccaaagggagcaagacuugcggauuuguugacgaaagaggcuuguauaagucuuugaagggggcaugcaagcucaaauuaugugggguucugggacuuagacuuauggacggaacgugggucgcgaugcaaacaucggaugagaccaaguggugucccccugaucaguugguaaaucuacacgacuuucgcucggacgagaucgaacaucuugucguggaggaguuggucaagaaaagagaggagugucuggaugcccuagaguccaucaugacuaccaagucggugaguuuuagacgucucagccacuugagaaaacuugucccuggguucggaaaagcauacaccauauucaacaaaacccugauggaagcugaugcucacuacaagucagucaggaccuggaacgagaucauccccuccaaggggugucugagaguuggagggaggugucauccccauguaaacggaguguuuuuuaacggcauaauacugggcccugacggccauguuuugaucccagagaugcaaucaucccuccuucagcaacauauggaguuguuggaaucaucaguuaucccucugaugcauccuuuagcagacccgucuacaguuuucaaggacggugaugaagcagaggauuuuguugagguucaccuucccgaugugcacaaacaaaucucagggguugaccugggucucccuaacuggggaaaguaugucuuaauaauugcagggguauugauugccaugauauugacaaucuucuuaaugacauguuguggaagagguaaucgacccaaguccacacaacacagucuuggagggauagggaggaaggugucagccacuucccaaagcgggaaggucauauccucgugggagucauauaaaagcgggggugagaccagacuguga

SEQ ID NO: 63802 - RNA, 1575 nt, Artificial Sequence
  derived and/or modified CDS sequence (wt) from glycoprotein__RABV__KU534942.1
augguuccucagguucuuuuguuuguaccccuucuuguuuucucaauguguuucgggaaauucccuaucuauacaauaccagacaaacuuggucccuggagcccgaucgauauacaucaucucagcuguccaaacaaucugguuguggaagaugaaggauguaccaacuugucggguuucuccuacauggaacuuaaggugggauacaucucggccauaaaaguaaacggauucacgugcacagguguggugacagaggcagagacuuacacuaacuuugucgguuaugucaccaccacguucaaaagaaagcauuuccgcccaacaccagaugcaugucgagcugcuuacaacuggaagcuggccggugaccccagauaugaagaaucucugcacaauccguacccugacuaccacuggcuucgaaccgucaaaaccacaaaggagucccucgucaucauauccccaaguguagcggaccuggacccauacgacaaaucccuucauucgagggucuuuccuagcgggaagugcuugggaauaacaauaucaucuacuuacugcucuacuaaccaugauuacacaaucuggaugcccgagaauccgagacuggggacaucuugugacaucuuuaccaacaguagagggaagagagcauccaaagggagcaaaacuugcggauuuguugaugaaagaggcuuguauaagucuuugaaaggggcaugcaaacucaaguuauguggaguucuuggccuuagacuuauggauggaacguggguugcgaugcaaacaucggacgaaaccaagugguguccuccugaucaguugguaaaucuacacgacuuucgcucggacgagauugaacaucuuguuguggaggaguuggucaagaaaagagaggagugucuggaugcacuagaguccaucaugacuaccaagucggugaguuucagacgucucagccaucuaagaaaacuugucccuggguucggaaaagcauauaccauauucaacaaaaccuugauggaagcagaugcucauuacaagucaguccgaaccuggaaugagaucauccccuccaaaggguguuugagagugggagggaggugucauccucacgugaaugggguguuuuuuaacgguauaauacuggguccugacggccauguucuaaucccagagaugcaaucaucccuccuucagcagcauauggaguuguuggaauccucaguuaucccccugaugcacccuuuagcagacccaucuacaguuuuuaaggacggugaugaagcagaggauuuuguugagguucaccuucccgacgugcacaaacaaauuucagguguugaccugggucuccccagcuggggaaaguauguuuuggugagugcaggggucuugguuguccugauguugacaauuuucauaaugacauguugcggaagaguccaucgacccaagucuacgcaacacagucucggagggaccgggaggaaggugucggucacuucccaaagcgggaaggucauaucuucaugggagucauauaagagcgggggugagaccagacuguga

SEQ ID NO: 63803 - RNA, 1575 nt, Artificial Sequence
  derived and/or modified CDS sequence (wt) from glycoprotein__RABV__KU739036.1
augguuccucagguucuuugguuuguaccccuucugguuuucucaauguguuucggaaaguucccuaucuacacgauaccagacaaacuuggucccuggagcccgauugacauacaucaucucagcuguccaaacaaccugguuguagaagaugaaggauguaccaacuugucggguuucucuuacauggaacuuaaggugggauacauuucagccauaaaaguaaauggguucacgugcacagguguggugacagaggcagagacuuacacuaacuuuguugguuauguuaccaccacguucaaaagaaagcauuuccgcccaacaccagaugcaugucgagcugcuuacaacuggaagauggccggugaccccagauaugaagaaucucugcacaauccguacccugacuaccacuggcuucgaaccgucaaaaccacaaaggagucccucgucaucauauccccaaguguagcggaccuggacccauaugacaaaucccuucacucgagggucuuuccuagcgggaagugcucggggauaacaauaucaucuaccuacugcucuacuaaccaugauuacacaaucuggaugcccgagaauccgagacuggggacaucuugugacaucuuugccaauaguagagggaagagagcauccaaagggagcaaaacuugcggauuuguugaugaaagaggcuuguauaagucuuugaaaggggcaugcaagcucaaguugugugggguucuuggccuuagacuuauggauggaacaugggucgcgaugcaaacaucggacgagaccaaguggugucccccugaucaguugguaaaucuacaugacuuucgcucggacgagaucgaacaucucguuguagaggaguuggucaagaaaagagaggagugucuggaugcacuagagucuaucaugaccaccaagucggugaguuucagacgucucagccacuugagaaaacuugucccuggguucggaaaagcauacaccauauucaacaaaacccugauggaagcagaugcucauuacaagucagucaggaccuggaaugagaucauccccuccaagggguguuugagaguuggagggaggugucauccucacgugaacgggguguuuuucaacgguauaauacuggguccugauggccauguucucaucccggagaugcaaucaucccuccuucagcagcauauggaguuguuggaauccucaguuaucccucugaugcacccuuuagcagacccgucuacaguuuucaaggacggcgaugaagcagaggauuuugucgagguucaccuucccgauguacacaaacaaaucucagguguugaccugggucucccuaacuggggaaaguauguuuuggugagugcaggggucuuaguuguccugauguuggcaauuuucauaaugacauguugcggaagaguaaaccgacccaagucuacacaacauagucucgaagguacagggaggaaggugucggucacuucccagagcgggaaggucauaucuucaugggagucauauaagagcgggggugagaccagacuguga

SEQ ID NO: 63804 - RNA, 1575 nt, Artificial Sequence
  derived and/or modified CDS sequence (wt) from glycoprotein__RABV__KU739037.1
augguuccucaggcucuuuuguuuguaccccuucugguuuuuccauuguguuucgggaaauucccuauuuacacgauaccagacaaacuugguccuuggagcccgauugacauacaucaucucagcugcccaaacaauuugguuguggaggacgaaggaugcaccaaccugucaggguucuccuacauggaacuuaaaguuggauacaucucagccauaaaagugaacggguuuacuugcacgggcguugugacagaggcagaaaccuacacuaacuuuguugguuaugucaccaccacauucagaagaaagcauuuccguccaaccccagaugcguguagagcugcguacaacuggaagauggccggugacccccgauaugaggagucucuacauaauccguacccugacuaccauuggcuucgaacuguaaaaaccaccaaggagucucucguuaucauauccccaaguguggcagauuuagacccauaugacaaaucucugcacucgagggucuucccugguggaaaaugcucaggaauaacggugucuucuaccuacugcucaacuaaccacgauuacaccauuuggcuacccgagaauccgagacuagggacaucuugugacauauuuaccaauaguagagggaagagagccuccaaagggaguaagaccugcggcuuuguagaugagagaggccuguacaagucacuaaaaggagcaugcaaacucaaguuguguggaguucucggacuuagacuuauggauggaacaugggucgcgaugcaaacaucagaugagaccaaauggugcccuccugaucaguuagugaaucugcacgacuuucgcucagaugagauugagcaucuuguuguagaggaguuggucaagaaaagagaggagugucuggaugcacuagaguccaucaugaccaccaagucagugaguuucagacgccucagucacuuaagaaaacuugucccuggauuuggaaaagcauauaccauauucaacaagaccuugauggaggccgaugcucacuacaagucaguccggacauggaaugagaucauccccucaaagggguguuuaagaguuggagggaggugccaucaucaugugaacgggguguucuucaaugguauaauauuaggaccugacggccauguucuaaucccagagaugcaaucaucccuccuccagcaacauauggaguuguuggaauccucagucauuccccugaugcacccccuggcagacccguccacagucuucaaggacggugaugaggcugaggauuuuguugaaguucaccuucccgaugugcacaaacaggucucagggguugaccugggccucccgaacugggguaaguauguauuauugagugcaggggcccugauugccuugauguugauaaucuuuuuaaugacauguuguagaagagucaaucgaccggagucuacacagcgcaguuucggagggacagaaagggaggugucgaucacuccucaaagcgggaaggucauaucuucaugggagucauauaagagugggggugagacuagacuguga

SEQ ID NO: 63805 - RNA, 1575 nt, Artificial Sequence
  derived and/or modified CDS sequence (wt) from glycoprotein__RABV__KU739038.1
augguuccucuggcucuuuugguuguaccccuccugguguugucacuguguucagggaaauuccccauuuacacgauaccagacaaacuuggccccuggagcccuauugacauacaucaucucagcuguccaaacaaucuggucguggaggacgagggaugcaccaaccugucaggguuuuccuacauggaacuuaaaguaggauacauuucggccauaaaagugaacggguucacuuguacaggcguggugacagaagcagaaacuuauacuaacuucgucgguuaugucaccaccacguucaggagaaagcacuuucgcccuacaccggacgcguguagagccgcauacaacuggaagauggcaggugacccuagauaugaagagucuuugcacaauccauacccugacuaucauuggcuccgaacgguaaaaaccacgaaggaaucccucguuauuauaucuccgaguguugcagauuuagacccauaugauagaucucuucacucgagagucuucccuaaugggaagugcucggggauaacuguguccuccaccuacugcccuaccaaccaugauuacaccaucuggaugccagagaauccgagacuggggacaucuugugacauuuuugucaacaguagagggaagagagcaucuaaagggaguaagacuugcggguuuguggaugaaagaggucuguacaagucucuaaaaggggcaugcaaacucaagcuaugugggguucucggacuuagacuuauggaugggacaugggucgccaugcgaacgucggacgagaccaaauggugcccuccugaucaauuagugaauauacaugauuuucgcucagaugagaucgaacaucucguuguggaggaguugguuaagaagagagaagaaugucuagaugcacuagaguccaucaugaccaccaagucagugaguuuuagacgucucagucacuugaggaaacuuguccccggguucggaaaagcauacaccauauucaacaaaacccugauggaggcugaugcucacuacaagucaguccggaccugggaugaaaucauccccucaaaaggguguuugagaguuggggggaggugucauccccauguucacggaguguuuuucaaugguauaauauuggguccugauggucauguuuuaauuccagaaaugcagucaucccuccuucagcagcacauggagcuguuggaguccucaguuaucccucucaugcaccccuuggcagacccaucaacaguuuuuaaggauggugaugaggcugaggauuuuguagaggugcaccuuccugaugugcacaaacaaaucucagggguagaccugggucucccaaacuggggaaaauauguucuaaugagugcaggugcucugaucgcccugauguugauaaucuuccuaaugacauguuguagaaaaauuaagcaaccagaauccacacagcauagucucagaggaacagggaggaaagugucggucacuucccaaaacgggaaaguaauauccucaugggaaucauauaagaguggaggugagaccaggcuguga

SEQ ID NO: 63806 - RNA, 1575 nt, Artificial Sequence
  derived and/or modified CDS sequence (wt) from glycoprotein__RABV__KU739043.1
augguuccucugacucuuuugguuguaccccucuugguuuuaucacuguguucagggaaauuccccaucuacacgauaccagauaaacuaggccccuggagccccauugacauacaucaucucagcuguccaaacaaucuggucguggaggacgagggaugcaccaaccugucaggauuuuccuacauggaacuuaaaguaggauacauuucagccauaaaaguaaauggguuuacuuguacaggcguggugacagaggcagaaacuuauacuaauuucgucgguuaugucaccaccacguucaggagaaagcacuuucgcccuacaccggacgcauguaggaccgcauacaacuggaagauggcaggugacccuagauaugaagagucuuugcacaauccauacccugacuaucauuggcuccgaacgguaaaaaccacgaaggagucccuuguuauuauaucuccgaguguugcagauuuagacccauaugauagaucucuucacucgagaguauucccuaaugggaagugcucggggauaaccguauccuccaccuacugcccuaccaaccacgauuacaccaucuggaugccagagaauccgagacuggggacaucuugugacauuuuugucaacaguagagggaagagagcgucuaaagggagcaagacuugcggguucguggaugaaagaggucuguacaagucucuaaaaggggcaugcaaacucaaguuaugugggguacucggacuuagacuuauggaugggacaugggucgcaaugcgaacgucggacgagaccaaauggugcccuccugaccaauuagugaauauacaugauuuucacucagaugagaucgaacaucucguuguagaggaguugguuaagaagagagaagagugucuagaugcauuagaguccaucaugaccaccaagucagugaguuuucgacgucucagucauuugaggaaacuuguccccggguucggaaaagcauacaccauauucaacaaaacccuaauggaagcugacgcucacuacaagucaguccggaccugggaugaaaucauccccucaaaaggguguuugagaguuggggggaggugucauccccauguucauggaguguuuuuuaaugguauaauauuggguccugauggucauguucuaaucccagaaaugcaaucaucccuccuucagcagcacauggaguuguuggaauccucaguuaucccucuaaugcaccccuuggcagacccaucaacaguuuuuaaggauggugaugaggcugaagauuuuguagaggugcaccuuccugaugugcacaaacaaaucucagggguugaccugggucuuccaaacuggggaaaauauguucuaaugagugcaggugcucugaucgcccugaugcugauaaucuuccuaaugacauguuguagaaaaauuaagcgaccagaauccacacagcauagucccagaggaacagggaggaaagugucggucacuucccaaaacgggaagguaauaucuucaugggaaucauauaagagcggaggugagaccaggcuguaa

SEQ ID NO: 63807 - RNA, 1575 nt, Artificial Sequence
  derived and/or modified CDS sequence (wt) from glycoprotein__RABV__KU739044.1
augguuccucaggcucuuuuguuuguaccccuccugguuuucucauuguguuuugggaaauucccuauuuacacgauaccagacaaacuuggucccuggaguccgauugauauacaucaucucagcugcccaaacaauuuggucguggaggacgaaggaugcaccaaccugucaggguucuccuacauggagcuuaaaguuggauacaucucagcuauaaaggugaacggguucacuugcacaggcguugugacagaggcagaaaccuacacuaacuuuguugguuaugucaccaccacguucaaaagaaagcauuuccgcccaacaccggacgcauguagagccgcguacaacuggaagauggccggugaccccagauaugaagagucuuuacacaauccguacccugacuaccauuggcuucgaacuguaaagaccacaaaggagucucucguuaucauaucuccaaguguggcagauuuggacccauaugacaaaucccuucacucgagggucuucccuagcggaaaaugcucaggaauaacgguaucuucuaccuacugcucaacuaaccacgauuacaccauuuggaugccugagaauccgagacuagggacaucuugugacauuuuuaccaauaguagaggaaagagagcauccaaagggaguaagaccugcggcuuuguagaugaaagaggccuguauaagucucuaaaaggagcaugcaagcucaaguuauguggaguucuuggacuuagacuuauggauggaacaugggucgcuaugcaaacaucagaugagaccaaaugguguccucccgaucaguuggugaaucugcacgacuuucgcucagaugaaaucgagcaucuuguuguggaggaguuggucaagaaaagagaggagugucuggaugcacuagaguccaucaugaccaccaagucagugaguuucagacgucucagucauuuaagaaaacuugucccuggguucggaaaagccuauacuauauucaacaagaccuugauggaggcugacgcucauuacaagucaguccggacuuggaaugaaaucauccccucuaaaggguguuuaagaguuggagggaggugucauccucaugugaacgggguguuuuucaaugguauaauauuaggaccugacggccauguucuaaucccagagaugcaaucaucccuccuucagcaacauauggaguuauuggaauccucaguuauuccucugaugcacccccuugcagacccguccacaguuuucaaggacggugacgaggcugaggauuuuguagaaguucaccuucccgaugugcacaaacaggucucagggguugaccugggucucccgaacugggggaaguauguauuacugagugcaggaacccugauugccuugauguugauaauuuuucuaaugacauguuguagaagagucaaucgaccgaaaucuacgcaacgcggucccggagagacagggaggaaggugucggucaccucccaaagcgggaaggucauaucuucaugggagucauauaaaagugggggugagacuaggcuguga

SEQ ID NO: 63808 - RNA, 1575 nt, Artificial Sequence
  derived and/or modified CDS sequence (wt) from glycoprotein__RABV__KU739045.1
augauccuucaggccauucuguuugugccucuccuaaucucuucguugugucucgggaaauuccccaucuacacaauaccggacaagcuugguccuuggagccccauagauauacaucaccucagcuguccaaauaauuugguuguggaggacgaggggugcaccaaucuaucaggguucucuuacauggaacuaaaggugggauacaucucugccauaaaggugaacggguucacuuguaccgguguuguaacagaggcugaaaccuauaccaacuuuguugguuaugucaccaccacauucaagaggaaacauuuccgcccuguaccggaugcaugcaggacugcauacaacuggaagauggcuggugauccuagauaugaggagucucuucaaaauccuuauccugauuaccacuggcuacggacagugaagaccaccaaggagucucuuaucaucauaucuccgaguguggcugauuuagacccguacgacaaaucccuucauucuagaguguucccuggugggaaguguuugggaauaacgguuucuuccaccuacugcucaaccaaccaugauuacaccaucuggaugcccgaggaaccaagacucggaacgucuugcgacaucuuuaccagcagcaaagggaaaaaggcgucuaagggaggcaagacuugcggauuuguggaugaaaggggcuuguacaagucucuaaaaggagcauguaaacucaagcugugcggaguucucggacuuagacuuauggacggaaccuggguuucaauucaaaccucagaugauaccaaauggugcccuccggaucaauuggugaaucuacaugacuuucacucagacgaaauagagcaucucgucguugaggaguuggucaagaagagggaagagugucuggacgcacuggaguccaucaugaccaccaaaucuguaaguuuuagacgucucagcuauuugagaaaacuugucccuggguuuggaaaggcauacacuauauucaacaagacuuugauggaggcugaugcccacuacaagucaguucgaacuuggaacgagaucauccccucaaaaggguguuugaaagucagagagaggugucauccuccuguggacggaguguucuucaauggcauaauucuggguccggacgggaauguccugauaccagagaugcaaucaucucuacuucaacaacauauggagcuguuggagucuucuguaauccccuuaaugcaucccuuggcggaccccucaacagucuucaaggaaggggaugaagcggaggauuuuguugaaguucaccucccagauguucacaaacagauuucagggguugaccuuggucucccgaguugggggagguaucuccugaugauugcagguggucuggcgacacuaguucuaauaaucugcucgauggcaugcuguagaagaaccaagcgaacagagucaagaagacgaggcucuggagagucagggaaaaagguaacggcaaccccccagacuaggaaagucgugucuucaugggaguuguacaagagugaaggcgaugccaggcuauga

SEQ ID NO: 63809 - RNA, 1575 nt, Artificial Sequence
  derived and/or modified CDS sequence (wt) from glycoprotein__RABV__KU739047.1
augaucccucaggcucuucuacuggugccucuugugaucuccucauugugucucgggaaauuccccaucuacacgauaccagacaagcucgguccuuggagucccaucgauauacaucaucucagcuguccuaauaauuugguuguggaggacgaggggugcacuagucugucaggguuuucuuacauggaacugaagguaggauacaucucugccauaaaagugaacggguucacuuguaccgguguugugacagaagcugagaccuauaccaacuuuguugguuaugucacuaccacauucaagagaaaacacuuucgcccaaugucagaugcauguagagcugccuacaacuggaagguggccggugacccuagauaugaagagucucuucaaaauccguauccugauuaccauuggcuucggacugugaagaccaccaaagagucgcuuauuaucauaucuccaaguguggcugaccuggaucccuacgacaaaucccugcggucaagaauuuucccuggagggaagugcuugggaauaacagucucuucuaccuacugcucaaccaaccaugauuacacuaucuggaugccagaagaagcaagacucgggacaucuugugacauuuuuaccaacagcaaagggaagagagcuucuaagggaggcaaaauuugcggauucguggaugaaaggggauuguauaagucucuaaaaggagcauguaggcuuaaguugugcggaguuucuggacuuagacuuauggauggaacaugggucgcgauucagacgucagaggagaccaaauggugcccuucugaucaauuggugaaucuacaugacuuucacucagaugagauagaacaucuugucguggaggaguuggucaagaagagggaagaaugucuggacacacuggaguccaucaugaccaccaaaucaguaaguuucagacgucucagccacuugagaaaacuuguuccaggauuugggaaggcuuauacuauauucaacaagacuuuaauggaagcugaugcucacuauaacucaguucgaacuuggaaugagaucauccccucaaaagggugucuaaaagucggagggagaugucauccucauguggacggaguguuuuucaaugguauaauucuugguccagacgggaaugucuugaucccggagaugcaaucgucccuacuccaacagcauauggaguuguuggaguccucuguaaucccccuaaugcaucccuuggcagacccaucaacugucuucaaggaaggcgaugaggcagagaacuuuguugagguucacuugccggauauucacaaacaggucuccgggauugaccuuggucucccaaacugggggaaauauuugcugaugagugcaggugcucuggcagcacuaauucugacaaucuucuuaauuacauguugcagaagggucaauagaacagaaucaauaaagcaagguccugaggagucaagaaggaaaguaucuguaacuccucaaaacgggaaagucauaucuucaugggagcuguacaaaaauggaggcgagaccaagcuguga

SEQ ID NO: 63810 - RNA, 1575 nt, Artificial Sequence
  derived and/or modified CDS sequence (wt) from glycoprotein__RABV__KU739048.1
augguuccucaggcucuuuuguuuguaccccuucuggguuuuucauuguguuucgggaaauucccuauuuacacgauaccagacaaacuugguccuuggagcccgaucgacauacaucaucucagcugcccaaacaauuugguuguggaggacgaaggaugcaccaaccugucaggguucuccuacauggaacuuaaaguuggauacaucucagccauaaaagugaacggguuuacuugcacgggcguugugacagaggcagaaaccuacacuaacuuuguugguuaugucaccaccacguucaaaagaaagcauuuccguccaaccccagaugcauguagagcugcguacaacuggaagauggccggugauccccgauaugaggagucucuacauaauccguacccugacuaccauuggcuucgaacuguaaaaaccaccaaggagucucucguuaucauauccccaaguguggcagauuuagacccauaugacaaaucucuucacucgagggucuucccugguggaaagugcucaggaauaacggugucuucuaccuacugcucaacuaaccacgauuacaccauuuggcugccugagaauccgagacuagggacaucuugugacauuuuuaccaauaguagagggaagagagccuccaaagggaguaagaccugcggcuuuguagaugagagaggccuauauaagucacuaaaaggagcaugcaaacucaaguuauguggaguucuuggacuuagacuuauggauggaacauggguugcgaugcaaacaucagaugagaccaaauggugcucuccugaucaguuggugaaucugcacgacuuucgcucggaugagauugagcaucuuguuguagaggaguuggucaagaagagagaggagugucuggauacacuagaguccaucaugaccaccaagucagugaguuucagacgccucagucauuugagaaaacuugucccuggguuuggaaaagcauauaccauauucaacaagaccuugauggaggcugaugcucacuacaagucaguccggacauggaaugagaucauccccucaaaaggguguuuaagaguuggagggaggugucaucaucaugugaacgggguguuuuucaaugguauaauauuagggccugacggccauguucuaaucccagagaugcaaucaucccuccuccagcaacauauggaguuguuggaauccucagucauuccccugaugcacccccuggcagacccguccacaguuuucaaggacggugaugaggcugaggauuuuguugaaguucaccuucccgaugugcacaaacaggucucagggguugaucugggccucccaaacugggguaaguauguauuauugagugcaggggcccugguugccuugauguugauaaucuucuuaaugacauguuguaggagagucaaucgaccagagucuacgcagcgcaguuucggagggacagagaggaaggugucgaucacuccccaaagcgggaaggucauaucuucaugggagucauauaagagugggagcgagacuagacuguga

SEQ ID NO: 63811 - RNA, 1575 nt, Artificial Sequence
  derived and/or modified CDS sequence (wt) from glycoprotein__RABV__KU739049.1
augguuccucaggcgcuuuuguugguaccccuucuggguuuuucauuguguuucgggaaauucccuauuuacacgauaccagacaaacuugguccuuggagcccgauugauauacaucaucucagcugcccaaacaauuugguuguagaggacgaaggaugcaccaaccugucaggguucuccuacauggagcucaaaguuggauacaucucauccauaaaagugaacggguuuacuugcacgggcguugugacagaggcagaaaccuacacuaacuuuguugguuaugucaccaccacguucagaagaaagcauuuccguccaacaccagaugcauguagagccgcauacaacuggaagauggcaggugacccucgauaugaggagucucuacacaacccguacccugacuaccauuggcuucgaacugugaaaaccaccaaggagucucucguuaucauauccccaaguguggcagauuuggacccauaugacaaaucccuucacucgagggucuucccuaguggaaagugcucaggaauaacggugucuucuaccuacugcucaacuaaccacgauuacaccauuuggaugcccgaaaaucugagacugggaacgucuugugacauuuuuaccaauaguagagggaagagggcauccaaggggaguaagacuugcggcuuuguagaugagagaggcuuguauaagucgcuaaaaggagcaugcaaacucaaguuauguggaguucuuggacuucgacuuauggauggaacauggguugcgaugcaaacaucagaugagaccaaauggugccccccugaucaguuggugaauuugcacgacuuucgcucggaugaaauugagcaucuuguuguagaggaguuagucaagaaaagagaggagugucuggaugcacuagaguccaucaugaccaccaagucagugaguuucagacgucucagucauuuaagaaagcuuguuccuggguuuggaaaagcauauacaauauucaauaagaccuugauggaggcugaugcucacuacaagucgguccggaccuggaaugaggucauccccucaagaggguguuuaagaguuggggggaggugucauccucaugugaacgggguguuuuucaaugguauaauauuagggccugacggccauguucuaaucccagagaugcaaucaucccuccuccagcaacacauagaguuguuggaauccucgguuauuccccugacgcacccccuggcagacccauccacaguuuucaaagacggugaugaagcugaggauuuuguugaaguucaucuucccgaugugcauaaacaggucucugggguugaccugggccucccaaacugggggaaguauguauuacugagugcaggggcccugauugccuugauguugauaauuuuccuaauaacauguugcagaagagucaaucgaccagaaucuacgcagcgcagucucagaggggcagggaggaaggugucgaucacuucccagagcgggaagguuauaucuucaugggagucauauaagagugggggugagacuagacuguga

SEQ ID NO: 63812 - RNA, 1575 nt, Artificial Sequence
  derived and/or modified CDS sequence (wt) from glycoprotein__RABV__KU739050.1
auggucccucaagcucuuuuguuuguaccccuucuggucuuuucauuguguuucggaaaauucccuauuuacacgauaccagacaaacuuggucccuggagcccgauagauauacaucaucucaguugcccaaauaauuugguuguggaggacgaaggaugcaccaaccugucaggguucuccuacauggagcugaaaguuggauacaucucagccaucaaggugaacggguucacuugcacaggcguugugacagaggcagaaaccuacacuaacuuuguugguuaugucaccaccacguucagaagaaagcacuuccgcccaacaccagaugcauguagagccgcguacaacuggaagauggccggugauccaagauaugaagagucccuacacaauccguacccugacuaccauuggcuucgaacuguaaaaaccaccaaggagucucucguuaucauauccccgaguguggcagauuuggacccauacgacaaaucccuucacucgagggucuucccuagcggaaaaugcucaggaauaacggugucuucuacuuacugcucaacuaaccacgauuacaccauuuggaugccugagaauccgagacuagggacaucuugugacauuuuuaccaauagcagagggaagagagcauccaaagggaguaagaccugcggcuuuguagaugaaagaggccuguauaagucucuaaaaggagcaugcaaacucaaguuauguggaguucuuggacuuagacuuauggacggaacaugggucgcgaugcaaacaacagaugagacuaaaugguguccucccgaucaguuggugaaucugcaugacuuucgcucggaugaaauugagcaucuuguuguagaggaguuggucaagaaaagagaggagugucuggaugcacuagaauccaucaugaccaccaagucagugagcuucagacgucucagucauuugagaaaacuugucccuggguucggaaaagccuauaccauauucaacaagaccuugauggaggcugaugcucacuacaagucaguccggacuuggaaugagaucauccccucaaaaggguguuuaagaguuggagggaggugucauccucaugugaacgggguguuuuucaacgguauaauauuagggccugacggccauguucuaaucccagagaugcaaucaucucuccuccagcaacauauggaguuauuggaauccuccguuauuccccugaugcacccccuugcagacccguccacaguuuucaaggacggugaugaggccgaggacuuuguagaaguucaccuucccgaugugcacaaacaggucucagggguugaccugggucucccgaacugggggaaguauguauuacugagugcaggaacccugauugccuugauguuaauaauuuuccuaaugacauguuguaggagagucaaucgaccggaaucuaugcaacgcagccucggagagacagggaggaaggugucggucaccucccaaagcgggaaggucauaucuucaugggagucauauaaaagugggggugagacuagacuguga

SEQ ID NO: 63813 - RNA, 1575 nt, Artificial Sequence
  derived and/or modified CDS sequence (wt) from glycoprotein__RABV__KU888637.1
augguuccucaggcucucuuguuuguaccccuucugguuuuuucauuguguuuugggaaauucccuauuuacacgauaccagacaaacucgguccuuggagcccaauugacauacaucaucugagcugcccaaacaaucugguuguggaggacgaaggaugcaccaaccugucaggauucuccuacauggaacuuaaaguuggauacaucucagccauaaaagugaacggguucacuugcacgggcguugugacagaggcagaaacuuacacuaacuuuguugguuaugucaccacuacguucaaaagaaagcauuuccgcccaacaccagaugcauguagagcugcguacaacuggaagauggccggugaccccagauaugaggagucucuacacaacccguacccugacuaccauuggcuucgaacuguaaaaaccaccaaggagucccucguuauuauauccccaaguguggcagauuuggacccauaugacaaaucccuucacucgagggucuucccuagcggaaagugcucaggaauaacggugucuucuaccuacugcucaacuaaccacgauuacaccauuuggaugcccgagaauccgagacuagggacaucuugugacauuuuugcuaauaguagagggaagagagcauccaaagggaguaagaccugcggcuuuguagaugagagaggccuguauaagucucuaaagggagcaugcaaacucaaguuauguggaguucuuggacuuagacuuauggauggaacaugggucgcgaugcagacaucggaugagaccaaauggugcccuccugaccaguuggugaaucuucacgacuuucgcucggaugagauugagcaucuuguuguagaggaguuggucaagaaaagagaagagugucuggaugcacuggaguccaucaugaccaccaagucagugaguuucaggcgucucagucauuuaagaaaacuuguuccuggguuuggaaaagcauauaccauauucaacaagaccuugauggaggcugaugcucacuacaagucaguccggacuuggaaugagaucauacccucaaaaggguguuuaagaguuggagggaggugucauccucaugugaacgggguguucuucaacgguauaauauuagggccugacggccauguucuaaucccagagaugcaaucaucccuccuccagcaacauauggaguuguuggaauccucgguuauuccccugaugcacccccuggcagacccauccacaguauucaaggacggugaugaggcugaggauuuuguugaaguucaccuucccgaugugcacaaacaggucucagggguugaccugggccucccaggcugggguaaguauguauugcuaagugcaggggcccugauugccuugauguugauaauuuuccuaaugacguguuguagaagagucaaucgaccagaaucuacgcagcgcagucucggagggacagggaggaaggugucgaucacuucccaaagugggaaggucauaucuucaugggagucauacaagagugggggugagacuagacuguga

SEQ ID NO: 63814 - RNA, 1575 nt, Artificial Sequence
  derived and/or modified CDS sequence (wt) from glycoprotein__RABV__KU888639.1
augguuccucaggcucuuuuguuugugccccuucuggcuuuuccaauguguuucgggaaauuccccaucuacacaauaccagacaaacuuggucccuggagcccgauugacauacaucaucucagcugcccaaauaacuugguuguggaagacgaaggaugcaccaacuugucuggguucuccuacauggaacuuaaagugggauacauuucagccauaaaagugaacggguucacgugcacagguguggugacagaggcugagacuuacacuaacuuugucgguuaugucaccacuacguucaagagaaagcauuuccgcccaacaccagaugcaugucgugcugcuuacaacuggaaaauggccggugaccccagauaugaagaaucucuucauaauccguacccugacuaccauuggcuucgaaccguaaaaaccacgaaggagucccucaucaucauauccccuaguguagcggaccuagacccauaugacaaaucccuucauucgagggucuuuccuagcgggaagugcuugggaauaacaauaucaucuaccuacugcucgacuaaccaugauuacaccaucuggaugcccgagaaucugagauuagggacaucuugugacaucuuuaccaauaguagagggaagagagcauccaaagggagcaagacuugcggauuuguugacgaaagaggcuuguauaagucuuugaagggggcaugcaagcucaaauuaugugggguucugggacuuagacuuauggacggaacgugggucgcgaugcaaacaucggaugaaaccaaguggugucccccggaucaguuggugaaucuacacgacuuucgcucggacgaaaucgaacaucuugucguggaggaguuggucaagaaaagagaggaguguuuggaugcccuggaguccaucaugacuaccaagucggugaguuuuagacgucucagccacuugagaaaacuugucccuggguucggaaaagcauacacaauauucaacaaaacucugauggaagcugaugcucacuacaagucaguccggaccuggaaugagaucauccccucaaagggguguuugagaguuggagggaggugucauccccauguaaacggaguguuuuuuaacggcauaauacuaggcccugacggccauguucugaucccagagaugcaaucaucccuccuucagcagcauauggaguuguuggaaucaucaguuaucccucugaugcauccuuuagcagacccgucuacagucuucaaggacggugaugaagcagaggauuuuguugagguucaccuucccgaugugcacaaacaaaucucagggguugaccugggucucccuaacuggggaaaguaugucuuaauaauugcagggguccugauugccaugauauugacaaucuucuugaugacauguuguggaagagguaaucgacccaaguccacacaacacagucuuggagggauaggaaggaaggugucagccacuucccaaagcgggaaggucauaucuucgugggagucauauaaaagcgggggugagaccagacuguaa

SEQ ID NO: 63815 - RNA, 1575 nt, Artificial Sequence
  derived and/or modified CDS sequence (wt) from glycoprotein__RABV__KU888640.1
augguuccucaggcucuuuuguucguaccccuucuggguuuuucauuguguuuugggaaguucccuauuuacacgauaccagacaagcucgguccuuggagcccgauugacauacaucaucugagcugcccaaacaaucugguuguggaggacgaaggaugcaccaaccugucaggauucuccuacauggaacuuaaaguuggauacaucucagccauaaaagugaacggguucacuugcacgggcguugugacagaggcagaaaccuacacuaacuuuguugguuaugucaccaccacguucaaaagaaagcauuuccguccaacgccagaugcauguagagcugcguacaacuggaagauggccggugaccccagauaugaggagucucuacauaauccguacccugacuaccauuggcuucgaacuguaaaaacaaccaaagagucucucguuaucauauccccaaguguggcagauuuggacccauaugacaaaucccuucacucgagggucuuccccagcggaaagugcucaggaauaacagugucuucuaccuacugcccaacuaaccacgauuacaccauuuggaugcccgagaauccuagacuagggacaucuugugacaucuuuaccaguaguaaagggaagagagcauccaaagggaguaagaccugcggcuuuguagaugagagaggccuguauaagucucugaaaggagcauguaaacucaaguuauguggaguucuuggacucagacuuauggauggaacaugggucgcgaugcaaacaucggaugagaccaaauggugcccuccugaccaguuggugaaucuucacgacuuucgcucggaugaaauugagcaucucguuguagaggaauuggucaagaaaagagaggagugucuggaugcacucgaguccaucaugaccaccaagucggugaguuucagacgucucagucauuuaagaaaacuuguuccuggguuuggaaaagcauauacuauauucaacaagaccuugauggaggcugaugcucacuacaagucaguccggacuuggaaugagaucauccccucaaaaggguguuuaagaauuggagggaggugucauccucaugugaacgggguguuuuucaacgguauaauauuagggccugauggccauguucuaaucccagagaugcaaucaucccuccuccagcaacauauggaguuguuggaauccucaguuauuccccugaugcaccccuuggcagacccguccacaguacucaaggacggugaugaggcugaggauuuuguugaaguucaccuucccgaugugcacaaacagaucucagggguugaccugggccucccaaacugggguaaguauguauugcuaagugcaggggcccugauugccuugauguugauaauuuuccuaaugacauguuguaggagagucaaucgacaagagucuacacagcgcagucucggagggacagggaggaaggugucgaucacuucccaaagcgggaaggucauaucuucaugggagucuuauaaaagugggggugagacuagacuguga

SEQ ID NO: 63816 - RNA, 1575 nt, Artificial Sequence
  derived and/or modified CDS sequence (wt) from glycoprotein__RABV__KU888641.1
augguuccucaggcucuuuugguuauaccccuucuggguuuuucauuguguuucgggaaauucccuauuuacacgauaccagacaaacuuggucccuggagcccgauugacauacaucaucucagcuguccaaacaaucuuauuguggaggacgaaggaugcaccaaccugucaggguuuuccuacauggaacuuaagguuggauacaucucagccauaaaagugaauggguucacuugcacaggagucgugacagaggcagagacauacaccaacuuuguugguuaugucacaaccacguucaaaagaaagcacuuccgcccaacaccagaugaauguagagccgcauacaacuggaagauggccggugaccccagauaugaagagucucuacacaauccauacccugacuaccauuggcuucgaacugugaaaaccaccaaagagucucuuguuaucauaucuccaaguguggcagauuuggacccauaugacaaaucccuucacucgagggucuucccuagcggaaaaugcucaggaauaacagugucuucuaccuacuguucaacuaaccaugauuacaccauuuggaugcccgagaauccgagauuagggacgucuugugacauuuuuaccaauagcagagggaagagagcauccaaagggaguaagacuugcggcuuuguagacgaaaggggccuguacaagucucuaaaaggagcaugcaaacucaaauuauguggaguucuaggacuuaaacuuauggaugggacaugggucgcgaugcaagcaucagaugagaccaaauggugcccucccgaucaguuggugaaucugcaugaccuucgcucggaugaaauugagcaccucguuguagaagaguuggucaagaaaagagaggagugucuggaugcacuagaguccaucaugaccaccaagucagugaguuucagacgucucagucauuuaagaaaacuugucccuggguucggaaaagcauauaccauauucaacaagaccuugauggaggcagaugcucacuacaagucaguucggaccuggaaugagaucaucccuucaaaaggguguuuaaaagugggggggaggugucauccucaugugaacggaguguuuuucaacggugucauauuagggccggacggccauguucugauccccgagaugcaaucaucccuccuccagcaacauauggaguuguuggaauccucaguuaucccuuugaugcacccccuggcagacccgucuacaguuuucaaggacggugaggaggccgaggauuucguugaaguucaccugcccgaugugcacaaacaggucucagggguugaccugggucucccgaacugggggaaguauguaucacugggugcaggggccuugauugccuugauguugacaauucuccuaauaacauguuguagaaggguuaauagaccagaaccuacgcgacgcagucucgaagggaaagagaggaaaguaucggucaccucucaaagcgggaaggucauaucuucaugggagucauauaaaagugggggugagaccagacuguga

SEQ ID NO: 63817 - RNA, 1575 nt, Artificial Sequence
  derived and/or modified CDS sequence (wt) from glycoprotein__RABV__KU888642.1
augguuccucaggcucuuuuguucguaccccuucuggguuuuucauuguguuuugggaaguucccuauuuacacgauaccagacaagcucgguccuuggagcccgauugacauacaucaucugagcugcccaaacaaucugguuguggaggacgaaggaugcaccaaccugucaggauucuccuacauggaacuuaaaguuggauacaucucagccauaaaagugaacggguucacuugcacgggcguugugacagaggcagaaaccuacacuaacuuuguugguuaugucaccaccacguucaaaagaaagcauuuccguccaacgccagaugcaugcagagcugcguacaacuggaagauggccggugaccccagauaugaggagucucuacauaauccguacccugacuaccauuggcuucgaacuguaaaaacaaccaaagagucucucguuaucauauccccaaguguggcagauuuggacccauaugacaaaucccuucacucgagggucuuccccagcggaaagugcucaggaauaacagugucuucuaccuacugcucaacuaaccacgauuacaccauuuggaugcccgagaauccuagacuagggacaucuugugacaucuuuaccaauaguaaagggaagagagcauccaaagggaguaagaccugcggcuuuguagaugagagaggccuguauaagucucugaaaggagcauguaaacucaaguuauguggaguucuuggacucagacuuauggauggaacaugggucgcgaugcaaacaucggaugagaccaaauggugcccuccugaccaguuggugaaucuucacgacuuucgcucggaugaaauugagcaucucguuguagaggaauuggucaagaaaagagaggagugucuggaugcacucgaguccaucaugaccaccaagucggugaguuucagacgucucagucauuuaagaaaacuuguuccuggguuuggaaaagcauauacuauauucaacaagaccuugauggaggcugaugcucacuacaagucaguccggacuuggaaugagaucauccccucaaaaggguguuuaagaguuggagggaggugucauccucaugugaacgggguguuuuucaacgguauaauauuagggccugauggccauguucuaaucccagagaugcaaucaucccuccuccagcaacauauggaguuguuggaguccucaguuauuccccugaugcaccccuuggcagacccguccacaguacucaaggacagugaugaggcugaggauuuuguugaaguucaccuucccgaugugcacaaacagaucucagggguugaccugggccucccaaacugggguaaguauguauugcuaagugcaggggcccugauugccuugauguugauaauuuuccuaaugacauguuguaggagagucaaucgacaagagucuacacagcgcagucucggagggacagggaggaaggugucgaucacuucccaaagcgggaaggucauaucuucaugggagucuuacaaaagugggggugagacuagacuguga

SEQ ID NO: 63818 - RNA, 1575 nt, Artificial Sequence
  derived and/or modified CDS sequence (wt) from glycoprotein__RABV__KU888643.1
augauuccucaaguucuuuuguuuguuccccuucuaguuuucucgucguguuuugggaaauuccccauuuacacgauaccagacaaacuugguccauggagucccaucgauauacaucaccucagcuguccgaacaaucugguuguggaagaugaaggaugcaccaaucugucuggauuuuccuacauggaacucaaagugggauauauuucagccauaaaagugaacggauucaccuguacagguguggugaccgaagcagaaaccuacacuaacuuuguugguuaugucaccaccacauuuaagagaaagcacuuucgcccuaugccggaugcgugcagagccgcauacaacuggaagauggcuggugaccccagguaugaagagucucugcacaauccguaccccgacuaccacuggcuccgaacugucaagaccaccaaggagucccuugucaucauaucuccgagcguugcagauuuggacccguacgauaaaucccuucacucgagaguuuuuccuggcggaaaaugcucaggaauaaccguguccuccacuugcugcucuacuaaccacgacuacaccaucuggaugccugaaaauccuagacugggaacuucaugugacauuuucaccaauaguagagggaagagggcaucaaaagggggcaagaccuguggauuuguggaugaaagaggcuuguacaagucucuaaagggagcaugcaagcugaagcuaugugggguucuaggacuuagacuuauggacggaacaugggucgcaauucagacaucagaugagaucaaauggugcucuccugaucagcuaguaaaucuacacgacuuucacucggaugagauugaacaucuuguuguggaggaguuggucaaaaagagggaagagugucuggacgcacuggagacuauuaugaccacaaaguccgugaguuucagacgucuuagucauuugaggaagcuagucccuggguuuggaaaggcguauaccauauucaacaaaaccuugauggaggcugaugcucacuacaaaucaauccggacuuggaaugaaaucauccccuccaaaggguguuuaagaguuggggggagaugucauccucaugugaacgggguguucuucaacggcauuauacuggguccugacggacauguucuaaucccagagaugcagucgucccuccuccaccagcauauggaauuguuggaguccucagucaucccuuugaugcaucccuuagcagacccgucaacagucuuuaaagacggcgacgaggcagaggacuuuguugagguucaccuuccggaugugcacaagcagaucucggggguugaucuuggucucccaaacugggggaaguaugugcugauaagugcaggugcucugacugcauuaauguugacgauuuucuuaaugacguguugcagaaagacuaauagagcagagucaauacaacacaguccuggagagacagggaggaaagugucggugacuucucacaacggaagggucauaucuucaugggaaucauauaaaagcggaagugagaccaagcuguga

SEQ ID NO: 63819 - RNA, 1575 nt, Artificial Sequence
  derived and/or modified CDS sequence (wt) from glycoprotein__RABV__KU946961.1
augauuccucaagcucuguuguuuguaccucuucugguuuuuccauuguguuucgggaaauuccccauuuacacgauaccagacaaacucggccccuggagucccaucgauauacaucaccucagcuguccgaacaaucugguuguggaggacgaaggauguaccaaucugucaggauucucauacauggagcuuaaaguaggauauauuucggccauaaaggugaacggguucacuuguacgggugugguaacggaagcagaaaccuacacuaacuuugucgguuaugucaccaccacguuuaagagaaagcacuuccgaccaacaccggaugcaugcagaucagcauacaauuggaagauggcaggugaccccagauaugaagagucucugcacaaucccuauccugauuaucauuggcuccggacuguaaaaaccaccaaagagucuguuguuaucauaucuccaaguguggcagacuuagacccguacgauaaaucacuucauucgagaguuuuuccuagaggaaaaugcucaggaauaacggugucuucugccuacugcucuaccaaccaugauuauaccaucuggaugccugaaaauccuagacuggggaccucuugugauauuuucaccaacagcagagggaagagagcauccaaagggagcaagaccuguggauuuguggaugagagaggcuuguacaaaucucuaaaaggagcaugcaaacugaagcuguguggaguucuuggacuuaggcuuauggacggaaccugggucgcgauucagacaucaaacgagaccaaguggugcccuccugaucaacucgugaaucuacaugacuuucauucagaugagauugaacaucuuguuguggaggaggugguuaagaagagggaggagugucuagaugcacuggaguccaucaugaccaccaaguccgugaguuucagacgucucagucacuugaggaagcuugugccuggauuuggaaaagcauacaccauauucaacaagaccuuaauggaggcugaugcucacuacaaaucgguccaaacuugggaugagaucauccccucgaaaggguguuuaagagucggggggagaugucauccucaugugaacggaguauuuuucaaugguaucauccuaggcccugacggccaugucuuaaucccggaaaugcagucaucccuccuccagcagcauauggaguuguugaaauccucggucauccccuuaaugcaucccuuggcagauccaucaacgguuuuuaaagauggugacgagguggaggauuuuguugagguucaccuuccagaugugcauaagcaggucucagggguugaucucggucucccaaacugggggaaggauguguugaugggcgcaggcguuuugacagcacugauguugaugauuuuccuaaugacguguugccgaaggacuaauagagcagaaucaauacaacacagucuuggagagacagggaggaaagugucggugaccucccaaagcgggagggucauaucuucaugggagucauauaaaagcggaggugagaccaagcuguaa

SEQ ID NO: 63820 - RNA, 1575 nt, Artificial Sequence
  derived and/or modified CDS sequence (wt) from glycoprotein__RABV__KX036361.1
augguuccucaagcucuuuuguuugugccccuucuggcuuuuccaauguguuucgggaaauuccccaucuacacaauaccagacaaacuuggucccuggagcccgauugacauacaucaucucagcuguccaaauaacuugguuguggaagacgaaggaugcaccaacuugucggguuucuccuacauggaacuuaaggugggauacauuucggccauaaaagugaacggguucacgugcacagguguggugacagaggcugagacuuacacuaacuuugucgguuauguuaccaccacguucaagagaaagcauuuccgcccaacaccagaugcauguagagcugcuuacaacuggaaaauggccggugaucccagauaugaagaaucucuucauaauccguacccugacuaccauuggcuucgaaccgugaaaaccacgaaggagucucucaucaucauauccccaaguguagcagaccuagacccauaugacaaaucccuucacucgagggucuuuccuagcgggaagugcuugggaauaacaauaucaucuaccuacugcucgacuaaccaugauuacaccaucuggaugcccgagaaugugagauuaggaacaucuugugacaucuuuaccaacaguagagggaagagagcauccaaagggagcaagacuugcggauuuguugacgaaagaggcuuguauaagucuuugaagggggcaugcaagcucaaauuauguggaguucugggacuuagacuuauggacggaacgugggucgcgaugccaacaucggaugagaccaaguggugucccccugaucaguugguaaaucuacacgacuuucgcucggacgagaucgaacaucuugucguggaggaguuggucaggaaaagagaggagugucuggaugcccuagaguccaucaugacuaccaagucggugaguuuuagacgucucagccacuugagaaaacuugucccuggauucggaaaagcauacaccauauucaacaaaacccugauggaagccgaugcucacuacaagucaguccggaccuggaaugagaucauccccuccaaggggugucugagaguuggagggaggugucauccucauguaaacggaguguuuuuuaacggcauaauacugggcccugacggccauguucugaucccagagaugcaaucaucccuccuucagcaacauauggaguuguuggaaucaucaguuaucccucugaugcauccuuuagcagacccgucuacaguuuucaaggacggugaugaagcagaggauuuuguugagguucaccuucccgaugugcacaaacagaucucagggguugaccugggucucccuaacuggggaaaguaugucuuaauaauugcagggguauugauugccaugauauugacaaucuucuuaaugacauguuguggaagagguaaucgacccaaguccacacaacacagucuuggagggauagggaggaaggugucauccacuucccaaagcgggaaggucauaucuucgugggagucauauaaaagcgggggugagaccagacuguga

SEQ ID NO: 63821 - RNA, 1575 nt, Artificial Sequence
  derived and/or modified CDS sequence (wt) from glycoprotein__RABV__KX036363.1
augguuccucaagcucuuuuguuugugccccuucuggcuuuuccaauguguuucgggaaauuccccaucuacacaauaccagacaaacuuggucccuggagcccgauugacauacaucaucucagcuguccaaauaacuugguuguggaagacgaaggaugcaccaacuugucagguuucuccuacauggaacuuaaggugggauacauuucggccauaaaagugaacggguucacgugcacagguguggugacagaggcugagacuuacacuaacuuugucgguuauguuaccaccacguucaagagaaagcauuuccgcccaacaccagaugcauguagagccgcuuacaacuggaaaauggccggugaucccagauaugaagaaucucuucauaauccguacccugacuaccauuggcuucgaaccgugaaaaccacgaaggagucucucaucaucauauccccaaguguagcagaccuagacccauaugacaaaucccuucacucgagagucuuuccuagcgggaagugcuugggaauaacaauaucaucuaccuacugcucgacuaaccaugauuacaccaucuggaugcccgagaaugugagauuagggacaucuugugacaucuuuaccaacaguagagggaagagagcauccaaagggagcaagacuugcggauuuguugacgaaagaggcuuguauaagucuuugaagggggcaugcaagcucaaauuaugugggguucugggacuuagacuuauggacggaacgugggucgcgaugccaacaucggaugagaccaaguggugucccccugaucaguugguaaaucuacacgacuuucgcucggacgagaucgaacaucuugucguggaggaguuggucaggaaaagagaggaaugucuggaugcccuagaguccaucaugacuaccaagucggugaguuuuagacgucucagccacuugagaaaacuugucccuggauucggaaaagcauacaccauauucaacaaaacccugauggaagccgaugcucacuacaagucaguccggaccuggaaugagaucauccccuccaaggggugucugagaguuggagggaggugucauccucauguaaacggaguguuuuucaacggcauaauacugggcccugacgggcauguucugaucccagagaugcaaucaucccuccuucagcaacauauggaguuguuggaaucaucaguuauuccucugaugcauccuuuagcagacccgucuacaguuuucaaggacggugaugaagcagaggauuuuguugagguucaccuucccgaugugcacaaacagaucucagggguugaccugggucucccuaacuggggaaaguaugucuuaauaauugcagggguauugauugccaugauauugacaaucuucuuaaugacauguuguggaagagguaaucgacccaaguccaaacaacacagucuuggagggauagggaggaaggugucauccacuucccaaagcgggaaggucauaucuucgugggagucauauaaaagcgggggugagaccagacuguga

SEQ ID NO: 63822 - RNA, 1575 nt, Artificial Sequence
  derived and/or modified CDS sequence (wt) from glycoprotein__RABV__KX036364.1
augguuccucaagcucuuuuguuugugccccuucuggcuuuuccaauguguuucgggaaauuccccaucuacacaauaccagacaaacuuggucccuggagcccgauugacauacaucaucucagcuguccaaauaacuugguuguggaagacgaaggaugcacuaacuugucagguuucuccuacauggaacuuaaggugggauacauuucggccauaaaagugaacggguucacgugcacagguguggugacagaggcugagacuuacacuaacuuugucgguuauguuaccaccacguucaagagaaagcauuuccgcccaacaccagaugcauguagagcugcuuacaacuggaaaauggccggugaucccagauaugaagaaucucuucauaauccguacccugacuaccauuggcuucgaaccgugaaaaccacgaaggagucucucaucaucauauccccaaguguagcagaccuggacccauaugacaaaucccuucacucgagagucuuuccuagcgggaagugcuugggaauaacaauaucaucuaccuacugcucgacuaaccaugauuacaccaucuggaugcccgagaaugugagauuagggacaucuugugacaucuuuaccaacaguagagggaagagagcauccaaagggagcaagacuugcggauuuguugaugaaagaggcuuguauaagucuuugaagggggcaugcaagcucaaauuauguggaguucugggacuuagacuuauggacggaacgugggucgcgaugccaacaucggaugagaccaaguggugucccccugaucaguugguaaaucuacacgacuuucgcucggacgagaucgaacaucuugucguggaggaguuggucaggaaaagagaggaaugucuggaugcccuagaguccaucaugacuaccaagucggugaguuuuagacgucucagccacuugagaaaacuugucccuggauucggaaaagcauacaccauauucaacaaaacccugauggaagccgaugcucacuacaagucaguccggaccuggaaugagaucauccccuccaaggggugucugagaguuggagggaggugucauccucauguaaacggaguguuuuucaacggcauaauacugggcccugacgggcauguucugaucccagagaugcaaucaucccuccuucagcaacauauggaguuguuggaaucaucaguuaucccucugaugcauccuuuagcagacccgucuacaguuuucaaggacggugaugaagcagaggauuuuguugagguucaccuucccgaugugcacaaacagaucucagggguugaccugggucucccuaacuggggaaaguaugucuuaauaauugcagggguauugauugccaugauauugacaaucuucuuaaugacauguuguggaagagguaaucgacccaaguccaaacaacacagucuuggagggauagggaggaaggugucauccacuucccaaagcgggaaggucauaucuucgugggagucauauaaaagcgggggugagaccagacuguga

SEQ ID NO: 63823 - RNA, 1575 nt, Artificial Sequence
  derived and/or modified CDS sequence (wt) from glycoprotein__RABV__KX036365.1
augguuccucaagcucuuuuguuugugccccuucuggcuuuuccaauguguuucgggaaauuccccaucuacacaauaccagacaaacuuggucccuggagcccgauugacauacaucaucucagcuguccaaauaacuugguuguggaagacgaaggaugcacuaacuugucagguuucuccuacauggaacuuaaggugggauacauuucggccauaaaagugaacggguucacgugcacagguguggugacagaagcugagacuuacacuaacuuugucgguuauguuaccaccacguucaagagaaagcauuuccgcccaacaccagaugcauguagagcugcuuacaacuggaaaauggccggugaucccagauaugaagaaucucuucauaauccguacccugacuaccauuggcuucgaaccgugaaaaccacgaaggagucucucaucaucauauccccaaguguagcagaccuagacccauaugacaaaucccuucacucgagagucuuuccuagcgggaagugcuugggaauaacaauaucaucuaccuacugcucgacuaaccaugauuacaccaucuggaugcccgagaaugugagauuagggacaucuugugacaucuuuaccaacaguagagggaagagagcauccaaagggagcaagacuugcggauuuguugacgaaagaggcuuguauaagucuuugaagggggcaugcaagcucaaauuauguggaguucugggacuuagacuuauggacggaacgugggucgcgaugccaacaucggaugagaccaaguggugucccccugaucaguugguaaaucuacacgacuuucgcucggacgagaucgaacaucuugucguggaggaguuggucaggaaaagagaggaaugucuggaugcccuagaguccaucaugacuaccaagucggugaguuuuagacgucucagccacuugagaaaacuugucccuggauucggaaaagcauacaccauauucaacaaaacccugauggaagccgaugcucacuacaagucaguccggaccuggaaugagaucauccccuccaaggggugucugagaguuggagggaggugucauccucauguaaacggaguguuuuucaacggcauaauacugggcccugacgggcauguucugaucccagagaugcaaucaucccuccuucagcaacauauggaguuguuggaaucaucaguuaucccucugaugcauccuuuagcagacccgucuacaguuuucaaggacggugaugaagcagaggauuuuguugagguucaccuucccgaugugcacaaacagaucucagggguugaccugggucucccuaacuggggaaaguaugucuuaauaauugcagggguauugauugccaugauauugacaaucuucuuaaugacauguuguggaagagguaaucgacccaaguccaaacaacacagucuuggagggauagggaggaaggugucauccacuucccaaagcgggaaggucauaucuucgugggagucauauaaaagcgggggugagaccagacuguga

SEQ ID NO: 63824 - RNA, 1575 nt, Artificial Sequence
  derived and/or modified CDS sequence (wt) from glycoprotein__RABV__KX036366.1
augguuccucaagcucuuuuguuugugccccuuauggccuucccaauguguuucgggaaauuccccaucuacacaauaccagacaaacuuggucccuggagcccgauugacauacaucaucucagcuguccaaauaacuugguuguggaagacgaaggaugcaccaacuugucggguuucuccuacauggaacuuaaggugggauacauuucggccauaaaagugaacggguucacgugcacagguguggugacagaggcugagacuuacacuaacuuugucgguuauguuaccaccacguucaagagaaagcauuuccgcccaacaccagaugcauguagagcugcuuacaacuggaaaauggccggugaucccagauaugaagaaucucuucauaauccguacccugacuaccauuggcuucgaaccgugaaaaccacgaaggagucucucaucaucauauccccuaguguagcagaccuagacccauaugacaaaucccuucacucgagggucuuuccuagcgggaagugcuugggaauaacaauaucaucuaccuacugcucgacuaaccaugauuacaccaucuggaugcccgauaaugugagauuagggacaucuugugacaucuuuaccaacaguagagggaagagagcauccaaagggagcaagacuugcggauuuguugacgaaagaggcuuguauaagucuuugaagggggcaugcaagcucaaauuauguggaguucugggacuuagacuuauggacggaacgugggucgcgaugccaacaucggaugagaccaaguggugucccccugaucaguugguaaaucuacacgacuuucgcuuggacgagaucgaacaucuugucguggaggaguuggucaggaaaagagaggagugucuggaugcccuagaguccaucgugacuaccaagucggugaguuuuagacgucucagccacuugagaaaacuugucccuggauucggaaaagcauacaccauauucaacaaaacccugauggaagccgaugcucacuacaagucaguccggaccuggaaugagaucauccccuccaaggggugucugagaguuggagggaggugucauccccauguaaacggaguguuuuuuaacggcauaauacugggcccugacggccauguucuaaucccagagaugcaaucaucccuccuucagcaacauauggaguuguuggaaucaucaguuaucccucugaugcauccuuuagcagauccgucuacaguuuucaaggacggugaugaagcagaggauuuuguugagguucaccuucccgaugugcacaaacagaucucagggguugaccugggucucccuaacuggggaaaguaugucuuaauaauugcagggguauugauugccaugauauugacaaucuucuuaaugacauguuguggaagagguaaucgacccaaguccacacaacacagucuuggagggauagggaggaaggugucauccacuucccaaagcgggaaggucauaucuucgugggagucauauaaaagcgggggugagaccagacuguga

SEQ ID NO: 63825 - RNA, 1575 nt, Artificial Sequence
  derived and/or modified CDS sequence (wt) from glycoprotein__RABV__KX036367.1
augguuccucaagcucuuuuguuugugccccuucuggcuuuuccaauguguuucgggaaauuccccaucuacacaauaccagacaaacuuggucccuggagcccgauugacauacaucaucucagcuguccaaauaacuugguuguggaagacgaaggaugcacuaacuugucagguuucuccuacauggaacuuaaggugggauacauuucggccauaaaagugaacggguucacgugcacagguguggugacagaggcugagacuuacacuaacuuugucgguuauguuaccaccacguucaagagaaagcauuuccgcccaacaccagaugcauguagagcugcuuacaacuggaaaauggccggugaucccagauaugaagaaucucuucauaauccguacccugacuaccauuggcuucgaaccgugaaaaccacgaaggagucucucaucaucauauccccaaguguagcagaccuagacccauaugacaaaucccuucacucgagagucuuuccuagcgggaagugcuugggaauaacaauaucaucuaccuacugcucgacuaaccaugauuacaccaucuggaugcccgagaaugugagauuagggacaucuugugacaucuuuaccaacaguagagggaagagagcauccaaagggagcaagacuugcggauuuguugacgaaagaggcuuguauaagucuuugaagggggcaugcaagcucaaauuauguggaguucugggacuuagacuuauggacggaacgugggucgcgaugccaacaucggaugagaccaaguggugucccccugaucaguugguaaaucuacacgacuuucgcucggacgagaucgaacaucuugucguggaggaguuggucaggaaaagagaggaaugucuggaugcccuagaguccaucaugacuaccaagucggugaguuuuagacgucucagccacuugagaaaacuugucccuggauucggaaaagcauacaccauauucaacaaaacccugauggaagccgaugcucacuacaagucaguccggaccuggaaugagaucauccccuccaaggggugucugagaguuggagggaggugucauccucauguaaacggaguguuuuucaacgguauaauacugggcccugacgggcauguucugaucccagagaugcaaucaucccuccuucagcaacauauggaguuguuggaaucaucaguuaucccucugaugcauccuuuagcagacccgucuacaguuuucaaggacggugaugaagcagaggauuuuguugagguucaccuucccgaugugcacaaacagaucucagggguugaccugggucucccuaacuggggaaaguaugucuuaauaauugcagggguauugauugccaugauauugacaaucuucuuaaugacauguuguggaagagguaaucgacccauguccaaacaacacagucuuggagggauagggaggaaggugucauccacuucccaaagcgggaaggucauaucuucgugggagucauauaaaagcgggggugagaccagacuguga

SEQ ID NO: 63826 - RNA, 1575 nt, Artificial Sequence
  derived and/or modified CDS sequence (wt) from glycoprotein__RABV__L40426.1
augguuccucagguucuuuuguuuguacuccuucuggguuuuucguuguguuucgggaaguuccccauuuacacgauaccagacaaacuuggucccuggagcccuauugacauacaccaucuccgcuguccaaauaaccugguuguggaggaugaaggauguaccaaccuguccggguucuccuacauggaacucaaagugggauacaucucagccaucaaagugaacggguucacuugcacagguguugugacagaggcagagaccuacaccaacuuuguugguuaugucacaaccacauucaagagaaagcauuuccgccccaccccagacgcauguagagccgcguauaacuggaagauggccggugaccccagauaugaagagucccuacaaaauccauaccccgacuaccacuggcuucgaacuguaagaaccaccaaagagucccucauuaucauauccccaagugugacagauuuggacccauaugacaaaucccuucacucaagggucuucccuggcggaaagugcucaggaauaacgguguccucuaccuacugcucaacuaaccaugauuacaccauuuggaugcccgagaauccgagaccagggacaccuugugacauuuuuaccaauagcagagggaagagagcauccaacgggaacaagacuugcggcuuuguggaugaaagaggccuguauaagucucuaaaaggagcaugcaggcucaaguuauguggaguucuuggacuuagacuuauggauggaacaugggucgcgaugcaaacaucagaugagaccaaauggugcucuccagaucaguuggugaauuugcacgacuuucgcucagacgagauugagcaucucguuguggaggaguuagucaagaaaagagaggaaugucuggauacauuagaguccaucaugaccaccaagucaguaaguuucagacgucucagucaccugagaaaacuugucccaggguuuggaaaagcauauaccauauucaacaaaaccuugauggaggcugaugcucacuacaagucaguccggaccuggaaugagaucauccccucaaaaggguguuugaaaguuggaggaaggugccauccucaugugaacgggguguuuuucaaugguauaauauuagggccugacgaccguguccuaaucccagagaugcaaucaucccuccuccggcaacauauggaguuguuggaaucuucaguuaucccccugaugcacccccuggcugacccuucuacaguuuucaaagaaggugaugaggcugaggauuuuguugaaguucaccuccccgauguguacaaacagaucucagggguugaccugggucucccgaacuggggaaaguauguauugaugacugcaggggccaugauuggccugguguugauauuuucccuaaugacauggugcagaagagccaaucgaccagaaucgaaacaacgcaguuuuggagggacaggggggaaugugucagucacuucccaaagcggaaaagucauaccuucaugggaaucauauaagaguggaggugagaucagacuguga

SEQ ID NO: 63827 - RNA, 1575 nt, Artificial Sequence
  derived and/or modified CDS sequence (wt) from glycoprotein__RABV__LC009632.1
augauuccucaggcucuuuuguuuguaccccuucuggucuuuucacuguguuucggaaaauuucccaucuacacgauaccggacaaacuuggucccuggagccccauugauauacaucaucucagcuguccgaacaauuuaguugucgaggaugaaggauguaccaaccugucagguuucucguacauggaacucaagguaggauacauuucagccaucaaagugaacggguucacuuguacggguguagugacagaagcagagaccuacaccaacuuuguuggcuaugucacuaccacguuuaagagaaagcacuuccgcccaacgccggaugcaugcagagccgcauauaacuggaagauggccggugaccccagauaugaagaaucucugcauaauccuuacccugauuaucauuggcuccgaacugugaagaccacuaaagaaucucuuguuaucauaucuccgaguguggcagauuuggacccauacgauaaaucccuucacucgagaguuuuuccuagcggaaaaugcucaggcauaacggugucuucuaccuacugcucuacuaaccacgacuauaccaucuggaugccugagaauccuagacuagggaccucuugugacauuuucacuaauagcagagggaagagagcauccaaagggaguaagaccuguggauuuguagaugagagaggccuguacaagucucugaaaggagcaugcaaacugaaacuauguggaguucugggacucagacuuauggauggaacaugggccgcgauccaaacaucagaugagaccaaauggugcccuccugaucaguuagugaaccuacaugacuuucgcucggaugaaauugaacaucuuguuguggaggagcuagucaagaaaagggaagagugucuagaugcacuggaguccaucaugaccaccaagucugugaguuucagacgucucagucacuugaggaaacuugugcccggguuuggaaaagcauauaccauauucaauaagaccuugauggaggcugaugcucacuacaaaucaguccggacuuggaaugagaucaucccaucuaaaggguguuuaagagucggggggagaugucacccucacgugaacgggguguucuucaaugguaucaucuugggcccugacggccaugugcuaaucccggagaugcagucgucucuccuccagcagcauauggaguuguuggaauccucagucauccccuuaaugcaucccuuggcagauccaucaacaguuuuuaaagaugaugacgaggcggaagauuuuguugagguucaccuuccagaugugcacaagcaggucucaggggucgaucucggucucccaagcugggggaaguauguguugaugagcgcaggcgucuugaccgcacuaauguugaugauuuucuuaaugacguguuguagaagggccaauagagcagaaucagcacaacacagucuuggagagagggggaggaaagugucgguaaccucccaaagcgggcggguuauauccucaugggagucauacaaaagugggggugagaccaagcuguaa

SEQ ID NO: 63828 - RNA, 1575 nt, Artificial Sequence
  derived and/or modified CDS sequence (wt) from glycoprotein__RABV__LC009633.1
augauuccucaggcucuuuuguuuguaccccuucuggucuuuucacuguguuucggaaaauuucccaucuacacgauaccggacaaacuuggucccuggagccccauugauauacaucaucucagcuguccgaacaauuuaguugucgaggaugaaggauguaccaaccugucagguuucucguacauggaacucaagguaggauacauuucagccaucaaagugaacggguucacuuguacggguguagugacagaagcagagaccuacaccaacuuuguuggcuaugucacuaccacguuuaagagaaagcacuuccgcccaacgccggaugcaugcagagccgcauauaacuggaagauggccggugaccccagauaugaagaaucucugcauaauccuuacccugauuaucauuggcuccgaacugugaagaccacuaaagaaucucuuguuaucauaucuccgaguguggcagauuuggacccauacgauaaaucccuucacucgagaguuuuuccuagcggaaaaugcucaggcauaacggugucuucuaccuacugcucuacuaaccacgacuauaccaucuggaugccugagaauccuagacuagggaccucuugugacauuuucacuaauagcagagggaagagagcauccaaagggaacaagacuuguggauuuguagaugagagaggccuguacaagucucugaaaggagcaugcaaacugaaacuauguggaguucugggacucagacuuauggauggaacaugggccgcgauccaaacaucagaugagaccaaauggugcccuccugaucaguuagugaaccuacaugacuuucgcucggaugaaauugaacaucuuguuguggaggagcuagucaagaaaagggaagagugucuagaugcacuggaguccaucaugaccaccaagucugugaguuucagacgucucagucacuugaggaaacuugugcccggguuuggaaaagcauauaccauauucaauaagaccuugauggaggcugaugcucacuacaaaucaguccggacuuggaaugagaucaucccaucuaaaggguguuuaagagucggggggagaugucacccucacgugaacgggguguucuucaaugguaucaucuugggcccugacggccaugugcuaaucccggagaugcagucgucucuccuccagcagcauauggaguuguuggaauccucagucauccccuuaaugcaucccuuggcagauccaucaacaguuuuuaaagaugaugacgaggcggaagauuuuguugagguucaccuuccagaugugcacaagcaggucucaggggucgaucucggucucccaagcugggggaaguauguguugaugagcgcaggcgucuugaccgcacuaauguugaugauuuucuuaaugacguguuguagaagggccaauagagcagaaucagcacaacacagucuuggagagagggggaggaaagugucgguaaccucccaaagcgggcggguuauauccucaugggagucauacaaaagugggggugagaccaagcuguaa

SEQ ID NO: 63829 - RNA, 1575 nt, Artificial Sequence
  derived and/or modified CDS sequence (wt) from glycoprotein__RABV__LC009635.1
augguuccucagguucuuuuguuuguacuccuucuggguuuuucguuguguuucgggaaguuccccauuuacacgauaccagacgaacuuggucccuggagcccuauugacauacaccaucucagcuguccaaauaaccugguuguggaggaugaaggauguaccaaccuguccgaguucuccuacauggaacucaaagugggauacaucucagccaucaaagugaacggguucacuugcacagguguugugacagaggcagagaccuacaccaacuuuguugguuaugucacaaccacauucaagagaaagcauuuccgccccaccccagacgcauguagagccgcguauaacuggaagauggccggugaccccagauaugaagagucccuacacaauccauaccccgacuaccacuggcuucgaacuguaagaaccaccaaagagucccucauuaucauauccccaagugugacagauuuggacccauaugacaaaucccuucacucaagggucuucccuggcggaaagugcucaggaauaacgguguccucuaccuacugcucaacuaaccaugauuacaccauuuggaugcccgagaauccgagaccaaggacaccuugugacauuuuuaccaauagcagagggaagagagcauccaacgggaguaagaccugcggcuuuguggaugaaagaggccuguauaagucucuaaaaggagcaugcaggcucaaguuauguggaguucuuggacuuagacuuauggauggaacaugggucgcgaugcaaacaucagaugagaccaaauggugcccuccagaucaguuggugaauuugcacgacuuucgcucagacgagauugagcaucucguuguggaggaguuagucaagaaaagagaggaaugucuggaugcauuagaguccaucaugaccaccaagucaguaaguuucagacgucucagucaccugagaaaacuugucccaggguuuggaaaagcauauaccauauucaacaaaaccuugauggaggcugaugcucacuacaagucaguccggaccuggaaugagaucauccccucaaaaggguguuugaaaguuggaggaaggugccauccucaugugaacgggguguuuuucaaugguauaauauuagggccugacgaccauguccuaaucccagagaugcaaucaucccuccuccagcaacauauggaguuguuggaaucuucaguuaucccccugaugcacccccuggcagacccuucuacaguuuucaaagaaggugaugaggcugaggauuuuguugaaguucaccuccccgauguguacaaacagaucucagggguugaccugggucucccgaacuggggaaaguauguauugaugacugcaggggccaugauuggccugguguugauauuuucccuaaugacauggugcagaagagccaaucgaccagaaucgaaacaacgcaguuuuggagggacaggggggaaugugucagucacuucccaaagcggaaaagucauaccuucaugggaaucauauaagaguggaggugagaucagacuguga

SEQ ID NO: 63830 - RNA, 1575 nt, Artificial Sequence
  derived and/or modified CDS sequence (wt) from glycoprotein__RABV__LC018482.1
augauuccucaagcucuuuuguuuguaccccuucuggucuuuucguuguguuucggaaaauuucccaucuacacgauaccggacaaacuuggucccuggagccccauugauauacaucaucucagcuguccgaacaauuugguuguggaggaugaaggauguaccaaccugucagguuucucguacauggaacucaagguaggauacauuucagccaucaaagugaacggguucacuuguacggguguagugacagaagcagagaccuacaccaacuuuguuggcuaugucacuaccacguuuaagagaaagcacuuccgcccaacgccggaugcaugcagagccgcauauaacuggaagauggcuggugaccccagauaugaagaaucucugcauaauccuuacccugauuaucauuggcucagaacugugaagaccaccaaagaaucucuuguuaucauaucuccaaguguggcagauuuggacccauaugauaaaucccuucacucgagagucuucccuagcggaaaaugcucaggcauaacggugucuucuaccuacugcucuacuaaccacgacuauaccaucuggaugccugagaauccuagacuagggaccucuugugacauuuucaccaauagcagagggaagagggcauccaaagggagcaagaccuguggauuuguagaugaaagaggccuguacaagucucugaaaggagcaugcaaacugaaacugugugggguucugggacucagacuuauggauggaacaugggccgcgauccagacuucagaugagaccaaauggugcccuccugaucaguuagugaaccuacaugacuuucgcucggaugaaauugaacaucuugucguggaggagcuggucaagaaaagggaagagugucuagaugcacuggaguccaucaugaccaccaagucugugaguuucagacgucucagucacuugaggaaacuugugcccggguuuggaaaagcauauaccauauuuaauaagacuuugauggaggcugaugcucacuacaaaucaguccggacuuggaaugagaucauccccucuaaaggguguuuaagaguaggggggagaugucacccucaugugaacgggguguucuucaaugguaucaucuuaggcccugacggccaugugcuaaucccggaaaugcagucgucucuccuccagcagcauauggaguuguuggaauccucagucauccccuuaaugcaucccuuggcagauccaucaacaguuuuuaaagaugaugacgaggcggaagauuuuguugagguucaccuuccagaugugcacaagcaggucucaggggucgaucucggucucccaagcugggggaaguauguguugaugagcgcaggcgucuuaaccgcgcuaauguugaugauuuucuugaugacguguuguagaagggccaauagagcagaaucagcacaacacagucuuggagagagggggaggaaagugucgguaaccucccaaagcgggcggguuauauccucaugggagucauacaaaaguggaggugagaccaagcuguaa

SEQ ID NO: 63831 - RNA, 1575 nt, Artificial Sequence
  derived and/or modified CDS sequence (wt) from glycoprotein__RABV__LC018483.1
augauuccucaggcucuuuuguuuguaccccuucuggucuuuucauuguguuucggaaaauuucccaucuacacgauaccggacaaacuuggucccuggagccccauugauauacaucaucucagcuguccgaacaauuugguuguggaggaugaaggauguaccaaccugucagguuucucguacauggaacucaagguaggauacauuucagccaucaaagugaacggguucacuuguacggguguagugacagaagcagagaccuacaccaacuuuguuggcuaugucacuaccacguuuaagagaaagcacuuccgcccaacgccggaugcaugcagagccgcauauaacuggaagauggcuggugaccccagauaugaagaaucucugcauaacccuuacccugauuaucauuggcuccgaacugugaagaccaccaaagaaucucuugucaucauaucuccaaguguggcagauuuggacccauacgauaaaucccuucacucgagaguuuuuccuagcggaaaaugcucaggcauaacggugucuucuaccuacugcucuacuaaccacgacuauaccaucuggaugccugagaauccuagacuagggaccucuugugacauuuucaccaauagcagagggaagagagcauccaaagggagcaagaccuguggauuuguagaugagagaggccuguacaagucucugaaaggagcaugcaaacugaaacugugugggguucugggacucagacuuauggauggaacaugggccgcgauccagacaucagaugagaccaaauggugcccuccugaucaguuggugaaccuacaugacuuucgcucggaugaaauugaacaucuugucguggaggagcuggucaagaaaagggaagagugucuagaugcacuggaguccaucaugaccaccaagucugugaguuucagacgucucagucacuugaggaaacuugugccuggguuuggaaaagcauauaccauauuuaauaagaccuugauggaggcugaugcucacuacaaaucaguccggacuuggaaugagaucauccccucuaaaggguguuuaagaguaggggggagaugucacccucaugugaacgggguguucuucaacgguaucaucuuaggcccugacggccaugugcuaaucccggagaugcagucgucucuccuccagcagcauauggaguuguuggaauccucagucauccccuuaaugcaccccuuggcagauccaucaacaguuuuuaaagaugaugacgaggcggaagauuuuguugagguucaucuuccagaugugcacaagcaggucucaggggucgaucucggucucccaagcugggggaaguauguguugaugagcgcaggcgucuugaccgcgcuaauguugaugauuuucuuaaugacguguuguagaagggccaauagaguagaaucagcacaacacagucuuggagagagggggaggaaagugucgguaaccucccaaagcgggcggguuauauccucaugggagucguacaaaaguggaggugagaccaagcuguaa

SEQ ID NO: 63832 - RNA, 1575 nt, Artificial Sequence
  derived and/or modified CDS sequence (wt) from glycoprotein__RABV__LC018484.1
augauuccucaagcucuuuuguuuguaccccuucuggucuuuucauuguguuucggaaaauuucccaucuacacgauaccggacaaacuuggucccuggagccccauugauauacaucaucucagcuguccgaacaauuugguuguggaggaugaaggauguaccaaccugucagguuucucguacauggaacucaagguaggauacauuucagccaucaaagugaacggguucacuuguacggguguagugacagaagcagagaccuacaccaacuuuguuggcuaugucacuaccacguuuaagagaaagcacuuccgcccaacgccggaugcaugcagagccgcauauaacuggaagauggcuggugaccccagauaugaagaaucucugcauaauccuuacccugauuaucauuggcucagaacugugaagaccaccaaagaaucucuuguuaucauaucuccaaguguggcagauuuggacccauacgauaaaucccuucacucgagagucuucccuagcggaaaaugcucaggcauaacggugucuucuaccuacugcucuacuaaccacgacuauaccaucuggaugccugagaauccuagacuagggaccucuugugacauuuucaccaauagcagagggaagagggcauccaaagggagcaagaccuguggauuuguagaugaaagaggccuguacaagucucugaaaggagcaugcaaacugaaacugugugggguucugggacuuagacuuauggauggaacaugggccgcgauccagacaucagaugagaccaaauggugcccuccugaucaguuagugaaccuacaugacuuucgcucggaugaaauugaacaucuugucguggaggagcuggucaagaaaagggaagagugucuagaugcacuggaguccaucaugaccaccaagucugugaguuucagacgucucagucacuugaggaaacuugugcccggguuuggaaaagcauauaccauauuuaauaagaccuugauggaggcugaugcucacuacaaaucaguccggacuuggaaugagaucauccccucuaaaggguguuuaagaguaggggggagaugucacccucaugugaacgggguguucuucaaugguaucaucuuaggcccugacggccaugugcuaaucccggagaugcagucgucucuccuccagcagcauauggaguuguuggaauccucagucauccccuuaaugcaucccuuggcagauccaucaacaguuuuuaaagaugaugacgaggcggaagauuuuguugagguucaccuuccagaugugcauaagcaggucucaggggucgaucucggucucccaagcugggggaaguauguguugaugagcgcaggcgucuuaaccgcacuaauguugaugauuuucuuaaugacguguuguagaagggccaauagagcagaaucagcacaacacagucuuagagagagggggaggaaagugucgguaaccucccaaagcgggcggguuauauccucaugggagucauacaaaaguggaggugagaccaagcuguaa

SEQ ID NO: 63833 - RNA, 1575 nt, Artificial Sequence
  derived and/or modified CDS sequence (wt) from glycoprotein__RABV__LC018485.1
augauuccucaggcucuuuuguuuguaccccuucuagucuuuucauuguguuucggaaaauuuccuaucuacacaauaccggacaaacuuggucccuggagccccauugauauacaucaucucagcuguccgaacaauuugguuguggaggaugaaggauguaccaacuugucagguuucucguacauggaacucaagguaggauacauuucagccaucaaagugaacggguucacuuguacggguguagugacagaagcagagaccuacaccaacuuuguuggcuaugucacuaccacguuuaagagaaagcacuuccgcccaacgccggaugcaugcagagccgcauauaacuggaagauggcuggugaccccagauaugaagaaucucugcauaauccuuacccugauuaucauuggcuccgaacugugaagaccaccaaagaaucucuuguuaucauaucuccaaguguggcagauuuggacccauacgauaaaucccuucacucgagaguuuuuccuagcggaaaaugcucaggcauaacggugucuucuaccuacugcuccacuaaccacgacuauaccaucuggaugccugagaauccuagacuagggaccucuugugacauuuucaccaauagcagagggaagagagcauccaaagggagcaagaccuguggauuuguagaugagagaggccuguacaagucucugaaaggagcaugcaaacugaaacuaugugggguucugggacucagacuuauggauggaacaugggccgcgauccagacaucagaugagaccaaauggugcccuccugaucaguuagugaaccuacaugacuuucgcucggaugaaauugaacaucuuguuguggaggagcuggucaagaaaagagaagagugucuagaugcacuggaguccaucaugaccaccaagucugugaguuucagacgucucagucacuugaggaaacuugugcccggguuuggaaaagcauauaccauauucaauaagaccuugauggaggcugaugcucacuacaaaucaguccggacuuggaaugagaucauccccucuaaaggguguuuaagagucggggggagaugucacccucaugugaacgggguguucuucaaugguaucaucuuaggcccugacggccaugugcuaaucccggagaugcagucgucucuccuccagcagcauauggaguuauuggaauccucagucauccccuuaaugcaccccuuggcagauccaucaacaguuuuuaaagaugaugacgaggcggaagauuuuguugagguucaccuuccagaugugcacaagcaggucucaggggucgaucucggucucccaagcugggggaaguauguguugaugagcgcaggcgucuugaccgccuuaauguugaugauuuucuuaaugacguguuguagaaggaccaauagagcagaaucagcacaacacagucuuggagagagggggaggaaagugucgguaaccucccaaagugggcggguuauauccucaugggagucauacaaaaguggaggugagaccaagcuguag

SEQ ID NO: 63834 - RNA, 1575 nt, Artificial Sequence
  derived and/or modified CDS sequence (wt) from glycoprotein__RABV__LC018486.1
augauuccucaagcucuuuuguuuguaccccuucuggucuuuucguuguguuucgggaaauuucccaucuacacgauaccggacaaacuuggucccuggagccccauugauauacaucaucucagcuguccgaacaauuugguuguggaggaugaaggauguaccaaccugucagguuucucguacauggaacucaagguaggauacauuucagccaucaaagugaacggguucacuugcacggguguagugacagaagcagagaccuacaccaacuuuguuggcuaugucacuaccacguuuaagagaaagcacuuccgcccaacgccggaugcaugcagagccgcauauaacuggaagauggcuggugaccccagauaugaagaaucucugcauaauccuuacccugauuaucauuggcucagaacugugaagaccaccaaagaaucucuuguuaucauaucuccaaguguggcagauuuggacccauacgauaaaucccuucacucgagagucuucccuagcggaaaaugcucaggcauaacggugucuucuaccuacugcucuacuaaccacgacuauaccaucuggaugccugagaauccuagacuagggaccucuugugacauuuucaccaauagcagagggaagagggcauccaaagggagcaagaccuguggauuuguagaugaaagaggccuguacaagucucugaaaggagcaugcaaacugaaacugugugggguucugggacucagacuuauggauggaacaugggcugcgauccagacuucagaugagaccaaauggugcccuccugaucaguuagugaaccuacaugacuuucgcucggaugaaauugaacaucuugucguggaggagcuggucaagaaaagggaagagugucuagaugcacuggaguccaucaugaccaccaagucugugaguuucagacgucucagucacuugaggaaacuugugcccggguuuggaaaagcauauaccauauuuaauaagacuuugauggaggcugaugcucacuacaaaucaguccggacuuggaaugagaucauccccucuaaaggguguuuaagaguaggggggagaugucacccucaugugaacgggguguucuucaaugguaucaucuuaggcccugacggccaugugcuaaucccggagaugcagucgucucuccuccagcagcauauggaguuguuggaauccucagucauccccuuaaugcaucccuuggcagauccaucaacaguuuuuaaagaugaugacgaggcggaagauuuuguugagguucaccuuccagaugugcacaagcaggucucaggggucgaucucggucucccaagcugggggaaguauguguugaugagcgcaggcgucuuaaccgcgcuaauguugaugauuuucuugaugacguguuguagaagggccaauagagcagaaucagcacaacacagucuuggagagagggggaggaaagugucgguaaccucccaaagcgggcggguuauauccucaugggagucauacaaaaguggaggugagaccaagcuguaa

SEQ ID NO: 63835 - RNA, 1575 nt, Artificial Sequence
  derived and/or modified CDS sequence (wt) from glycoprotein__RABV__LC018487.1
augauuccucaggcucuuuuguuuguaccccuucuggucuuuucauuguguuucggaaaauuucccaucuacacgauaccggacaaacuuggucccuggagccccauugauauacaucaucucagcuguccgaauaauuugguuguggaggaugaaggauguaccaaccugucagguuucucguacauggaacucaagguaggauacauuucagccaucaaagugaacggguucacuuguacggguguagugacagaagcagagaccuacaccaacuuuguuggcuaugucacuaccacguuuaagagaaagcacuuccgcccaacgccggaugcaugcagagccgcauauaacuggaagauggcuggugaccccagauaugaagaaucucugcauaauccuuacccugauuaucauuggcuccgaacugugaagaccaccaaagaaucucuuguuaucauaucuccaaguguggcagauuuggacccauaugauaaaucccuucacucgagaguuuuuccuagcggaaaaugcucaggcauaacggugucuucuaccuacugcuccacuaaccacgacuauaccaucuggaugcccgagaauccuagacuagggaccucuugugacauuuucaccaauagcagagggaagagagcauccaaagggagcaagaccuguggauuuguggaugagagaggccuguacaagucucugaaaggagcaugcaaacugaaacuaugugggguucugggacucagacuuauggauggaacaugggccgcgauccagacaucagaugagaccaaauggugcccuccugaccaguuagugaaccuacaugacuuucgcucggaugaaauugagcaucuuguuguggaggagcuggucaagaaaagggaagagugucuagaugcacuggaguccaucaugaccaccaagucugugaguuucagacgucucagucacuugaggaaacuugugcccggguuuggaaaagcauauaccauauucaauaagaccuugauggaggcugaugcucacuacaaaucaguccggaccuggaaugagaucauccccuccaaaggguguuuaagagucggggggagaugucacccucaugugaacgggguguucuucaaugguaucaucuuaggcccugacggccaugugcuaaucccggagaugcagucgucucuccuccagcagcauauggaguuauuggaauccucaguuauucccuuaaugcaucccuuggcagauccaucaacaguuuuuaaagaugaugacgaggcggaagauuuuguugagguucaccuuccagaugugcacaagcaggucucaggggucgaucucggucucccaagcugggggaaguauguguugaugagcgcaggcgucuugaccgcauuaauguugaugauuuucuuaaugacguguuguagaaggaccaauagagcagaaucagcacaacacagucuuggagagagggggaggaaagugucgguaaccucccaaagcgggcggguuauauccucaugggagucauacaaaaguggaggugagaccaagcuguaa

SEQ ID NO: 63836 - RNA, 1575 nt, Artificial Sequence
  derived and/or modified CDS sequence (wt) from glycoprotein__RABV__LC018488.1
augauuccucaggcucuuuuguuuguaccccuucuggucuuuucauuguguuucggaaaauuucccaucuacacgauaccggacaaacuuggucccuggagccccauugauauacaucaucucagcuguccgaacaauuugguuguugaggaugaaggauguaccaaccugucagguuucucguacauggaacucaagguaggauacauuucagccaucaaagugaacggguucacuuguacggguguagugacagaagcagagaccuacaccaacuuugucggcuaugucacuaccacguuuaagagaaagcacuuccgcccaacgccggaugcaugcagagccgcauauaacuggaagauggcuggugaccccagauaugaagaaucucugcauaauccuuacccugauuaucauuggcuccgaacugugaagaccaccaaagaaucucuuguuaucauaucuccaaguguggcagauuuggacccauaugauaaaucccuucacucgagaguuuuuccuagcggaaaaugcucaggcauaacggugucuucuaccuacugcucuacuaaccacgacuauaccaucuggaugccugagaauccuagacuagggaccucuugugacauuuucaccaauagcagagggaagagagcaucuaaagggagcaagaccuguggauuuguagaugagagaggccuguacaagucucugaaaggagcaugcaaacugaaacuaugugggguucugggacucagacuuauggauggaacaugggccgcgauccagacaucagaugaaaccaaauggugcccuccugaucaguuagugaaccugcaugacuuucgcucggaugaaauugaacaucuuguuguggaggagcuggucaagaaaagggaagagugucuagaugcacuggaguccaucaugaccaccaagucugugaguuucagacgucucagucacuugaggaaacuugugcccggguuuggaaaagcauauaccauauucaauaaaaccuugauggaggcugaugcucacuacaaaucaguccggacuuggaaugagaucauccccucuaaaggguguuuaagagucggggggagaugucacccucaugugaacgggguguucuucaaugguaucaucuuaggcccugacggccaugugcuaaucccggagaugcagucgucucuccuccagcagcacauggaguuguuggaauccucagucaucccuuuaaugcaucccuuggcagauccaucaacaguuuuuaaagaugaugacgaggcggaagauuuuguagagguucaccuuccagaugugcacaagcaggucucaggggucgaucucggucuuccaagcugggggaaguauguguugaugagcgcaggcgucuugaccgcauuaauguugaugauuuucuuaacgacguguuguagaagggccgauagagcagaaucagcgcaacacagucuuggagagagggggaggaaagugucggugaccucccagagcgggcggguuauauccucaugggagucauacaaaaguggaggugagaccaagcuguaa

SEQ ID NO: 63837 - RNA, 1575 nt, Artificial Sequence
  derived and/or modified CDS sequence (wt) from glycoprotein__RABV__LC018489.1
augauuccucaggcucuuuuguuuguaccccuucuggucuuuucauuguguuucggaaaauuucccaucuacacgauaccggacaaacuuggucccuggagccccauugauauacaucaucucagcuguccgaacaauuugguuguggaggaugaaggauguaccaaccugucagguuucucguacauggaacucaagguaggauacauuucggccaucaaagugaacggguucacuuguacggguguagugacagaagcagagaccuacaccaacuuuguuggcuaugucacuaccacguuuaagagaaagcacuuccgcccaacgccggaugcaugcagagccgcauauaacuggaagauggcuggugaccccagauaugaagaaucucugcauaauccuuacccugauuaucauuggcuccgaacugugaagaccaccaaagaaucucuuguuaucauaucuccaaguguggcagauuuggacccauaugauaaaucccuucacucgagaguuuuuccuagcggaaaaugcucaggcauaacggugucuucuaccuacugcuccacuaaccacgacuauaccaucuggaugcccgagaauccuagacuagggaccucuugugacauuuucaccaauagcagagggaagagagcauccaaagggagcaagaccuguggauuuguggaugagagaggccuguacaagucucugaaaggagcaugcaaacugaaacuaugugggguucugggacucagacuuauggauggaacaugggccgcgauccagacaucagaugagaccaaauggugcccuccugaccaguuagugaaccuacaugacuuucgcucggaugaaauugagcaucuuguuguggaggagcuggucaagaaaagggaagagugucuagaugcacuggaguccaucaugaccaccaagucugugaguuucagacgucucagucacuugaggaaacuugugcccggguuuggaaaagcauauaccauauucaauaagaccuugauggaggcugaugcucacuacaaaucaguccggaccuggaaugagaucauccccuccaaaggguguuuaagagucggggggagaugucacccucaugugaacgggguguucuucaaugguaucaucuuaggcccugacggccaugugcuaaucccggagaugcagucgucucuccuccagcagcauauggaguuauuggaauccucagucauucccuuaaugcaucccuuggcagauccaucaacaguuuuuaaagaugaugacgaggcggaagauuuuguugagguucaccuuccagaugugcacaagcaggucucaggggucgaucucggucucccaagcugggggaaguauguguugaugagcgcaggcgucuugaccgcauuaauguugaugauuuucuuaaugacguguuguagaaggaccaauagagcagaaucagcacaacacagucuuggagagagggggaggaaagugucgguaaccucccaaagcgggcggguuauauccucaugggagucauacaaaaguggaggugagaccaagcuguaa

SEQ ID NO: 63838 - RNA, 1575 nt, Artificial Sequence
  derived and/or modified CDS sequence (wt) from glycoprotein__RABV__LC018490.1
augauuccucaggcucuuuuguuuguaccccuucuggucuuuucauuguguuucggaaaauuucccaucuacacgauaccggacaaacuuggucccuggagccccauugauauacaucaucucagcuguccgaauaauuugguuguggaggaugaaggauguaccaaccugucagguuucucguacauggaacucaagguaggauacauuucagccaucaaagugaacggguucacuuguacggguguagugacagaagcagagaccuacaccaacuuuguuggcuaugucacuaccacguuuaagagaaagcacuuccgcccaacgccggaugcaugcagagccgcauauaacuggaagauggcuggugaccccagauaugaagaaucucugcauaauccuuacccugauuaucauuggcuccgaacugugaagaccaccaaagaaucucuuguuaucauaucucccaguguggcagauuuggacccauaugauaaaucccuucacucgagagucuuuccuagcggaaaaugcucaggcauaacggugucuucuaccuacugcuccacuaaccacgacuauaccaucuggaugcccgagaauccuagacuagggaccucuugugacauuuucaccaauagcagagggaagagagcauccaaagggagcaagaccuguggauuuguggaugagagaggccuguacaagucucugaaaggagcaugcaaacugaaacuaugugggguucugggacucagacuuauggauggaacaugggccgcgauccagacaucagaugagaccaaauggugcccuccugaccaguuagugaaccuacaugacuuucgcucggaugaaauugagcaucuuguuguggaggagcuggucaagaaaagggaagagugucuagaugcacuggaguccaucaugaccaccaagucugugaguuucagacgucucagucacuugaggaaacuugugcccggguuuggaaaagcauauaccauauucaauaagaccuugauggaggcugaugcucacuacaaaucaguccggaccuggaaugagaucauccccuccaaaggguguuuaagagucggggggagaugucacccucaugugaacgggguguucuucaaugguaucaucuuaggcccugacggccaugugcuaaucccggagaugcagucgucucuccuccagcagcauauggaguuauuggaauccucagucauucccuuaaugcaucccuuggcagauccaucaacaguuuuuaaagaugaugacgaggcggaagauuuuguugagguucaccuuccagaugugcacaagcaggucucaggggucgaucucggucucccaagcugggggaaguauguguugaugagcgcaggcgucuugaccgcauuaauguugaugauuuucuuaaugacguguuguagaaggaccaauagagcagaaucagcacaacacagucuuggagagagggggaggaaagugucgguaaccucccaaagcgggcggguuauauccucaugggagucauacaaaaguggaggugagaccaagcuguaa

SEQ ID NO: 63839 - RNA, 1575 nt, Artificial Sequence
  derived and/or modified CDS sequence (wt) from glycoprotein__RABV__LC018493.1
augauuccucaagcucuuuuguuuguaccccuucuggucuuuucguuguguuucggaaaauuucccaucuacacgauaccggacaaacuuggucccuggagccccauugauauacaucaucucagcuguccgaauaauuugguuguggaggaugaaggauguaccaaccugucagguuucucguacauggaacucaagguaggauacauuucagccaucaaagugaacggguucacuuguacggguguagugacagaagcagagaccuacaccaacuuuguuggcuaugucacuaccacguuuaagagaaagcacuuccgcccaacgccggaugcaugcagagccgcauauaacuggaagauggcuggugaccccagauaugaagaaucucugcauaauccuuacccugauuaucauuggcucagaacugugaagaccaccaaagaaucucuuguuaucauaucuccaaguguggcagauuuggacccauaugauaaaucccuucacucgagagucuucccuagcggaaaaugcucaggcauaacggugucuucuaccuacugcucuacuaaccacgacuauaccaucuggaugccugagaauccuagacuagggaccucuugugacauuuucaccaauagcagagggaagagggcauccaaagggagcaagaccuguggauuuguagaugaaagaggccuguacaagucucugaaaggagcaugcaaacugaaacugugugggguucugggacucagacuuauggauggaacaugggccgcgauccagacuucagaugagaccaaauggugcccuccugaucaguuagugaaccuacaugacuuucgcucggaugaaauugaacaucuugucguggaggagcuggucaagaaaagggaagagugucuagaugcacuggaguccaucaugaccaccaagucugugaguuucagacgucucagucacuugaggaaacuugugcccggguuuggaaaagcauauaccauauuuaauaagacuuugauggaggcugaugcucacuacaaaucaguccggacuuggaaugagaucauccccucuaaaggguguuuaagaguaggggggagaugucacccucaugugaacgggguguucuucaaugguaucaucuuaggcccugacggccaugugcuaaucccggagaugcagucgucucuccuccagcagcauauggaguuguuggaauccucagucauccccuuaaugcaucccuuggcagauccaucaacaguuuuuaaagaugaugacgaggcggaagauuuuguugagguucaccuuccagaugugcacaagcaggucucaggggucgaucucggucucccaagcugggggaaguauguguugaugagcgcaggcgucuuaaccgcgcuaauguugaugauuuucuugaugacguguuguagaagggccaauagagcagaaucagcacaacacagucuuggagagagggggaggaaagugucgguaaccucccaaagcgggcggguuauauccucaugggagucauacaaaaguggaggugagaccaagcuguaa

SEQ ID NO: 63840 - RNA, 1575 nt, Artificial Sequence
  derived and/or modified CDS sequence (wt) from glycoprotein__RABV__LC018494.1
augauuccucaggcucuuuuguuuguaccccuucuggucuuuucauuguguuucggaaaauuucccaucuacacgauaccggacaaacuuggucccuggagccccauugauauacaucaucucagcuguccgaacaauuugguuguggaggaugaaggauguaccaaccugucagguuucucguacauggaacucaagguaggauacauuucagccaucaaagugaacggguucacuuguacggguguagugacagaagcagagaccuacaccaacuuuguuggcuaugucacuaccacguuuaagagaaagcacuuccgcccaacgccggaugcaugcagagccgcauauaacuggaagauggcuggugaccccagauaugaagaaucucugcauaauccuuacccugauuaucauuggcuccgaacugugaagaccaccaaagaaucucuuguuaucauaucuccaaguguggcagauuuggacccauaugauaaaucccuucacucgagaguuuuuccuagcggaaaaugcucaggcauaacggugucuucuaccuacugcuccacuaaccacgacuauaccaucuggaugcccgagaauccuagacuagggaccucuugugacauuuucaccaauagcagagggaagagagcauccaaagggagcaagaccuguggauuuguggaugagagaggccuguacaagucucugaaaggagcaugcaaacugaaacuaugugggguucugggacucagacuuauggauggaacaugggccgcgauccagacaucagaugagaccaaauggugcccuccugaccagcuagugaaccuacaugacuuucgcucggaugaaauugagcaucuuguuguggaggagcuggucaagaaaagggaagagugucuagaugcacuggaguccaucaugaccaccaagucugugaguuucagacgucucagucacuugaggaaacuugugcccggguuuggaaaagcauauaccauauucaauaagaccuugauggaggcugaugcucacuacaaaucagucaggacuuggaaugagaucauccccuccaaaggguguuuaagagucggggggagaugucacccucaugugaacgggguguucuucaaugguaucaucuuaggcccugacggccaugugcuaaucccggagaugcagucgucucuccuccagcagcauauggaguuauuggaauccucagucauucccuuaaugcaucccuuggcagauccaucaacaguuuuuaaagaugaugacgaggcggaagauuuuguugagguucaccuuccagaugugcacaagcaggucucaggggucgaucucggucucccaagcugggggaaguauguguugaugagcgcaggcgucuugaccgcauuaauguugaugauuuucuuaaugacguguuguagaaggaccaauagagcagaaucagcacaacacagucuuggagagagggggaggaaagugucgguaaccucccaaagcgggcggguuauauccucaugggagucauacaaaaguggaggugagaccaagcuguaa

SEQ ID NO: 63841 - RNA, 1575 nt, Artificial Sequence
  derived and/or modified CDS sequence (wt) from glycoprotein__RABV__LC018495.1
augauuccucaggcucuuuuguuuguaccccuucuggucuuuucauuguguuucggaaaauuucccaucuacacgauaccggacaaacuuggucccuggagccccauugauauacaucaucucagcuguccgaauaauuugguuguggaggaugaaggauguaccaaccugucagguuucucguacauggaacucaagguaggauacauuucagccaucaaagugaacggguucacuuguacggguguagugacagaagcagaaaccuacaccaacuuuguuggcuaugucacuaccacguuuaagagaaagcacuuccgcccaacgccggaugcaugcagagccgcauauaacuggaagauggcuggugaccccagauaugaagaaucucugcauaauccuuacccugauuaucauuggcuccgaacugugaagaccaccaaagaaucucuuguuaucauaucuccaaguguggcagauuuggacccauaugauaaaucccuucacucgagaguuuuuccuagcggaaaaugcucaggcauaacggugucuucuaccuacugcuccacuaaccacgacuauaccaucuggaugcccgagaauccuagacuagggaccucuugugacauuuucaccaauagcagagggaagagagcauccaaagggagcaagaccuguggauuuguggaugagagaggccuguacaagucucugaaaggagcaugcaaacugaaacuaugugggguucugggacucagacuuauggauggaacaugggccgcgauccagacaucagaugagaccaaauggugcccuccugaccaguuagugaaccuacaugacuuucgcucggaugaaauugaacaucucguuguggaggagcuggucaagaaaagggaagagugucuagaugcacuggaguccaucaugaccaccaagucugugaguuucagacgucucagucacuugaggaaacuugugcccggguuuggaaaagcauauaccauauucaauaagaccuugauggaggcugaugcucacuacaaaucaguccggaccuggaaugagaucauccccuccaaaggguguuuaagagucggggggagaugucacccucaugugaacgggguguucuucaaugguaucaucuuaggcccugacggccaugugcuaaucccggagaugcagucgucucuccuccagcagcauauggaguuauuggaauccucagucauucccuuaaugcaucccuuggcagauccaucaacaguuuuuaaagaugaugacgaggcggaagauuuuguugagguucaccuuccagaugugcacaagcaggucucaggggucgaucucggucucccaagcugggggaaguauguguugaugagcgcaggcgucuugaccgcauuaauguugaugauuuucuuaaugacguguuguagaaggaccaauagagcagaaucagcacaacacagucuuggagagagggggaggaaagugucgguaaccucccaaagcgggcggguuauauccucaugggagucauacaaaaguggaggugagaccaagcuguaa

SEQ ID NO: 63842 - RNA, 1575 nt, Artificial Sequence
  derived and/or modified CDS sequence (wt) from glycoprotein__RABV__LC018496.1
augauuccucaggcucuuuuguuuguaccccuucuggucuuuucauuguguuucggaaaauuucccaucuacacgauaccggacaaacuuggucccuggagccccauugauauacaucaucucagcuguccgaacaauuugguuguggaggaugaaggauguaccaaccugucagguuucucguacauggaacucaagguaggauacauuucagccaucaaagugaacggguucacuuguacggguguagugacagaagcagagaccuacaccaacuuuguuggcuaugucacuaccacguuuaagagaaagcacuuccgcccaacgccggaugcaugcagagccgcauauaacuggaagauggcuggugaccccagauaugaagaaucucugcauaauccuuacccugauuaucacuggcuccgaacugugaagaccaccaaagaaucucuuguuaucauaucuccaaguguggcagauuuggacccauacgauaaaucccuucacucgagaguuuuuccuagcggaaaaugcucaggcauaacggugucuucuaccuacugcuccacuaaccacgacuauaccaucuggaugcccgagaauccuagacuagggaccucuugugacauuuucaccaauagcagagggaagagagcauccaaagggagcaagaccuguggauuuguggaugagagaggccuguacaagucucugaaaggagcaugcaaacugaaacuaugugggguucugggacucagacuuauggauggaacaugggccgcgauccagacaucagaugagaccaaauggugcccuccugaccagcuagugaaccuacaugacuuucgcucggaugaaauugagcaucuuguuguggaggagcuggucaagaaaagggaagagugucuagaugcacuggaguccaucaugaccaccaaguccgugaguuucagacgucucagucacuugaggaaacuugugcccggguuuggaaaagcauauaccauauucaauaagaccuugauggaggcugaugcucacuacaaaucaguccggacuuggaaugagaucauccccuccaaaggguguuuaagagucggggggagaugucacccucaugugaacgggguguucuucaaugguaucaucuuaggcccugacggccaugugcuaaucccggagaugcagucgucucuccuccagcagcauauggaguuauuggaauccucagucauucccuuaaugcaucccuuggcagauccaucaacaguuuuuaaagaugaugacgaggcggaagauuuuguugagguucaccuuccagaugugcacaagcaggucucaggggucgaucucggucucccaagcugggggaaguauguguugaugagcgcaggcgucuugaccgcauuaauguugaugauuuucuuaaugacguguuguagaaggaccaauagagcagaaucagcacaacacagucuuggagagagggggaggaaagugucgguaaccucccaaagcgggcggguuauauccucaugggagucauacaaaaguggaggugagaccaagcuguaa

SEQ ID NO: 63843 - RNA, 1575 nt, Artificial Sequence
  derived and/or modified CDS sequence (wt) from glycoprotein__RABV__LC018497.1
augauuccucaggcucuuuuguuuguaccccuucuggucuuuucauuguguuucggaaaauuucccaucuacacgauaccggacaaacuuggucccuggagccccauugauauacaucaucucagcuguccgaacaauuugguuguggaggaugaaggauguaccaaccugucagguuucucguacauggaacucaagguaggauacauuucagccaucaaaguaaacggguucacuuguacggguguagugacagaagcagagaccuacaccaacuuuguuggcuaugucacuaccacguuuaagagaaagcacuuccgcccaacgccggaugcaugcagauccgcauauaacuggaagauggcuggugaccccagauaugaagaaucucugcauaauccuuacccugauuaucauuggcuccgaacugugaagaccaccaaagaaucucuuguuaucauaucuccaaguguggcagauuuggacccauaugauaaaucccuucacucgagaguuuuuccuagcggaaaaugcucaggcauaacggugucuucuaccuacugcucuacuaaccacgacuauaccaucuggaugccugagaauccuaggcuagggacuucuugugacauuuucaccaauagcagagggaagagagcauccaaagggagcaagaccuguggauuuguagaugagaggggccuguacaagucucugaaaggagcaugcaaacugaaacuaugugggguucugggacucagacuuauggauggaacaugggccgcgauccagacaucagaugagaccaaauggugcccuccugaucaguuagugaaccugcaugacuuucgcucggaugaaauugaacaucuuguuguggaggagcuggucaagaaaagggaagagugucuagaugcacuggaguccaucaugaccaccaagucugugaguuucagacgucucagucacuugaggaaacuugugcccggguuuggaaaagcauauaccauauucaauaaaaccuugauggaggcugaugcucacuacaaaucaguccggacuuggaaugagaucauccccucuaaaggguguuuaagagucggggggagaugucacccucaugugaacgggguguucuucaaugguaucaucuuaggcccugacggccaugugcuaaucccggagaugcagucgucucuccuccagcagcacauggaguuguuggaauccucagucaucccuuuaaugcaucccuuggcagauccaucaacaguuuuuaaagaugaugacgaggcggaagauuuuguugagguucaccuuccagaugugcacaagcaggucucaggggucgaucucggucuuccaagcugggggaaguauguguugaugagcgcaggcgucuugaccgcauuaauguugaugaucuucuuaacgagguguuguagaagggccaauagagcagaaucggcucaacacagucuuggagagagggggaggaaagugucgguaaccucccaaagcgggcggguuauauccucaugggagucauacaaaaguggaggugagaccaagcuguaa

SEQ ID NO: 63844 - RNA, 1575 nt, Artificial Sequence
  derived and/or modified CDS sequence (wt) from glycoprotein__RABV__LC018498.1
augauuccucaggcucuuuuguuuguaccccuucuggucuuuucauuguguuucggaaaauuuccuaucuacacaauaccggacaaacuuggucccuggagccccauugauauacaucaucucagcuguccgaacaauuugguuguggaggaugaaggauguaccaacuugucagguuucucguacauggaacucaagguaggauacauuucagccaucaaagugaacggguucacuuguacggguguagugacagaagcagagaccuacaccaacuuuguuggcuaugucacuaccacguuuaagagaaagcacuuccgcccaaccccggaugcaugcagagccgcauauaacuggaagauggcuggugaccccagauaugaagaaucucugcauaauccuuacccugauuaucauuggcuccgaacugugaagaccaccaaagaaucucuuguuaucauaucuccaaguguggcagauuuggacccauacgauaaaucccuucacucgagaguuuuuccuagcggaaaaugcucaggcauaacggugucuucuaccuacugcuccacuaaccacgacuauaccaucuggaugccugagaauccuagacuagggaccucuugugacauuuucaccaauagcagagggaagagagcauccaaagggagcaagaccuguggauuuguagaugagagaggccuguacaagucucugaaaggagcaugcaaacugaaacuaugugggguucugggacucagacuuauggauggaacaugggccgcgauccagacaucagaugagaccaaauggugcccuccugaucaguuagugaaccuacaugacuuucgcucggaugaaauugaacaucuuguuguggaggagcuggucaagaaaagagaagagugucuagaugcacuggaguccaucaugaccaccaagucugugaguuucagacgucucagucacuugaggaaacuugugcccggguuuggaaaagcauauaccauauucaauaagaccuugauggaggcugaugcucacuacaaaucaguccggacuuggaaugagaucauccccucuaaaggguguuuaagagucggggggagaugucacccucaugugaacgggguguucuucaaugguaucaucuuaggcccugacggccaugugcuaaucccggagaugcagucaucucuccuccagcagcauauggaguuauuggaauccucagucauccccuuaaugcaucccuuggcagauccaucaacaguuuuuaaagaugaugacgaggcggaagauuuuguugagguucaccuuccagaugugcacaagcaggucucaggggucgaucucggucucccaagcugggggaaguauguguugaugagcgcaggcgucuugaccgccuuaauguugaugauuuucuuaaugacguguugcagaaggaccaauagagcagaaucagcacaacacagucuuggagagagggggaggaaagugucgguaaccucccaaagugggcggguuauauccucaugggagucauacaaaaguggaggugagaccaagcuguaa

SEQ ID NO: 63845 - RNA, 1575 nt, Artificial Sequence
  derived and/or modified CDS sequence (wt) from glycoprotein__RABV__LC018501.1
augauuccucaggcucuuuuguuuguaccccuucuggucuuuucauuguguuucggaaaauuuccuaucuacacaauaccggacaaacuuggucccuggagccccauugauauacaucaucucagcuguccgaacaauuugguuguggaggaugaaggauguaccaacuugucagguuucucguacauggaacucaagguaggauacauuucagccaucaaagugaacggguucacuuguacggguguagugacagaagcagagaccuacaccaacuuuguuggcuaugucacuaccacguuuaagagaaagcacuuccgcccaaccccggaugcaugcagagccgcauauaacuggaagauggcuggugaccccagauaugaagaaucucugcauaauccuuacccugauuaucauuggcuccgaacugugaagaccaccaaagaaucucuuguuaucauaucuccaaguguggcagauuuggacccauacgauaaaucccuucacucgagaguuuuuccuagcggaaaaugcucaggcauaacggugucuucuaccuacugcuccacuaaccacgacuauaccaucuggaugccugagaauccuagacuagggaccucuugugacauuuucaccaauagcagagggaagagagcauccaaagggagcaagaccuguggauuuguagaugagagaggccuguacaagucucugaaaggagcaugcaaacugaaacuaugugggguucugggacucagacuuauggauggaacaugggccgcgauccagacaucagaugagaccaaauggugcccuccugaucaguuagugaaccuacaugacuuucgcucggaugaaauugaacaucuuguuguggaggagcuggucaagaaaagagaagagugucuagaugcacuggaguccaucaugaccaccaagucugugaguuucagacgucucagucacuugaggaaacuugugcccggguuuggaaaagcauauaccauauucaauaagaccuugauggaggcugaugcucacuacaaaucaguccggacuuggaaugagaucauccccucuaaaggguguuuaagagucggggggagaugucauccucaugugaacgggguguucuucaaugguaucaucuuaggcccugacggccaugugcuaaucccggagaugcagucgucucuccuccagcagcauauggaguuauuggaauccucagucauccccuuaaugcaucccuuggcagauccaucaacaguuuuuaaagaugaugacgaggcggaagauuuuguugagguucaccuuccagaugugcacaagcaggucucaggggucgaucucggucucccaagcugggggaaguauguguugaugagcgcaggcgucuugaccgccuuaauguugaugauuuucuuaaugacguguugcagaaggaccaauagagcagaaucagcacaacacaguccuggagagagggggaggaaagugucgguaaccucccaaagugggcggguuauauccucaugggagucauacaaaaguggaggugagaccaagcuguaa

SEQ ID NO: 63846 - RNA, 1575 nt, Artificial Sequence
  derived and/or modified CDS sequence (wt) from glycoprotein__RABV__LC018502.1
augauuccucaggcucuuuuguuuguaccccuucuggucuuuucauuguguuucggaaaauuucccaucuacacgauaccggacaaacuuggucccuggagccccauugauauacaucaucucagcuguccgaacaauuugguuguggaggaugaaggauguaccaaccugucugguuucucguacauggaacucaagguaggauacauuucagccaucaaagugaacggguucacuuguacggguguagugacagaagcagagaccuacaccaacuuuguuggcuaugucacuaccacguuuaagagaaagcacuuccgcccaacgccggaugcaugcagagccgcauauaacuggaagauggcuggugaccccagauaugaagaaucucugcauaauccuuacccugauuaucauuggcuccgaacugugaagaccaccaaagaaucucuuguuaucauaucuccuaguguggcagauuuggacccauacgauaaaucccuucacucgagaguuuuuccuagcggaaaaugcucaggcauaacggugucuucuaccuacugcuccacuaaccacgacuauaccaucuggaugccugagaauccuagacuagggaccucuugugacauuuucaccaacagcagagggaagagagcaucaaaagggagcaagaccuguggauuuguagaugagagaggcuuguacaagucucugaaaggagcaugcaaacugaaacuaugugggguucugggacucagacuuauggauggaacaugggccgcgauccagacaucagaugagaccaaauggugcccuccugaucaguuagugaacuuacaugacuuucgcucggaugaaaucgaacaucuuguuguggaggagcuggucaagaaaagggaagagugucuagaugcacuggaguccaucaugaccacaaagucugugaguuucagacgucucagucacuugaggaaacuugugcccggguuuggaaaagcauauaccauauucaauaagaccuugauggaggcugaugcucacuacaaaucaguccggacuuggaaugagaucauccccucuaaaggguguuuaagagucggggggagaugucacccucauguaaacgggguguucuucaaugguaucaucuuaggcccugacggccaugugcuaaucccggagaugcagucgucucuccuccagcagcauauggaguuauuggaauccucagucauccccuuaaugcaucccuuggcagauccaucaacaguuuuuaaagaugaugacgaggcggaagauuuuguugagguucaccuuccagaugugcacaagcaggucucaggggucgaucucggucucccaagcugggggaaguauguguugaugagcgcaggcgucuugaccgcauuaauguugaugauuuucuuaaugacguguugucgaagggccaauagagcagaaucagcacaacacagucuuggagagagggggaggaaagugucgguaaccucccaaagcgggcggguuauauccucaugggagucauacaaaaguggaggugagaccaagcuguaa

SEQ ID NO: 63847 - RNA, 1575 nt, Artificial Sequence
  derived and/or modified CDS sequence (wt) from glycoprotein__RABV__LC018503.1
augauuccucaggcucuuuuguuuguaccccuucuggucuuuucauuguguuucggaaaauuucccaucuacacgauaccggacaaacuuggucccuggagccccauugauauacaucaucucagcuguccgaacaauuugguuguggaggaugaaggauguaccaaccugucagguuucucguacauggaacucaagguaggauacauuucagccaucaaagugaacggguucacuuguacggguguagugacagaagcagagaccuacaccaacuuuguuggcuaugucacuaccacguuuaagagaaagcacuuccgcccaacgccggaugcaugcagagccgcauauaacuggaagauggcuggugacccccgauaugaagaaucucugcauaauccuuacccugauuaucauuggcuccgaacugugaagaccaccaaagaaucucugguuaucauaucuccaaguguggcagauuuggacccauacgauaaaucccuucacucgagaguuuuucuuaacggaaaaugcucaggcauaacggugucuucuaccuacugcuccacuaaccacgacuauaccaucuggaugccugagaauccuagacuagggaccucuugugacauuuucaccaacagcagagggaagagagcaucaaaagggagcaagaccuguggauuuguagaugagagaggccuguacaagucucugaaaggagcaugcaaacugaaacuaugugggguucugggacucagacuuauggauggaacaugggccgcgauccagacaucagaugagaccaaauggugcccuccugaucaguuagugaaccuacaugacuuucgcucggaugaaauugaacaucuuguuguggaggagcuggucaagaaaagggaagagugucuagaugcacuggaguccaucaugaccacaaagucugugaguuucagacgucucagucacuugaggaaacuugugcccggguuuggaaaagcauauaccauauucaauaagaccuugauggaggcugaugcucacuacaaaucaguccggacuuggaaugagaucauccccucuaaaggguguuuaagagucggggggagaugucacccucauguaaacgggguguucuucaaugguaucaucuuaggcccugacggccaugugcuaaucccggagaugcagucgucucuccuccagcagcauguggaguuauuggaauccucagucauccccuuaaugcaucccuuggcagauccaucaacaguuuuuaaagaugaugacgaggcggaagauuuuguugagguucaccuuccagaugugcacaagcaggucucaggggucgaucucggucucccaagcugggggaaguauguguugaugagcgcaggcgucuugaccgcauuaauguugaugauuuucuuaaugacguguugucgaagggccaauagagcagaaucagcacaacacagucuuggagagagggggaggaaagugucgguaaccucccaaagcgggcggguuguauccucaugggagucauacaaaaguggaggugagaccaagcuguaa

SEQ ID NO: 63848 - RNA, 1575 nt, Artificial Sequence
  derived and/or modified CDS sequence (wt) from glycoprotein__RABV__LC018504.1
augauuccucaggcucuuuuguuuguaccccuucuggucuuuucauuguguuucggaaaauuucccaucuacacgauaccggacaaacuuggucccuggagccccauugauauacaucaucucagcuguccgaacaauuugguuguggaggaugaaggauguaccaaccugucagguuucucguacauggaacucaagguaggauacauuucagccaucaaagugaacggguucacuuguacggguguagugacagaagcagagaccuacaccaacuuuguuggcuaugucacuaccacguuuaagagaaagcacuuccgcccaacgccggaugcaugcagagccgcauauaacuggaagauggcuggugaccccagauaugaagaaucucugcauaauccuuacccugauuaucauuggcuccgaacugugaagaccaccaaagaaucucuuguuaucauaucuccaaguguggcagauuuggacccauacgauaaaucccuucacucgagaguuuuuccuagcggaaaaugcucaggcauaacggugucuucuaccuacugcuccacuaaccacgacuauaccaucuggaugccugagaauccuagacuagggaccucuugugacauuuucaccaacagcagagggaagagagcaucaaaggggagcaagaccuguggauuuguggaugagagaggccuguacaagucucugaaaggagcaugcaaauugaaacuaugugggguucugggacucagacuuauggauggaacaugggccgcgauccagacaucagaugagaccaaauggugcccuccugaucaguuagugaaccuacaugacuuucgcucggaugaaauugaacaucuuguuguggaggagcuggucaagaaaagggaagagugucuagaugcacuggaguccaucaugaccacaaaguccgugaguuucagacgucucagucacuugaggaaacuugugcccggguuuggaaaagcauauaccauauucaauaagaccuugauggaggcugaugcucacuacaaaucaguccggacuuggaaugagaucauccccucuaaaggguguuuaagagucggggggagaugucacccucauguaaacgggguguucuucaaugguaucaucuuaggcccugacggccaugugcuaaucccggagaugcagucgucucuccuccagcagcauauggaguuauuggaauccucagucauccccuuaaugcaucccuuggcagauccaucaacaguuuuuaaagaugaugacgaggcggaagauuuuguugagguucaccuuccagaugugcacaagcaggucucaggugucgaucucggucucccaagcugggggaaguauguguugaugagcgcaggcgucuugaccgcauuaauguugaugauuuucuuaaugacguguugucgaagggccaauagagcagaaucagcacaacacagucuuggagagagggggaggaaagugucgguaaccucccagagcgggcggguuauauccucaugggagucauacaaaaguggaggugagaccaagcuguga

SEQ ID NO: 63849 - RNA, 1575 nt, Artificial Sequence
  derived and/or modified CDS sequence (wt) from glycoprotein__RABV__LC018505.1
augauuccucaggcucuuuuguuuguaccccuucuggucuuuucauuguguuucggaaaauuucccaucuacacgauaccggacaaacuuggucccuggagccccauugauauacaucaucucagcuguccgaacaauuugguuguggaggaugaaggauguaccaaccugucagguuucucguacauggaacucaagguaggauacauuucagccaucaaagugaacggguucacuuguacggguguagugacagaagcagagaccuacaccaacuuuguuggcuaugucacuaccacguuuaagagaaagcacuuccgcccaacgccggaugcaugcagagccgcauauaacuggaagauggcuggugaccccagauaugaagaaucucugcauaauccuuacccugauuaucauuggcuccgaacugugaagaccaccaaagaaucucuuguuaucauaucuccaaguguggcagauuuggacccauacgauaaaucccuucacucgagaguuuuuccuaacggaaaaugcucaggcauaacggugucuucuaccuacugcuccacuaaccacgacuauaccaucuggaugccugagaauccuagacuagggaccucuugugacauuuucaccaacagcagagggaagagagcaucaaaagggagcaagaccuguggauuuguagaugagagaggccuguacaagucucugaaaggagcaugcaaacugaaacuaugugggguucugggacucagacuuauggauggaacaugggccgcgauccagacaucagaugagaccaaauggugcccuccugaucaguuagugaaccuacaugacuuucgcucggaugaaauugaacaucuuguuguggaggagcuggucaagaaaagagaagagugucuagaugcacuggaguccaucaugaccacaaagucugugaguuucagacgucucagucacuugaggaaacuugugcccggguuuggaaaagcauauaccauauucaauaagaccuugauggaggccgaugcucacuacaaaucaguccggacuuggaaugagaucauccccucuaaaggguguuuaagagucggggggagaugucacccucauguaaacgggguguucuucaaugguaucaucuuaggcccugacggccaugugcuaaucccggagaugcagucgucucuccuccagcagcauauggaguuauuggaauccucagucauccccuuaaugcaucccuuggcagauccaucaacaguuuuuaaagaugaugacgaggcggaagauuuuguugagguucaccuuccagaugugcacaagcaggucucaggggucgaucucggucucccaagcugggggaaguauguguugaugagcgcaggcgucuugaccgcauuaauguugaugauuuucuuaaugacguguugucgaagggccaauagagcagaaucagcacaacacagucuuggagagagggggaggaaagugucgguaaccucccaaagcgggcggguuauauccucaugggagucauacaaaaguggaggugagaccaagcuguaa

SEQ ID NO: 63850 - RNA, 1575 nt, Artificial Sequence
  derived and/or modified CDS sequence (wt) from glycoprotein__RABV__LC018506.1
augauuccucaagcucuuuuguuuguaccccuucuggucuuuucauuguguuucggaaaauuucccaucuacacgauaccggacaaacuuggucccuggagccccauugauauacaucaucucagcuguccgaacaauuugguuguggaggaugaaggauguaccaaccugucagguuucucguacauggaacucaagguaggauacauuucaaccaucaaagugaauggguucacuuguacggguguagugacagaagcagagaccuacaccaacuuuguuggcuaugucacuaccacguuuaagagaaagcacuuccgcccaacgccggaugcaugcagagccgcauauaacuggaagauggcuggugaccccagauaugaagaaucucugcauaauccuuacccugauuaucauuggcuccgaacugugaagaccaccaaagaaucucuuguuaucauaucuccaaguguggcagauuuggacccauacgauaaaucccuucacucgagaguuuuuccuaacggaaaaugcucaggcauaacggugucuucuaccuacugcuccacuaaccacgacuauaccaucuggaugccugagaauccuagacuagggaccucuugugacauuuucaccaacagcagagggaagagagcaucaaaagggagcaagaccuguggauuuguagaugagagaggccuguacaagucucugaaaggagcaugcaaacugaaacuaugugggguucugggacucagacuuauggauggaacaugggccgcgauccagacaucagaugagaccaaauggugcccuccugaucaguuagugaaccuacaugacuuucgcucggaugaaauugaacaucuuguuguggaggagcuggucaagaaaagagaagagugucuagaugcacuggaguccaucaugaccacaaagucugugaguuucagacgucucagucacuugaggaaacuugugcccggguuuggaaaagcauauaccauauucaauaagaccuugauggaggccgaugcucacuacaaaucaguccggacuuggaaugagaucauccccucuaaaggguguuuaagagucggggggagaugucacccucauguaaacgggguguucuucaaugguaucaucuuaggcccugacggccaugugcuaaucccggagaugcagucgucucuccuccagcagcauauggaguuauuggaauccucagucauccccuuaaugcaucccuuggcagauccaucaacaguuuuuaaagaugaugacgaggcggaagauuuuguugagguucaccuuccagaugugcacaagcaggucucaggggucgaucucggucucccaagcugggggaaguauguguugaugagcgcaggcgucuugaccgcauuaauguugaugauuuucuuaaugacguguugucgaagggccaauagagcagaaucagcacagcacagucuuggagagagggggaggaaagugucgguaaccucccaaagcgggcggguuauauccucaugggagucauacaaaaguggaggugagaccaagcuguaa

SEQ ID NO: 63851 - RNA, 1575 nt, Artificial Sequence
  derived and/or modified CDS sequence (wt) from glycoprotein__RABV__LC018507.1
augauuccucaggcucuuuuguuuguaccccuucuggucuuuucauuguguuucggaaaauuucccaucuacacgauaccggacaaacuuggucccuggagccccauugauauacaucaucucagcuguccgaacaauuugguuguggaggaugaaggauguaccaaccugucugguuucucguacauggaacucaagguaggauacauuucagccaucaaagugaacggguucacuuguacggguguagugacagaagcagagaccuacaccaacuuuguuggcuaugucacuaccacguuuaagagaaagcacuuccgcccaacgccggaugcaugcagagccgcauauaacuggaagauggcuggugaccccagauaugaagaaucucugcauaauccuuacccugauuaucauuggcuccgaacugugaagaccaccaaagaaucucuuguuaucauaucuccuaguguggcagauuuggacccauacgauaaaucccuucacucgagaguuuuuccuagcggaaaaugcucaggcauaacggugucuucuaccuacugcuccacuaaccacgacuauaccaucuggaugccugagaauccuagacuagggaccucuugugacauuuucaccaacagcagagggaagagagcaucaaaagggagcaagaccuguggauuuguagaugagagaggcuuguacaagucucugaaaggagcaugcaaacugaaacuaugugggguucugggacucagacuuauggauggaacaugggccgcgauccagacaucagaugagaccaaauggugcccuccugaucaguuagugaacuuacaugacuuucgcucggaugaaaucgaacaucuuguuguggaggagcuggucaagaaaagggaagagugucuagaugcacuggaguccaucaugaccacaaagucugugaguuucagacgucucagucacuugaggaaacuugugcccggguuuggaaaagcauauaccauauucaauaagaccuugauggaggcugaugcucacuacaaaucaguccggacuuggaaugagaucauccccucuaaaggguguuuaagagucggggggagaugucacccucauguaaacgggguguucuucaaugguaucaucuuaggcccugacggccaugugcuaaucccggagaugcagucgucucuccuccagcagcauauggaguuauuggaauccucagucauccccuuaaugcaucccuuggcagauccaucaacaguuuuuaaagaugaugacgaggcggaagauuuuguugagguucaccuuccagaugugcacaagcaggucucaggggucgaucucggucucccaagcugggggaaguauguguugaugagcgcaggcgucuugaccgcauuaauguugaugauuuucuuaaugacguguugucgaagggccaauagagcagaaucagcacaacacagucuuggagagagggggagaaaagugucgguaaccucccaaagcgggcggguuauauccucaugggagucauacaaaaguggaggugagaccaagcuguaa

SEQ ID NO: 63852 - RNA, 1575 nt, Artificial Sequence
  derived and/or modified CDS sequence (wt) from glycoprotein__RABV__LC018508.1
augauuccucaggcucuuuuguuuguaccccuucuggucuuuucauuguguuucggaaaauuucccaucuacacgauaccggacaaacuuggucccuggagccccauugauauacaucaucucagcuguccgaauaauuugguuguggaggaugaaggauguaccaaccugucagguuucucguacauggaacucaagguaggauacauuucagccaucaaagugaacggguucacuuguacggguguagugacagaagcagagaccuacaccaacuuuguuggcuaugucacuaccacguuuaagagaaagcacuuccgcccaacgccggaugcaugcagagccgcauauaacuggaagauggcuggugaccccagauaugaagaaucucugcauaauccuuacccugauuaucauuggcuccgaacugugaagaccaccaaagaaucucuuguuaucauaucuccaaguguggcagauuuggacccauaugauaaaucccuucacucgagaguuuuuccuagcggaaaaugcucaggcauaacggugucuucuaccuacugcuccacuaaccacgacuauaccaucuggaugcccgagaauccuagacuagggaccucuugugacauuuucaccaacagcagagggaagagagcauccaaagggagcaagaccuguggauuuguggaugagagaggccuguacaagucucugaaaggagcaugcaaacugaaacuaugugggguucugggacucagacuuauggauggaacaugggccgcgauccagacaucagaugagaccaaauggugcccuccugaccaguuagugaaccuacaugacuuucgcucggaugaaauugagcaucuuguuguggaggagcuggucaagaaaagggaagagugucuagaugcacuggaguccaucaugaccaccaagucugugaguuucagacgucucagucacuugaggaaacuugugcccggguuuggaaaagcauauaccauauucaauaagaccuugauggaggcugaugcucacuacaaaucaguccggaccuggaaugagaucauccccuccaaaggguguuuaagagucggggggagaugucacccucaugugaacgggguguucuucaaugguaucaucuuaggcccugacggccaugugcuaaucccggagaugcagucgucucuccuccagcagcauauggaguuauuggaauccucaguuauucccuuaaugcaucccuuggcagauccaucaacaguuuuuaaagaugaugacgaggcggaagauuuuguugagguucaccuuccagaugugcacaagcaggucucaggggucgaucucggucucccaagcugggggaaguauguguugaugagcgcaggcgucuugaccgcauuaauguugaugauuuucuuaaugacguguuguagaaggaccaauagagcagaaucagcacaacacagucuuggagagagggggaggaaagugucgguaaccucccaaagcgggcggguuauauccucaugggagucauacaaaaguggaggugagaccaagcuguaa

SEQ ID NO: 63853 - RNA, 1575 nt, Artificial Sequence
  derived and/or modified CDS sequence (wt) from glycoprotein__RABV__LC018509.1
augauuccucaggcucuuuuguuuguaccccuucuggucuuuucauuguguuucggaaaauuuccuaucuacacaauaccggacaaacuuggucccuggagccccauugacauacaucaucucagcuguccgaacaauuugguuguggaggaugaaggauguaccaaccugucagguuucucguacauggaacucaagguaggauacauuucagccaucaaagugagcggguucacuuguacggguguagugacggaagcagagaccuacaccaacuuuguuggcuaugucacuaccacguuuaagagaaagcacuuccgcccaacgccggaugcaugcagagccgcauauaacuggaagauggcuggugaccccagauaugaagaaucucugcauaauccuuacccugauuaucauuggcuccgaacugugaagaccaccaaagagucucucguuaucauaucuccaaguguggcagauuuggacccauacgauaaaucccuucacucgagaguuuuuccuagcggaaaaugcucaggcauaacggugucuucuaccuacugcuccacuaaccacgacuauaccaucuggaugccugagaauccuagacuagggaccucuugugacauuuucaccaauagcagagggaagagagcauccaaagggagcaagaccuguggauuuguagaugagagaggccuguacaagucucugaaaggagcaugcaaacugaaacuaugugggguucuggggcucagacuuauggauggaacaugggccgcgauccagacaucagaugagaccaaauggugcccuccugaucaguuagugaaccuacaugacuuucgcucggaugaaauugaacaucuuguuguggaggagcuggucaagaaaagggaagagugucuagaugcacuggaguccaucaugaccaccaagucugugaguuucagacgucucagucacuugaggaaacuugugcccggguuuggaaaagcauauaccauauucaauaagaccuugauggaggcugaugcucacuacaaaucaguccggacuuggaaugagaucauccccucuaaaggguguuuaagagucggggggagaugucacccucaugugaacgggguguucuucaaugguaucaucuuaggcccggacggccaugugcuaaucccggagaugcagucgucucuccuccagcagcauauggaguuauuggaauccucagucauccccuugaugcaucccuuggcagauccaucaacaguuuuuaaagaugaugacgaggcggaagauuuuguugagguucaccuuccagaugugcacaagcaggucucaggggucgaucucggucucccaagcugggggaaguauguguugaugagcgcaggcgccuugaccgcauuaauguugaugauuuucuuaaugacguguuguagaagggccaauagagcagaaucagcacaacacagucuuggagagggggggaggaaagugucgguaaccucccaaagugggcggguuauauccucaugggagucauacaaaaguggaggugagaccaagcuguaa

SEQ ID NO: 63854 - RNA, 1575 nt, Artificial Sequence
  derived and/or modified CDS sequence (wt) from glycoprotein__RABV__LC018513.1
augauuccucaggcucuuuuguuuguaccccuucuggucuuuucauuguguuucggaaaauuucccaucuacacgauaccggacaaacuuggucccuggagccccauugauauacaucaucucagcuguccgaauaauuugguuguggaggaugaaggauguaccaaccugucagguuucucguacauggaacucaagguaggauacauuucagccaucaaagugaacggguucacuuguacggguguagugacagaagcagaaaccuacaccaacuuuguuggcuaugucacuaccacguuuaagagaaagcacuuccgcccaacgccggaugcaugcagagccgcauauaacuggaagauggcuggugaccccagauaugaagaaucucugcauaauccuuacccugauuaucauuggcuccgaacugugaagaccaccaaagaaucucuuguuaucauaucuccaaguguggcagauuuggacccauaugauaaaucccuucacucgagaguuuuuccuagcggaaaaugcucaggcauaacggugucuucuaccuacugcuccacuaaccacgacuauaccaucuggaugcccgagaauccuagacuagggaccucuugugacauuuucaccaauagcagagggaagagagcauccaaagggagcaagaccuguggauuuguggaugagagaggccuguacaagucucugaaaggagcaugcaaacugaaacuaugugggguucugggacucagacuuauggauggaacaugggccgcgauccagacaucagaugagaccaaauggugcccuccugaccaguuagugaaccuacaugacuuucgcucggaugaaauugaacaucuuguuguggaggagcuggucaagaaaagggaagagugucuagaugcacuggaguccaucaugaccaccaagucugugaguuucagacgucucagucacuugaggaagcuugugcccggguuuggaaaagcauauaccauauucaauaagaccuugauggaggcugaugcucacuacaaaucaguccggaccuggaaugagaucauccccuccaaaggguguuuaagagucggggggagaugucacccucaugugaacgggguguucuucaaugguaucaucuuaggcccugacggccaugugcuaaucccggagaugcagucgucucuccuccagcagcauauggaguuauuggaauccucagucauucccuuaaugcaucccuuggcagauccaucaacaguuuuuaaagaugaugacgaggcggaagauuuuguugagguucaccuuccagaugugcacaagcaggucucaggggucgaucucggucucccaagcugggggaaguauguguugaugagcgcaggcgucuugaccgcauuaauguugaugauuuucuuaaugacguguuguagaaggaccaauagagcagaaucagcacaacacagucuuggagagagggggaggaaagugucgguaaccucccaaagcgggcggguuauauccucaugggagucauacaaaaguggaggugagaccaagcuguaa

SEQ ID NO: 63855 - RNA, 1575 nt, Artificial Sequence
  derived and/or modified CDS sequence (wt) from glycoprotein__RABV__LC018514.1
augauuccucaggcucuuuuguuuguaccccuucuggucuuuucauuguguuucggaaaauuucccaucuacacgauaccggacaaacuuggucccuggagccccauugauauacaucaucucagcuguccgaacaauuugguuguggaggaugaaggauguaccaaccugucagguuucucguacauggaacucaagguaggauacauuucagccaucaaagugaacggguucacuuguacggguguagugacagaagcagagaccuacaccaacuuuguuggcuaugucacuaccacguuuaagagaaagcacuuccgcccaacgccggaugcaugcagagccgcauauaacuggaagauggcuggugaccccagauaugaagaaucucugcauaauccuuacccugauuaucauuggcuccgaacugugaagaccaccaaagaaucucuuguuaucauaucuccaaguguggcagauuuggacccauaugauaaaucccuucacucgagaguuuuuccuagcggaaaaugcucaggcauaacggugucuucuaccuacugcuccacuaaccacgacuauaccaucuggaugcccgagaauccuagacuagggaccucuugugacauuuucaccaauagcagagggaagagagcauccaaagggagcaagaccuguggauuuguggaugagagaggccuguacaagucucugaaaggagcaugcaaacugaaacuaugugggguucugggacucagacuuauggauggaacaugggccgcgauccagacaucagaugagaccaaauggugcccuccugaccaguuagugaaccuacaugacuuucgcucggaugaaauugagcaucuuguuguggaggagcuggucaagaaaagggaagagugucuagaugcacuggaguccaucaugaccaccaagucugugaguuucagacgucucagucacuugaggaaacuugugcccggguuuggaaaagcauauaccauauucaauaagaccuugauggaggcugaugcucacuacaaaucaguccggacuuggaaugagaucauccccuccaaaggguguuuaagagucggggggagaugucacccucaugugaacgggguguucuucaaugguaucaucuuaggcccugacggccaugugcuaaucccggagaugcagucgucucuccuccagcagcauauggaguuauuggaauccucagucauucccuuaaugcaucccuuggcagauccaucaacaguuuuuaaagaugaugacgaggcggaagauuuuguugagguucaccuuccagaugugcacaagcaggucucaggggucgaucucggucucccaagcugggggaaguauguguugaugagcgcaggcgucuugaccgcauuaauguugaugauuuucuuaaugacguguuguagaaggaccaauagagcagaaucagcacaacacagucuuggagagagggggaggaaagugucgguaaccucccaaagcgggcggguuauauccucaugggagucauacaaaaguggaggugagaccaagcuguaa

SEQ ID NO: 63856 - RNA, 1575 nt, Artificial Sequence
  derived and/or modified CDS sequence (wt) from glycoprotein__RABV__LC018515.1
augauuccucaggcucuuuuguuuguaccccuucuggucuuuucauuguguuucggaaaauuucccaucuacacgauaccggacaaacuuggucccuggagccccauugauauacaucaucucagcuguccgaauaauuugguuguggaggaugaaggauguaccaaccugucagguuucucguacauggaacucaagguaggauacauuucagccaucaaagugaacggguucacuuguacggguguagugacagaagcagagaccuacaccaacuuuguuggcuaugucacuaccacguuuaagagaaagcacuuccgcccaacgccggaugcaugcagagccgcauauaacuggaagauggcuggugaccccagauaugaagaaucucugcauaauccuuacccugauuaucauuggcuccgaacugugaagaccaccaaagaaucucuuguuaucauaucuccaaguguggcagauuuggacccauaugauaaaucccuucacucgagaguuuuuccuagcggaaaaugcucaggcauaacggugucuucuaccuacugcuccacuaaccacgacuauaccaucuggaugcccgagaauccuagacuagggaccucuugugacauuuucaccaauagcagagggaagagagcauccaaagggagcaagaccuguggauuuguggaugagagaggccuguacaagucucugaaaggagcaugcaaacugaaacuaugugggguucugggacucagacuuauggauggaacaugggccgcgauccagacaucagaugagaccaaauggugcccuccugaccaguuagugaaccuacaugacuuucgcucggaugaaauugagcaucuuguuguggaggagcuggucaagaaaagggaagagugucuagaugcacuggaguccaucaugaccaccaagucugugaguuucagacgucucagucacuugaggaaacuugugcccggguuuggaaaagcauauaccauauucaauaagaccuugauggaggcugaugcucacuacaaaucaguccggaccuggaaugagaucauccccuccaaaggguguuuaagagucggggggagaugucacccucaugugaacgggguguucuucaaugguaucaucuuaggcccugacggccaugugcuaaucccggagaugcagucgucucuccuccagcagcauauggaguuauuggaauccucaguuauucccuuaaugcaucccuuggcagauccaucaacaguuuuuaaagaugaugacgaggcggaagauuuuguugagguucaccuuccagaugugcacaagcaggucucaggggucgaucucggucucccaagcugggggaaguauguguugaugagugcaggcgucuugaccgcauuaauguugaugauuuucuuaaugacguguuguagaaggaccaauagagcagaaucagcacaacacagucuuggagagagggggaggaaagugucgguaaccucccaaagcgggcggguuauauccucaugggagucauacaaaaguggaggugagaccaagcuguaa

SEQ ID NO: 63857 - RNA, 1575 nt, Artificial Sequence
  derived and/or modified CDS sequence (wt) from glycoprotein__RABV__LC018516.1
augauuccucaggcucuuuuguuuguaccccuucuggucuuuucauuguguuucggaaaauuucccaucuacacgauaccggacaaacuuggucccuggagccccauugauauacaucaucucagcuguccgaauaauuugguuguggaggaugaaggauguaccaaccugucagguuucucguacauggaacucaagguaggauacauuucagccaucaaagugaacggguucacuuguacggguguagugacagaagcagagaccuacaccaacuuuguuggcuaugucacuaccacguuuaagagaaagcacuuccgcccaacgccggaugcaugcagagccgcauauaacuggaagauggcuggugaccccagauaugaagaaucucugcauaauccuuacccugauuaucauuggcuccgaacugugaagaccaccaaagaaucucuuguuaucauaucuccaaguguggcagauuuggacccauaugauaaaucccuucacucgagagucuuuccuagcggaaaaugcucaggcauaacggugucuucuaccuacugcuccacuaaccacgacuauaccaucuggaugcccgagaauccuagacuagggaccucuugugacauuuucaccaauagcagagggaagagagcauccaaagggagcaagaccuguggauuuguggaugagagaggccuguacaggucucugaaaggagcaugcaaacugaaacuaugugggguucugggacucagacuuauggauggaacaugggccgcgauccagacaucagaugagaccaaauggugcccuccugaccaguuagugaaccuacaugacuuucgcucggaugaaauugagcaucuuguuguggaggagcuggucaagaaaagggaagagugucuagaugcacuggaguccaucaugaccaccaagucugugaguuucagacgucucagucacuugaggaaacuugugcccggguuuggaaaagcauauaccauauucaauaagaccuugauggaggcugaugcucacuacaaaucaguccggaccuggaaugagaucauccccuccaaaggguguuuaagagucggggggagaugucacccucaugugaacgggguguucuucaaugguaucaucuuaggcccugacggccaugugcuaaucccggagaugcagucgucucuccuccagcagcauauggaguuauuggaauccucagucauucccuuaaugcaucccuuggcagauccaucaacaguuuuuaaagaugaugacgaggcggaagauuuuguugagguucaccuuccagaugugcacaagcaggucucaggggucgaucucggucucccaagcugggggaaguauguguugaugagcgcaggcgucuugaccgcauuaauguugaugauuuucuuaaugacguguuguagaaggaccaauagagcagaaucagcacaacacagucuuggagagagggggaggaaagugucgguaaccucccaaagcgggcggguuauauccucaugggagucauacaaaaguggaggugagaccaagcuguaa

SEQ ID NO: 63858 - RNA, 1575 nt, Artificial Sequence
  derived and/or modified CDS sequence (wt) from glycoprotein__RABV__LC018517.1
augauuccucaggcucuuuuguuuguaccccuccuggucuuuucauuguguuucggaaaauuucccaucuacacgauaccggacaaacuuggucccuggagccccauugauauacaucaucucagcuguccgaacaauuugguuguggaggaugaaggauguaccaaccugucagguuucucguacauggaacucaagguaggauacauuucagccaucaaagugaauggguucacuuguacggguguagugacagaagcagagaccuacaccaacuuuguuggcuaugucacuaccacguuuaagagaaagcacuuccgcccaacgccggaugcaugcagagccgcauauaacuggaagauggcuggugaccccagauaugaagaaucucugcauaauccuuacccugauuaucauuggcuccgaacugugaagaccaccaaagaaucucuuguuaucauaucuccaaguguggcagauuuggacccauacgauaaaucccuucacucgagaguuuuuccuaacggaaaaugcucaggcauaacggugucuucuaccuacugcuccacuaaccacgacuauaccaucuggaugccugagaauccuagacuagggaccucuugugacauuuucaccaacagcagagggaagagagcaucaaaagggagcaagaccuguggauuuguagaugagagaggccuguacaagucucugaaaggagcaugcaaacugaaacuaugugggguucugggacucagacuuauggauggaacaugggccgcgauccagacaucagaugagaccaaauggugcccuccugaucaguuagugaaccuacaugacuuucgcucggaugaaauugaacaucuuguuguggaggagcuggucaagaaaagagaagagugucuagaugcacuggaguccaucaugaccacaaagucugugaguuucagacgucucagucacuugaggaaacuugugcccggguuuggaaaagcauauaccauauucaauaagaccuugauggaggcugaugcucacuacaaaucaguccggacuuggaaugagaucauccccucuaaaggguguuuaagagucggggggagaugucacccucauguaaacgggguguucuucaaugguaucaucuuaggcccugacggccaugugcuaaucccggagaugcagucgucucuccuccagcagcauauggaguuauuggaauccucagucauccccuuaaugcaucccuuggcagauccaucaacaguuuuuaaagaugaugacgaggcggaagauuuuguugagguucaccuuccagaugugcacaagcaggucucaggggucgaucucggucucccaagcugggggaaguauguguugaugagcgcaggcgucucgaccgcauuaauguugaugauuuucuuaaugacguguugucgaagggccaauagagcagaaucagcacaacacagucuuggagagagggggaggaaagugucgguaaccucccaaagcgggcggguuauauccucaugggagucauacaaaaguggaggugagaccaagcuguaa

SEQ ID NO: 63859 - RNA, 1575 nt, Artificial Sequence
  derived and/or modified CDS sequence (wt) from glycoprotein__RABV__LC018518.1
augauuccucaggcucuuuuguuuguaccccuucuggucuuuucauuguguuucggaaaauuucccaucuacacgauaccggacaaacuuggucccuggagccccauugauauacaucaucucagcuguccgaacaauuugguuguggaggaugaaggauguaccaaccugucagguuucucguacauggaacucaagguaggauacauuucagccaucaaagugaacggguucacuuguacggguguagugacagaagcagagaccuacaccaacuuuguuggcuaugucacuaccacguuuaagagaaagcacuuccgcccaacgccggaugcaugcagagccgcauauaacuggaagauggcuggugaccccagauaugaagaaucucugcauaauccuuacccugauuaucauuggcuccgaacugugaagaccaccaaagaaucucuuguuaucauaucuccaaguguggcagauuuggacccauacgauaaaucccuucacucgagaguuuuuccuagcggaaaaugcucaggcauaacggugucuucuaccuacugcuccacuaaccacgacuauaccaucuggaugccugagaauccuagacuagggaccucuugugacauuuucaccaauagcagagggaagagagcguccaaagggagcaagaccuguggauuuguagaugagagaggccuguacaagucucugaaaggagcaugcaaacugaaacuaugugggguucugggacucagacuuauggaugggacaugggccgcgauccagacaucagaugagaccaaauggugcccuccugaucaguuagugaaccuacaugacuuucgcucggaugaaauugaacaucuuguuguggaggagcuggucaagaaaagggaagagugucuagaugcacuggaguccaucaugaccaccaagucuguuaguuucagacgucucagucacuugaggaaacuugugcccggguuuggaaaagcauauaccauauucaauaagaccuugauggaggcugaugcucacuacaaaucaguccgaacuuggaaugagaucauccccucuaaaggguguuuaagagucggggggagaugucacccucaugugaacgggguguucuucaaugguaucaucuuaggcccugacggccaugugcuaaucccggagaugcagucgucucuccuccagcagcauauggaguuauuggaauccucagucauccccuuaaugcaucccuuggcagauccaucaacaguuuuuaaagaugaugacgaggcggaagauuuuguugagguucaccuuccagaugugcacaagcaggucucagggguugaucucggucucccaagcugggggaaguauguguugaugagcgcaggcgucuugaccgcauuaauguugaugauuuucuuaaugacguguuguagaagggccaauagaguagaaucagcacaacacagucuuggagagagggggaggaaagugucuguaaccucccaaagcgggcggguuauauccucaugggagucauacaaaaguggaggugagaccaagcuguaa

SEQ ID NO: 63860 - RNA, 1575 nt, Artificial Sequence
  derived and/or modified CDS sequence (wt) from glycoprotein__RABV__LC018519.1
augauuccucaggcucuuuuguuuguaccccuucuggucuuuucauuguguuucggaaaauuucccaucuacacgauaccggacaaacuuggucccuggagccccauugauauacaucaucucagcuguccgaacaauuugguuguggaggaugaaggauguaccaaccugucagguuucucguacauggaacucaagguaggauacauuucagccaucaaagugaacggguucacuuguacggguguagugacagaagcagagaccuacaccaacuuuguuggcuaugucacuaccacguuuaagagaaagcacuuccgcccaacgccggaugcaugcagagccgcauauaacuggaagauggcuggugaccccagauaugaagaaucucugcauaauccuuacccugauuaucauuggcuccgaacugugaagaccaccaaagaaucucuuguuaucauaucuccaaguguggcagauuuggacccauacgauaaaucccuucacucgagaguuuuuccuagcggaaaaugcucaggcauaacggugucuucuaccuacugcuccacuaaccacgacuauaccaucuggaugccugagaauccuagacuagggaccucuugugacauuuucaccaauagcagagggaagagagcguccaaagggagcaagaccuguggauuuguagaugagagaggccuguacaagucucugaaaggagcaugcaaauugaaacuaugugggguucugggacucagacuuauggaugggacaugggccgcgauccagacaucagaugagaccaaauggugcccuccugaucaguuagugaaccuacaugacuuucgcucggaugaaauugaacaucuuguuguggaggagcuggucaagaaaagggaagagugucuagaugcacuggaguccaucaugaccaccaagucuguuaguuucagacgucucagucacuugaggaaacuugugcccggguuuggaaaagcauauaccauauucaauaagaccuugauggaggcugaugcucacuacaaaucaguccgaacuuggaaugagaucauccccucuaaaggguguuuaagagucggggggagaugucacccucaugugaacgggguguucuucaaugguaucaucuuaggcccugacggccaugugcuaaucccggagaugcagucgucucuccuccagcagcauauggaguuauuggaauccucagucauccccuuaaugcaucccuuggcagauccaucaacaguuuuuaaagaugaugacgaggcggaagauuuuguugagguucaccuuccagaugugcacaagcaggucucagggguugaucucggucucccaagcugggggaaguauguguugaugagcgcaggcgucuugaccgcauuaauguugaugauuuucuuaaugacguguuguagaagggccaauagaguagaaucagcacaacacagucuuggagagagggggaggaaagugucuguaaccucccaaagcgggcggguuauauccucaugggagucauacaaaaguggaggugagaccaagcuguaa

SEQ ID NO: 63861 - RNA, 1575 nt, Artificial Sequence
  derived and/or modified CDS sequence (wt) from glycoprotein__RABV__LC018520.1
augauuccucaggcucuuuuguuuguaccccuucuggucuuuucauuguguuucggaaaauuucccaucuacacgauaccggacaaacuuggucccuggagccccauugauauacaucaucucagcuguccgaacaauuugguuguggaggaugagggauguaccaaccugucagguuucucguacauggaacucaagguaggauacauuucagccaucaaagugaacggguucacuuguacggguguagugacagaagcagagaccuacaccaacuuuguuggcuaugucacuaccacguuuaagagaaagcacuuccgcccaacgccggaugcaugcagagccgcauauaacuggaagauggcuggugaccccagauaugaagaaucucugcauaauccuuacccugauuaucauuggcucagaacugugaagaccaccaaagaaucucuuguuaucauaucuccaaguguggcagauuuggacccauacgauaaaucucuucacucgagaguuuuuccuagcggaaaaugcucaggcauaacggugucuucuaccuacugcuccacuaaccacgacuauaccaucuggaugccugagaauccuagacuagggaccucuugugacauuuucaccaacagcagagggaagagggcaucaaaagggagcaagaccuguggauuuguagaugagagaggccuguacaagucucugaaaggagcaugcaaacugaaacuaugugggguucugggacucagacuuauggauggaacaugggccgcgauccagacaucagaugagaccaaauggugcccuccugaucaguuagugaaccuacaugacuuucgcucggaugaaauugaacaucuuguuguggaggagcuggucaagaaaagggaagagugucuagaugcacuggaguccaucaugaccacaaagucugugaguuucagacgucucagucacuugaggaaacuugugcccggguuuggaaaagcauauaccauauucaauaagaccuugauggaggcugaugcucacuacaaaucaguccggacuuggaaugagaucauccccucuaaaggguguuuaagagucggggggagaugucacccucauguaaacgggguguucuucaaugguaucaucuuaggcccugacggccaugugcuaaucccggagaugcagucgucucuccuccagcagcauauggaguuauuggaauccucagucauccccuuaaugcaucccuuggcagauccaucaacaguuuuuaaagaugaugacgaggcggaagauuuuguugagguucaccuuccagaugugcacaagcaggucucaggggucgaucuuggucucccaagcugggggaaguauguguugaugagcgcgggcgucuugaccgcauuaauguugaugauuuucuuaaugacguguugucgaagggccaauagagcagaaucagcacaacacagucuuggagagagggggaggaaagugucgguaaccucccaaagcgggcggguuauauccucaugggagucauacaaaaguggaggugagaccaagcuguaa

SEQ ID NO: 63862 - RNA, 1575 nt, Artificial Sequence
  derived and/or modified CDS sequence (wt) from glycoprotein__RABV__LC018522.1
augauuccucaggcucuuuuguuuguaccccuccuggucuuuucauuguguuucggaaaauuucccaucuacacgauaccggacaaacuuggucccuggagccccauugauauacaucaucucagcuguccgaacaauuugguuguggaggaugaaggauguaccaaccugucagguuucucguacauggaacucaagguaggauacauuucagccaucaaagugaauggguucacuuguacggguguagugacagaagcagagaccuacaccaacuuuguuggcuaugucacuaccacguuuaagagaaagcacuuccgcccaacgccggaugcaugcagagccgcauauaacuggaagauggcuggugaccccagauaugaagaaucucugcauaauccuuacccugauuaucauuggcuccgaacugugaagaccaccaaagaaucucuuguuaucauaucuccaaguguggcagauuuggacccauacgauaaaucccuucacucgagaguuuuuccuaacggaaaaugcucaggcauaacggugucuucuaccuacugcuccacuaaccacgacuauaccaucuggaugccugagaauccuagacuagggaccucuugugacauuuucaccaacagcagagggaagagagcaucaaaagggagcaggaccuguggauuuguagaugagagaggccuguacaagucucugaaaggagcaugcaaacugaaacuaugugggguucugggacucagacuuauggauggaacaugggccgcgauccagacaucagaugagaccaaauggugcccuccugaucaguuagugaaccuacaugacuuucgcucggaugaaauugaacaucuuguuguggaggagcuggucaagaaaagagaagagugucuagaugcacuggaguccaucaugaccacaaagucugugaguuucagacgucucagucacuugaggaaacuugugcccggguuuggaaaagcauauaccauauucaauaagaccuugauggaggcugaugcucacuacaaaucaguccggacuuggaaugagaucauccccucuaaaggguguuuaagagucggggggagaugucacccucauguaaacgggguguucuucaaugguaucaucuuaggcccugacggccaugugcuaaucccggagaugcagucgucucuccuccagcagcauauggaguuauuggaauccucagucauccccuuaaugcaucccuuggcagauccaucaacaguuuuuaaagaugaugacgaggcggaagauuuuguugagguucaccuuccagaugugcacaagcaggucucaggggucgaucucggucucccaagcugggggaaguauguguugaugagcgcaggcgucuugaccgcauuaauguugaugauuuucuuaaugacguguugucgaagggccaauagagcagaaucagcacaacacagucuuggagagagggggaggaaagugucgguaaccucccaaagcgggcggguuauauccucaugggagucauacaaaaguggaggugagaccaagcuguaa

SEQ ID NO: 63863 - RNA, 1575 nt, Artificial Sequence
  derived and/or modified CDS sequence (wt) from glycoprotein__RABV__LC018523.1
augauuccucaggcucuuuuguuuguaccccuucuggucuuuucauuguguuucggaaaauuucccaucuacacgauaccggacaaacuuggucccuggagccccauugauauacaucaucucagcuguccgaacaauuugguuguggaggaugaaggauguaccaaccugucagguuucucguacauggaacucaagguaggauacauuucagccaucaaagugaacggguucacuuguacggguguagugacagaagcagagaccuacaccaacuuuguuggcuaugucacuaccacguuuaagagaaagcacuuccgcccaacgccggaugcaugcagagccgcauauaacuggaagauggcuggugaccccagauaugaagaaucucugcauaauccuuacccugauuaucauuggcuccgaacugugaagaccaccaaagaaucucuuguuaucauaucuccaaguguggcagauuuggacccauacgauaaaucccuucacucgagaguuuuuccuagcggaaaaugcucaggcauaacggugucuucuaccuacugcuccacuaaccacgacuauaccaucuggaugccugagaauccuagacuagggaccucuugugacauuuucaccaauagcagagggaagagagcguccaaagggagcaagaccuguggauuuguagaugagagaggccuguacaagucucugaaaggagcaugcaaacugaaacuaugugggguucugggacucagacuuauggaugggacaugggccgcaauccagacaucagaugagaccaaauggugcccuccugaucaguuagugaaccuacaugacuuucgcucggaugaaauugaacaucuuguuguggaggagcuggucaagaaaagggaagagugucuagaugcacuggaguccaucaugaccaccaagucuguuaguuucagacgucucagucacuugaggaaacuugugcccggguuuggaaaagcauauaccauauucaauaagaccuugauggaggcugaugcucacuacaaaucagucagaacuuggaaugagaucauccccucuaaaggguguuuaagagucggggggagaugucacccucaugugaacgggguguucuucaaugguaucaucuuaggcccugacggccaugugcuaaucccggagaugcagucgucucuccuccagcagcauauggaguuauuggaauccucagucauccccuuaaugcaucccuuggcagauccaucaacaguuuuuaaagaugaugacgaggcggaagauuuuguugagguucaccuuccagaugugcacaagcaggucucagggguugaucucggucucccaagcugggggaaguauguguugaugagcgcaggcaucuugaccgcauuaauguugaugauuuucuuaaugacguguuguagaagggccaauagaguagaaucagcacaacacagucuuggagagagggggaggaaagugucuguaaccucccaaagcgggcggguuauauccucaugggagucauacaaaaguggaggugagaccaagcuguaa

SEQ ID NO: 63864 - RNA, 1575 nt, Artificial Sequence
  derived and/or modified CDS sequence (wt) from glycoprotein__RABV__LC018524.1
augauuccucaggcucuuuuguuuguaccccuucuggucuuuucauuguguuucggaaaauuucccaucuacacgauaccggacaaacuuggucccuggagccccauugauauacaucaucucagcuguccgaacaauuugguuguggaggaugaaggauguaccaaccugucagguuucucguacauggaacucaagguaggauacauuucagccaucaaagugaacggguucacuuguacggguguagugacagaagcagagaccuacaccaacuuuguuggcuaugucacuaccacguuuaagagaaagcacuuccgcccaacgccggaugcaugcagagccgcauauaacuggaagauggcuggugaccccagauaugaagaaucucugcauaauccuuacccugauuaucauuggcuccgaacugugaagaccaccaaagaaucucuuguuaucauaucuccaaguguggcagauuuggacccauacgauaaaucccuucacucgagaguuuuuccuagcggaaaaugcucaggcauaacggugucuucuaccuacugcuccacuaaccacgacuauaccaucuggaugccugagaauccuagacuagggaccucuugugacauuuucaccaauagcagagggaagagagcguccaaagggagcaagaccuguggauuuguagaugagagaggccuguacaagucucugaaaggagcaugcaaacugaaacuaugugggguucugggacucagacuuauggaugggacaugggccgcgauccagacaucagaugagaccaaauggugcccuccugaucaguuagugaaccuacaugacuuucgcucggaugaaauugaacaucuuguuguggaggagcuggucaagaaaagggaagagugucuagaugcacuggaguccaucaugaccaccaagucuguuaguuucagacgucucagucacuugaggaaacuugugcccggguuuggaaaagcauauaccauauucaauaagaccuugauggaggcugaugcucacuacaaaucaguccgaacuuggaaugagaucauccccucuaaaggguguuuaagagucggggggagaugucacccucaugugaacgggguguucuucaaugguaucaucuuaggcccugacggccaugugcuaaucccggagaugcagucgucucuccuccagcagcauauggaguuauuggaauccucagucauccccuuaaugcaucccuuggcagauccaucaacaguuuuuaaagaugaugacgaggcggaagauuuuguugagguucaccuuccagaugugcacaagcaggucucagggguugaucucggucucccaagcugggggaaguauguguugaugagcgcaggcgucuugaccgcauuaauguugaugauuuucuuaaugacguguuguagaagggccaauagaguagaaucagcacaacacagucuuggagagagggggaggaaagugucuguaaccucccaaagcgggcggguuauauccucaugggagucauacaaaaguggaggugagacuaagcuguaa

SEQ ID NO: 63865 - RNA, 1575 nt, Artificial Sequence
  derived and/or modified CDS sequence (wt) from glycoprotein__RABV__LC018525.1
augauuccucaggcucuuuuguuuguaccccuucuggucuuuucacuguguuucggaaaauuucccaucuacacgauaccggacaaacuuggucccuggagccccauugauauacaucaucucagcuguccgaacaauuuaguugucgaggaugaaggauguaccaaccugucagguuucucguacauggaacucaagguaggauacauuucagccaucaaagugaacggguucacuuguacggguguagugacagaagcagagaccuacaccaacuuuguuggcuaugucacuaccacguuuaagagaaagcacuuccgcccaacgccggaugcaugcagagccgcauauaacuggaagauggccggugaccccagauaugaagaaucucugcauaauccuuacccugauuaucauuggcuccgaacugugaagaccacuaaagaaucucuuguuaucauaucuccgaguguggcagauuuggacccauacgauaaaucccuucacucgagaguuuuuccuagcggaaaaugcucaggcauaacggugucuucuaccuacugcucuacuaaccacgacuauaccaucuggaugccugagaauccuagacuagggaccucuugugacauuuucacuaauagcagagggaagagagcauccaaagggaguaagaccuguggauuuguagaugagagaggccuguacaagucucugaaaggagcaugcaaacugaaacuauguggaguucugggacucagacuuauggauggaacaugggccgcgauccaaacaucagaugagaccaaauggugcccuccugaucaguuagugaaccuacaugacuuucgcucggaugaaauugaacauuuuguuguggaggagcucgucaagaaaagggaagagugucuagaugcacuggaguccaucauaaccaccaagucugugaguuucagacgucucagucacuugaggaaacuugugcccggguuuggaaaagcauauaccauauucaauaagaccuugauggaggcugaugcucacuacaaaucaguccggacuuggaaugagaucaucccaucuaaaggguguuuaagagucggggggagaugucacccucacgugaacgggguguucuucaaugguaucaucuugggcccugacggccaugugcuaaucccggagaugcagucgucucuccuccagcagcauauggaguuguuggaauccucagucauccccuuaaugcaucccuuggcagauccaucaacaguuuuuaaagaugaugacgaggcggaagauuuuguugagguucaccuuccagaugugcacaagcaggucucaggggucgaucucggucucccaagcugggggaaguauguguugaugagcgcaggcgucuugaccgcacuaauguugaugauuuucuuaaugacguguuguagaagggccaauagagcagaaucagcacaacacagucuuggagagagggggaggaaagugucaguaaccucccaaagcgggcggguuauauccucaugggagucauacaaaagugggggugagaccaagcuguaa

SEQ ID NO: 63866 - RNA, 1575 nt, Artificial Sequence
  derived and/or modified CDS sequence (wt) from glycoprotein__RABV__LC018526.1
augauuccucaggcucuuuuguuuguaccccuuauggucuuuucauuguguuucggaaaauuuccuaucuacacaauaccggacaaacuuggucccuggagccccauugauauacaucaucucagcuguccgaacaauuugguuguggaggaugaaggauguaccaacuugucagguuucucguacauggaacucaagguaggauacauuucagccaucaaagugaacggguucacuuguacggguguagugacagaggcagagaccuacaccaacuuuguuggcuaugucacuaccacauuuaagagaaagcacuuccgcccaaccccggaugcaugcagagccgcauauaacuggaagauggcuggugaccccagauaugaagaaucucugcauaauccuuacccugauuaucauuggcuccgaacugugaagaccaccaaagaaucucuuguuaucauaucuccaaguguggcagauuuggacccauacgauaaaucccuucacucgagaguuuuuccuagcggaaaaugcucaggcauaacggugucuucuaccuacugcuccacuaaccacgacuauaccaucuggaugccugagaauccuagacuagggaccucuugugacauuuucaccaauagcagagggaagagagcauccaaagggagcaagaccuguggauuuguagaugagagaggccuguacaagucucugaaaggagcaugcaaacugaaacuaugugggguucugggacucagacuuauggauggaacaugggccgcgauccagacaucagaugagaccaaauggugcccuccugaucaguuagugaaccuacaugacuuucgcucggaugaaauugaacaucuuguuguggaggagcuggucaagaaaagagaagagugucuagaugcacuggaguccaucaugaccaccaagucugugaguuucagacgucucagucacuugaggaaacuugugcccggguuuggaaaagcauauaccauauucaauaagaccuugauggaggcugaugcucacuacaaaucaguccggacuuggaaugagaucauccccucuaaaggguguuuaagagucggggggagaugucacccucaugugaacgggguguucuucaaugguaucaucuuaggcccugacggccaugugcuaaucccggagaugcagucgucucuccuccagcagcauauggaguuauuggaauccucagucauccccuuaaugcaucccuuggcagauccaucaacaguuuuuaaagaugaugacgaggcggaagauuuuguugagguucaccuuccagaugugcacaagcaggucucaggggucgaucucggucucccaagcugggggaaguauguguugaugagcgcaggcgucuugaccgccuuaauguugaugauuuucuuaaugacguguugcagaaggaccaauagagcagaaucagcacaacacagucuuggagagagggggaggaaagugucgguaaccucccaaagugggcggguuauauccucaugggagucauacaaaaguggaggugagaccaagcuguaa

SEQ ID NO: 63867 - RNA, 1575 nt, Artificial Sequence
  derived and/or modified CDS sequence (wt) from glycoprotein__RABV__LC018527.1
augauuccucaggcucuuuuguuuguaccccuucuggucuuuucauuguguuucggaaaauuuccuaucuacacaauaccggacaaacuuggucccuggagccccauugauauacaucaucucagcuguccgaacaauuugauuguggaggaugaaggauguaccaacuugucagguuucucguacauggaacucaagguaggauacauuucagccaucaaagugaacggguucacuuguacggguguagugacagaagcagagaccuacaccaacuuuguuggcuaugucacuaccacguuuaagagaaagcacuuccgcccaaccccggaugcaugcagagccgcauauaacuggaagauggcuggugaccccagauaugaagaaucucugcauaauccuuacccugauuaucauuggcuccgaacugugaagaccaccaaagaaucucuuguuaucauaucuccaaguguggcagauuuggacccauacgauaaaucccuucacucgagaguuuuuccuagcggaaaaugcucaggcauaacggugucuucuaccuacugcuccacuaaccacgacuauaccaucuggaugccugagaauccuagacuagggaccucuugugacauuuucaccaauagcagagggaagagagcauccaaagggagcaagaccuguggauuuguagaugagagaggccuguacaagucucugaaaggagcaugcaaacugaaacuaugugggguucugggacucagacuuauggauggaacaugggccgcgauccagacaucagaugagaccaaauggugcccuccugaucaguuagugaaccuacaugacuuucgcucggaugaaauugaacaucuuguuguggaggagcuggucaagaaaagagaagagugucuagaugcacuggaguccaucaugaccaccaagucugugaguuucagacgucucagucacuugaggaaacuugugcccggguuuggaaaagcauauaccauauucaauaagaccuugauggaggcugaugcucacuacaaaucaguccggacuuggaaugagaucauccccucuaaaggguguuuaagagucggggggagaugucacccucaugugaacgggguguucuucaaugguaucaucuuaggcccugacggccaugugcuaaucccggagaugcagucgucucuccuccagcagcauauggaguuauuggaauccucagucauccccuuaaugcaucccuuggcagauccaucaacaguuuuuaaagaugaugacgaggcggaagauuuuguugagguucaccuuccagaugugcacaagcaggucucaggggucgaucucggucucccaagcugggggaaguauguguugaugagcgcaggcgucuugaccgccuuaauguugaugauuuucuuaaugacguguugcagaaggaccaauagagcagaaucagcacaacacagucuuggagagagggggaggaaagugucgguaaccucccaaagugggcggguuauauccucaugggagucauacaaaaguggaggugagaccaagcuguaa

SEQ ID NO: 63868 - RNA, 1575 nt, Artificial Sequence
  derived and/or modified CDS sequence (wt) from glycoprotein__RABV__LC018529.1
augauuccucaggcucuuuuguuugugccccuucuggucuuuucauuguguuucggaaaauuuccuaucuacacaauaccggacaaacuuggucccuggagccccauugauauacaucaucucagcuguccgaacaauuugguuguggaggaugaaggauguaccaacuugucagguuucucguacauggaacucaagguaggauacauuucagccaucaaagugaacggguucacuuguacggguguagugacagaagcagagaccuacaccaacuuuguuggcuaugucacuaccacguuuaagagaaagcacuuccgcccaaccccggaugcaugcagagccgcauauaacuggaagauggcuggugaccccagauaugaagaaucucugcauaauccuuacccugauuaucauuggcuccgaacugugaagaccaccaaagaaucucuuguuaucauaucuccaaguguggcagauuuggacccauacgauaaaucccuucacucgagaguuuuuccuagcggaaaaugcucaggcauaacggugucuucuaccuacugcuccacuaaccacgacuauaccaucuggaugccugagaauccuagacuagggaccucuugugacauuuucaccaauagcagagggaagagagcauccaaagggagcaagaccuguggauuuguagaugagagaggccuguacaagucucugaaaggagcaugcaaacugaaacuaugugggguucugggacucagacuuauggauggaacaugggccgcgauccagacaucagaugagaccaaauggugcccuccugaucaguuagugaaccuacaugacuuucgcucggaugaaauugaacaucuuguuguggaggagcuggucaagaaaagagaagagugucuagaugcacuggaguccaucaugaccaccaagucugugaguuucagacgucucagucacuugaggaaacuugugcccggguuuggaaaagcauauaccauauucaauaagaccuugauggaggcugaugcucacuacaaaucaguccggacuuggaaugagaucauccccucuaaaggguguuuaagagucggggggagaugucacccucaugugaacgggguguucuucaaugguaucaucuuaggcccugacggccaugugcuaaucccggagaugcagucgucucuccuccagcagcauauggaguuauuggaauccucagucauccccuuaaugcaucccuuggcagauccaucaacaguuuuuaaagaugaugacgaggcggaagauuuuguugagguucaccuuccagaugugcacaagcaggucucaggggucgaucucggucucccaagcugggggaaguauguguugaugagcgcaggcgucuugaccgccuuaauguugaugauuuucuuaaugacguguugcagaaggaccaauagagcagaaucagcacaacacagucuuggagagagggggaggaaagugucaguaaccucccaaagugggcggguuauauccucaugggagucauacaagaguggaggugagaccaagcuguaa

SEQ ID NO: 63869 - RNA, 1575 nt, Artificial Sequence
  derived and/or modified CDS sequence (wt) from glycoprotein__RABV__LC018531.1
augauuccucaggcucuuuuguuugugccccuucuggucuuuucauuguguuucggaaaauuuccuaucuacacaauaccggacaaacuuggucccuggagccccauugauauacaucaucucagcuguccgaacaauuugguuguggaggaugaaggauguaccaacuugucagguuucucguacauggaacucaagguaggauacauuucagccaucaaagugaacggguucacuuguacggguguagugacagaagcagagaccuacaccaacuuuguuggcuaugucacuaccacguuuaagagaaagcacuuccgcccaaccccggaugcaugcagagccgcauauaacuggaagauggcuggugaccccagauaugaagaaucucugcauaauccuuacccugauuaucauuggcuccgaacugugaagaccaccaaagaaucucuuguuaucauaucuccaaguguggcagauuuggacccauacgauaaaucccuucacucgagaguuuuuccuaguggaaaaugcucaggcauaacggugucuucuaccuacugcuccacuaaccacgacuauaccaucuggaugccugagaauccuagacuagggaccucuugugacauuuucaccaauagcagagggaagagagcauccaaagggagcaagaccuguggauuuguagaugagagaggccuguacaagucucugaaaggagcaugcaaacugaaacuaugugggguucugggacucagacuuauggauggaacaugggccgcgauccagacaucagaugagaccaaauggugcccuccugaucaguuagugaaccuacaugacuuucgcucggaugaaauugaacaucuuguuguggaggagcuggucaagaaaagagaagagugucuagaugcacuggaguccaucaugaccaccaagucugugaguuucagacgucucagucacuugaggaaacuugugcccggguuuggaaaagcauauaccauauucaauaagaccuugauggaggcugaugcucacuacaaaucaguccggacuuggaaugagaucauccccucuaaaggguguuuaagagucggggggagaugucacccucaugugaacgggguguucuucaaugguaucaucuuaggcccugacggccaugugcuaaucccggagaugcagucgucucuccuccagcagcauauggaguuauuggaauccucagucauccccuuaaugcaucccuuggcagauccaucaacaguuuuuaaagaugaugacgaggcggaagauuuuguugagguucaccuuccagaugugcacaagcaggucucaggggucgaucucggucucccaagcugggggaaguauguguugaugagcgcaggcgucuugaccgccuuaauguugaugauuuucuuaaugacguguugcagaaggaccaauagagcagaaucagcacaacacagucuuggagagagggggaggaaagugucaguaaccucccaaagugggcggguuauauccucaugggagucauacaaaaguggaggugagaccaagcuguaa

SEQ ID NO: 63870 - RNA, 1575 nt, Artificial Sequence
  derived and/or modified CDS sequence (wt) from glycoprotein__RABV__LC018532.1
augauuccucaggcucuuuuguuuguaccccuucuggucuuuucauuguguuucggaaaauuucccaucuacacgauaccggacaaacuuggucccuggagccccauugauauacaucaucucagcuguccgaacaauuugguuguggaggaugaaggauguaccaaccugucagguuucucguacauggaacucaagguaggauacauuucagccaucaaagugaacggguucacuuguacggguguagugacagaagcagagaccuacaccaacuuugucggcuaugucacuaccacguuuaagagaaagcacuuccgcccaacgccggaugcaugcagagccgcauauaacuggaagauggcuggcgaccccagauaugaagaaucucugcauaacccuuacccugauuaucauuggcuccgaacugugaagaccaccaaagaaucucuugucauaauaucuccaaguguggcagauuuggacccauacgauaaaucccuucacucgagaguuuuuccuagcggaaaaugcucaggcauaacggugucuucuaccuacugcucuacuaaccaugacuauaccaucuggaugccugagaauccuagacuagggaccucuugugacauuuucaccaauagcagagggaagagagcauccaaagggagcaagaccuguggauuuguagaugagagaggccuguacaagucucugaaaggagcaugcaaacugaaacugugugggguucugggacucagacuuauggauggaacaugggccgcgauccagacaucagaugagaccaaauggugcccuccugaucaguuagugaaccuacaugacuuucgcucggaugaaauugaacaucuugucguggaggagcuggucaagaaaagggaagagugucuagaugcacuggaguccaucaugaccaccaagucugugaguuucagacgucucagucacuugaggaaacuugugccuggguuuggaaaagcauauaccauauuuaauaagaccuugauggaggcugaugcucacuacaaaucaguccggacuuggaaugagaucauccccucuaaaggguguuuaaggguaggggggagaugucacccucaugugaacgggguguucuucaacgguaucaucuuaggcccugacggccauguguuaaucccggagaugcagucgucucuccuccagcagcauauggaguuguuggaauccucagucauccccuuaaugcaccccuuggcagauccaucaacaguuuuuaaagaugaugacgaggcggaagauuuuguugagguucaccuuccagaugugcacaagcaggucucaggggucgaucucggucucccaagcugggggaaguauguguugaugagcgcaggcgucuugaccgcgcuaauguugaugauuuucuuaaugacguguuguagaagggccaauagaguagaaucagcacaacacagucuuggagagagggggaggaaagugucgguaaccucccaaagcgggcggguuauauccucaugggagucguacaaaaguggaggugagaccaagcuguaa

SEQ ID NO: 63871 - RNA, 1575 nt, Artificial Sequence
  derived and/or modified CDS sequence (wt) from glycoprotein__RABV__LC018534.1
augauuccucaggcucuuuuguuugugccccuucuggucuuuucauuguguuucggaaaauuuccuaucuacacaauaccggacaaacuuggucccuggagccccauugauauacaucaucucagcuguccgaacaauuugguuguggaggaugaaggauguaccaacuugucagguuucucguacauggaacucaagguaggauacauuucagccaucaaagugaacggguucacuuguacggguguagugacagaagcagagaccuacaccaacuuuguuggcuaugucacuaccacguuuaagagaaagcacuuccgcccaaccccggaugcaugcagagccgcauauaacuggaagauggcuggugaccccagauaugaagaaucucugcauaauccuuacccugauuaucauuggcuccgaacugugaagaccaccaaagaaucucuuguuaucauaucuccaaguguggcagauuuggacccauacgauaaaucccuucacucgagaguuuuuccuagcggaaaaugcucaggcauaacggugucuucuaccuacugcuccacuaaccacgacuauaccaucuggaugccugagaauccuagacuagggaccucuugugacauuuucaccaauagcagagggaagagagcauccaaagggagcaagaccuguggauuuguagaugagagaggccuguacaagucucugaaaggagcaugcaaacugaaacuaugugggguucugggacucagacuuauggauggaacaugggccgcgauccagacaucagaugagaccaaauggugcccuccugaucaguuagugaaccuacaugacuuucgcucggaugaaauugaacaucuuguuguggaggagcuggucaagaaaagagaagagugucuagaugcacuggaguccaucaugaccaccaagucugugaguuucagacgucucagucacuugaggaaacuugugcccggguuuggaaaagcauauaccauauucaauaagaccuugauggaggcugaugcucacuacaaaucaguccggacuuggaaugagaucauccccucuaaaggguguuuaagagucggggggagaugucacccucaugugaacgggguguucuucaaugguaucaucuuaggcccugacggccaugugcuaaucccggagaugcagucgucucuccuccagcagcauauggaguuauuggaauccucagucauccccuuaaugcaucccuuggcagauccaucaacaguuuuuaaagaugaugacgaggcggaagauuuuguugagguucaccuuccagaugugcacaagcaggucucaggggucgaucucggucucccaagcugggggaaguauguguugaugagcgcaggcgucuugaccgccuuaauguugaugauuuucuuaaugacguguugcagaaggaccaauagagcagaaucagcacaacacagucuuggagagagggggaggaaagugucaguaaccucccaaagugggcggguuauauccucaugggagucauacaaaaguggaggugagaccaagcuguaa

SEQ ID NO: 63872 - RNA, 1575 nt, Artificial Sequence
  derived and/or modified CDS sequence (wt) from glycoprotein__RABV__LC018535.1
augauuccucaggcucuuuuguuuguaccccuucuggucuuuucauuguguuucggaaaauuucccaucuacacgauaccggacaaacuuggucccuggagccccauugauauacaucaucucagcuguccgaacaauuugguuguggaggaugaaggauguaccaaccugucagguuucucguacauggaacucaagguaggauacauuucagccaucaaagugaacggguucacuuguacggguguagugacagaagcagagaccuacaccaacuuuguuggcuaugucacuaccacguuuaagagaaagcacuuccgcccaacgccggaugcaugcagagccgcauauaacuggaagauggcuggugaccccagauaugaagaaucucugcauaauccuuacccugauuaucauuggcuccgaacugugaagaccaccaaagaaucucuuguuaucauaucuccaaguguggcagauuuggacccauaugauaaaucccuucacucgagaguuuuuccuagcggaaaaugcucaggcauaacggugucuucuaccuacugcuccacuaaccacgacuauaccaucuggaugcccgagaauccuagacuagggaccucuugugacauuuucaccaauagcagagggaagagagcauccaaagggagcaagaccuguggauuuguggaugagagaggccuguacaagucucugaaaggagcaugcaaacugaaacuaugugggguucugggacucagacuuauggauggaacaugggccgcgauccagacaucagaugagaccaaauggugcccuccugaccaguuagugaaccuacaugacuuucgcucggaugaaauugagcaucuuguuguggaggagcuggucaagaaaagggaagagugucuagaugcacuggaguccaucaugaccaccaagucugugaguuucagacgucucagucacuugaggaaacuugugcccggguuuggaaaagcauauaccauauucaauaagaccuugauggaggcugaugcucacuacaaaucaguccggacuuggaaugagaucauccccuccaaaggguguuuaagagucggggggagaugucacccucaugugaacgggguguucuucaaugguaucaucuuaggcccugacggccaugugcuaaucccggagaugcagucgucucuccuccagcagcauauggaguuauuggaauccuccgucauucccuuaaugcaucccuuggcagauccaucaacaguuuuuaaagaugaugacgaggcggaagauuuuguugagguucaccuuccagaugugcacaagcaggucucaggggucgaucucggucucccaagcugggggaaguauguguugaugagcgcaggcgucuugaccgcauuaauguugaugauuuucuuaaugacguguuguagaaggaccaauagagcagaaucagcacaacacagucuuggagagagggggaggaaagugucgguaaccucccaaagcgggcggguuauauccucaugggagucauacaaaaguggaggugagaccaagcuguaa

SEQ ID NO: 63873 - RNA, 1575 nt, Artificial Sequence
  derived and/or modified CDS sequence (wt) from glycoprotein__RABV__LC018536.1
augauuccucaggcucuuuuguuuguaccccuucuggucuuuucauuguguuucggaaaauuucccaucuacacgauaccggacaaacuuggucccuggagccccauugauauacaucaucucagcuguccgaacaauuugguuguggaggaugaaggauguaccaaccugucagguuucucguacauggaacucaagguaggauacauuucagccaucaaagugaacggguucacuuguacggguguagugacagaagcagagaccuacaccaacuuugucggcuaugucacuaccacguuuaagagaaagcacuuccgcccaacgccggaugcaugcagagccgcauauaacuggaagauggcuggugaccccagauaugaagaaucucugcauaacccuuacccugauuaucauuggcuccgaacugugaagaccaccaaagaaucucuugucauaauaucuccaaguguggcagauuuggacccauacgauaaaucccuucacucgagaguuuuuccuagcggaaaaugcucaggcauaacggugucuucuaccuacugcucuacuaaccacgacuauaccaucuggaugccugagaauccuagacuagggaccucuugugacauuuucaccaauagcagagggaagagagcauccaaagggagcaagaccuguggauuuguagaugagagaggccuguacaagucucugaaaggagcaugcaaacugaaacugugugggguucugggacucagacuuauggauggaacaugggccgcgauccagacaucagaugagaccaaauggugcccuccugaucaguuagugaaccuacaugacuuucgcucggaugaaauugaacaucuugucguggaggagcuggucaagaaaagggaagagugucuagaugcacuggaguccaucaugaccaccaagucugugaguuucagacgucucagucacuugaggaaacuugugccuggguuuggaaaagcauauaccauauuuaauaagaccuugauggaggcugaugcucacuacaaaucaguccggacuuggaaugagaucauccccucuaaaggguguuuaagaguaggggggagaugucacccucaugugaacgggguguucuucaacgguaucaucuuaggcccugacggccaugugcuaaucccggagaugcagucgucucuccuccagcagcauauggaguuguuggaauccucagucauccccuuaaugcaucccuuggcagauccaucaacaguuuuuaaagaugaugacgaggcggaagauuuuguugagguucaccuuccagaugugcacaagcaggucucaggggucgaucucggucucccaagcugggggaaguauguguugaugagcgcaggcgucuugaccgcgcuaauguugaugauuuucuuaaugacguguuguagaagggccaauagaguagaaucagcacaacacagucuuggagagagggggaggaaagugucgguaaccucccaaagcgggcggguuauauccucaugggagucguacaaaaguggaggugagaccaagcuguaa

SEQ ID NO: 63874 - RNA, 1575 nt, Artificial Sequence
  derived and/or modified CDS sequence (wt) from glycoprotein__RABV__LC018539.1
augauuccucaggcucuuuuguuuguaccccuucuggucuuuucauuguguuucggaaaauuucccaucuacacgauaccggacaaacuuggucccuggagccccauugauauacaucaucucagcuguccgaacaauuugguuguggaggaugaaggauguaccaaccugucagguuucucguacauggaacucaagguaggauacauuucagccaucaaagugaacggguucacuuguacggguguaguaacagaagcagagaccuacaccaacuuuguuggcuaugucacuaccacguuuaagagaaagcacuuccgcccaacgccggaugcaugcagagccgcauauaacuggaagauggcuggugaccccagauaugaagaaucucugcauaauccuuacccugauuaucauuggcuccgaacugugaagaccaccaaagaaucucuuguuaucauaucuccaaguguggcagauuuggacccauaugauaaaucccuucacucgagaguuuuuccuagcggaaaaugcucaggcauaacggugucuucuaccuacugcuccacuaaccacgacuauaccaucuggaugcccgagaauccuagacuagggaccucuugugacauuuucaccaauagcagagggaagagagcauccaaagggagcaagaccuguggauuuguggaugagagaggccuguacaagucucugaaaggagcaugcaaacugaaacuaugugggguucugggacucagacuuauggauggaacaugggccgcgauccagacaucagaugagaccaaauggugcccuccugaccaguuagugaaccuacaugacuuucgcucggaugaaauugagcaucuuguuguggaggagcuggucaagaaaagggaagagugucuagaugcacuggaguccaucaugaccaccaagucugugaguuucagacgucucagucacuugaggaaacuugugcccggguuuggaaaagcauauaccauauucaauaagaccuugauggaggcugaugcucacuacaaaucaguccggacuuggaaugagaucauccccuccaaaggguguuuaagagucggggggagaugucacccucaugugaacgggguguucuucaaugguaucaucuuaggcccugacggccaugugcuaaucccggagaugcagucgucucuccuccagcagcauauggaguuauuggaauccuccgucauucccuuaaugcaucccuuggcagauccaucaacaguuuuuaaagaugaugacgaggcggaagauuuuguugagguucaccuuccagaugugcacaagcaggucucaggggucgaucucggucucccaagcugggggaaguauguguugaugagcgcaggcgucuugaccgcauuaauguugaugauuuucuuaaugacguguuguagaaggaccaauagagcagaaucagcacaacacagucuuggagagagggggaggaaagugucgguaaccucccaaagcgggcggguuauauccucaugggagucauacaaaaguggaggugagaccaagcuguaa

SEQ ID NO: 63875 - RNA, 1575 nt, Artificial Sequence
  derived and/or modified CDS sequence (wt) from glycoprotein__RABV__LC018540.1
augauuccucaggcucuuuuguuuguaccccuucuggucuuuucauuguguuucggaaaauuucccaucuacacgauaccggacaaacuuggucccuggagccccauugauauacaucaucucagcuguccgaacaauuugguuguggaggaugaaggauguaccaaccugucagguuucucguacauggaacucaagguaggauacauuucagccaucaaagugaacggguucacuuguacggguguagugacagaagcagagaccuacaccaacuuuguuggcuaugucacuaccacguuuaagagaaagcacuuccgcccgacgccggaugcaugcagagccgcauauaacuggaagauggcuggugaccccagauaugaagaaucucugcauaacccuuacccugauuaucauuggcuccgaacugugaagaccaccaaagaaucucuugucaucauaucuccaaguguggcagauuuggacccauacgauagaucccuucacucgagaguuuuuccuagcggaaaaugcucaggcauaacggugucuucuaccuacugcucuacuaaccacgacuauaccaucuggaugccugagaauccuagacuagggaccucuugugacauuuucaccaauagcagaggaaagagagcauccaaagggagcaagaccuguggauuuguagaugagagaggccuguacaagucucugaaaggagcaugcaaacugaaacugugugggguucugggacucagacuuauggauggaacaugggccgcgauccagacaucagaugagaccaaguggugcccuccugaucaguuagugaaccuacaugacuuucgcucggaugaaauugaacaucuugucguggaggagcuggucaagaaaagggaagagugucuagaugcacuggaguccaucaugaccaccaagucugugaguuucagacggcucagucacuugaggaaacuugugccuggguuuggaaaagcauauaccauauuuaauaagaccuugauggaggcugaugcucacuacaaaucaguccggacuuggaaugagaucauccccucuaaaggguguuuaagaguaggggggagaugucacccucaugugaacgggguguucuucaacgguaucaucuuaggcccugacggccaugugcuaaucccggagaugcagucgucucuccuccagcagcauauggaguuguuggaauccucagucauccccuuaaugcaccccuuggcagauccaucaacaguuuuuaaagaugaugacgaggcggaagauuuuguugagguucaccuuccagaugugcacaagcaggucucaggggucgaucucggucucccaagcugggggaaguauguguugaugagcgcaggcgucuugaccgcgcuaauguugaugauuuucuuaaugacguguuguagaagggccaauagaguagaaucagcacaacacagucuuggagagagggggaggaaagugucgguaaccucccaaagcgggcggguuauauccucaugggagucguacaaaaguggaggugagaccaagcuguaa

SEQ ID NO: 63876 - RNA, 1575 nt, Artificial Sequence
  derived and/or modified CDS sequence (wt) from glycoprotein__RABV__LC018542.1
augauuccucaggcucuuuuguuuguaccccuucuggucuuuucauuguguuucggaaaauuucccaucuacacgauaccggacaaacuuggucccuggagccccauugauauacaucaucucagcuguccgaacaauuugguuguggaggaugaaggauguaccaaccugucagguuucucguacauggaacucaagguaggauacauuucagccaucaaagugaacggguucacuuguacggguguagugacagaagcagagaccuacaccaacuuuguuggcuauguaacuaccacguuuaagagaaagcacuuccgcccaacgccggaugcaugcagagccgcauauaacuggaagauggcuggugaccccagauaugaagaaucucugcauaacccuuacccugauuaucauuggcuccgaacugugaagaccaccaaagaaucgcuugucaucauaucuccaaguguggcagauuuggacccauacgauaaaucccuucacucgagaguuuuuccuagcggaaaaugcucaggcauaacggugucuucuaccuacugcucuacuaaccacgacuauaccaucuggaugccugagaauccuagacuagggaccucuugugacauuuucaccaguagcagagggaagagagcauccaaagggagcaagaccuguggauuuguagaugagagaggccuguacaagucucugaaaggagcaugcaaacugaaacugugugggguucugggacucagacuuauggauggaacaugggccgcuauccagacaucagaugagaccaaauggugcccuccugaucaguuagugaaccuacaugacuuucgcucggaugaaauugaacaucuugucguggaggagcuggucaagaaaagggaagagugucuagaugcacuggaguccaucaugaccaccaagucugugaguuuuagacgucucagucacuugaggaaacuugugccuggguuuggaaaagcauauaccauauuuaauaagaccuugauggaggcugaugcucacuacaaaucaguccggacuuggaaugagaucauccccucuaaaggguguuuaagaguaggggggagaugucacccucaugugaacgggguguucuucaacgguaucaucuuaggcccugacggccaugugcuaaucccggagaugcagucgucucuccuccagcagcauauggaguuguuggaauccucagucauccccuuaaugcaccccuuggcagauccaucaacaguuuuuaaagaugaugacgaggcggaagauuuuguugagguucaccuuccagaugugcacaagcaggucucaggggucgaucucggucucccaagcugggggaaguauguguugaugagcgcaggcgucuugaccgcgcuaauguugaugauuuucuuaaugacguguuguagaagggccaauagaguagaaucagcacaacacagucuuggagagagggggaggaaagugucgguaaccucccaaagcgggcggguuauauccucaugggagucguacaaaaguggaggugagaccaagcuguaa

SEQ ID NO: 63877 - RNA, 1575 nt, Artificial Sequence
  derived and/or modified CDS sequence (wt) from glycoprotein__RABV__LC018544.1
augauuccucaggcucuuuuguuuguaccccuucuggucuuuucauuguguuucggaaaauuucccaucuacacgauaccggacaaacuuggucccuggagccccauugauauacaucaucucagcuguccgaacaauuugguuguggaggaugaaggauguaccaaccugucagguuucucguacauggaacucaagguaggauacauuucagccaucaaagugaacggguucacuuguacggguguagugacagaagcagagaccuacaccaacuuugucggcuaugucacuaccacguuuaagagaaagcacuuccgcccaacgccggaugcaugcagagccgcauauaacuggaagauggcuggugaccccagauaugaagaaucucugcauaacccuuacccugauuaucauuggcuccgaacugugaagaccaccaaagaaucucuugucauaauaucuccaaguguggcagauuuggacccauacgauaaaucccuucacucgagaguuuuuccuagcggaaaaugcucaggcauaacggugucuucuaccuacugcucuacuaaccacgacuauaccaucuggaugccugagaauccuagacuagggaccucuugugacauuuucaccaauagcagagggaagagagcauccaaagggagcaagaccuguggauuuguagaugagagaggccuguacaagucucugaaaggagcaugcaaacugaaacugugugggguucugggacucagacuuauggauggaacaugggccgcgauccagacaucagaugagaccaaauggugcccuccugaucaguuagugaaccuacaugacuuucgcucggaugaaauugaacaucuugucguggaggagcuggucaagaaaagggaagagugucuagaugcacuggaguccaucaugaccaccaagucugugaguuucagacgucucagucacuugaggaaacuugugccuggguuuggaaaagcauauaccauauuuaauaagaccuugauggaggcugaugcucacuacaaaucaguccggacuuggaaugagaucauccccucuaaaggguguuuaagaguaggggggagaugucacccucaugugaacgggguguucuucaacgguaucaucuuaggcccugacggccaugugcuaaucccggagaugcagucgucucuccuccagcagcauauggaguuguuggaauccucagucauccccuuaaugcaucccuuggcagauccaucaacaguuuuuaaagaugaugacgaggcggaagauuuuguugagguucaccuuccagaugugcacaagcaggucucaggggucgaucucggucucccaagcugggggaaguauguguugaugagcgcaggcgucuugaccgcgcuaauguugaugauuuucuuaaugacguguuguagaagggccaauauaguagaaucagcacaacacagucuuggagagagggggaggaaagugucgguaaccucccaaagcgggcggguuauauccucaugggagucguacaaaaguggaggugagaccaagcuguaa

SEQ ID NO: 63878 - RNA, 1575 nt, Artificial Sequence
  derived and/or modified CDS sequence (wt) from glycoprotein__RABV__LC018545.1
augauuccucaggcucuuuuguuuguaccccuucuggucuuuucacuguguuucggaaaauuucccaucuacacgauaccggacaaacuuggucccuggagccccauugauauacaucaucucagcuguccgaacaauuuaguugucgaggaugaaggauguaccaaccugucagguuucucguacauggaacucaagguaggauacauuucagccaucaaagugaacggguucacuuguacggguguagugacagaagcagagaccuacaccaacuuuguuggcuaugucacuaccacguuuaagagaaagcacuuccgcccaacgccggaugcaugcagagccgcauauaacuggaagauggccggugaccccagauaugaagaaucucugcauaauccuuacccugauuaucauuggcuccgaacugugaagaccacuaaagaaucucuuguuaucauaucuccgaguguggcagauuuggacccauacgauaaaucccuucacucgagaguuuuuccuagcggaaaaugcucaggcauaacggugucuucuaccuacugcucuacuaaccacgacuauaccaucuggaugccugagaauccuagacuagggaccucuugugacauuuucacuaauagcagagggaagagagcauccaaagggaguaagaccuguggauuuguagaugagagaggccuguacaagucucugaaaggagcaugcaaacugaaacuauguggaguucugggacucagacuuauggauggaacaugggccgcgauccaaacaucagaugagaccaaauggugcccuccugaucaguuagugaaccuacaugacuuucgcucggaugaaauugaacaucuuguuguggaggagcuagucaagaaaagggaagagugucuagaugcacuggaguccaucaugaccaccaagucugugaguuucagacgucucagucacuugaggaaacuugugcccggguuuggaaaagcauauaccauauucaauaagaccuugauggaggcugaugcucacuacaaagcaguccggacuuggaaugagaucaucccaucuaaaggguguuuaagagucggggggagaugucacccucacgugaacgggguguucuucaaugguaucaucuugggcccugacggccaugugcuaaucccggagaugcagucgucucuccuccagcagcauauggaguuguuggaguccucagucauccccuuaaugcaucccuuggcagauccaucaacaguuuuuaaagaugaugacgaggcggaagauuuuguugagguucaccuuccagaugugcacaagcaggucucaggggucgaucucggucucccaagcugggggaaguauguguugaugagcgcaggcgucuugaccgcacuaauguugaugauuuucuuaaugacguguuguagaagggccaauagagcagaaucagcacaacacagucuuggagagagggggaggaaagugucgguaaccucccaaagcgggcggguuauauccucaugggagucauacaaaagugggggugagaccaagcuguaa

SEQ ID NO: 63879 - RNA, 1575 nt, Artificial Sequence
  derived and/or modified CDS sequence (wt) from glycoprotein__RABV__LC018546.1
augauuccucaggcucuuuuguuuguaccccuucuggucucuucauuguguuucggaaaauuucccaucuacacgauaccggacaaacuuggucccuggagccccauugauauacaucaucucagcuguccgaacaauuuaguuguggaggaugaaggauguaccaaccugucagguuucucguacauggaacucaagguaggauacauuucagccaucaaagugaacggguucacuuguacggguguagugacagaagcagagaccuacaccaacuuuguuggcuaugucacuaccacguuuaagagaaagcacuuccguccaacgccagaugcaugcagagccgcauauaacuggaagauggcuggugaccccagauaugaagaaucucugcauaauccuuacccugauuaucauuggcuccgaacugugaagaccaccaaagaaucucuuguuaucauaucuccaaguguggcagauuuggacccauacgauaaaucccuucacucgagaguuuuuccuagcggaaaaugcucgggcauaacggugucuucuaccuacugcucuaccaaccacgacuauaccauuuggaugccugagaauccuagacuagggaccucuugugacauuuucacuaauagcagagggaagagagcauccaaagggagcaagaccugcggauuuguagaugagagaggccuguacaagucucugaaaggagcaugcaaacugaaacuaugugggguucugggacucagacuuauggacggaacaugggccgcgauccagacaucagaugagaccaaauggugcccuccugaucaguuagugaaccuacaugacuuucgcucggaugaaauugaacaucuuguuguggaggagcuggucaagaaaagggaagagugucuagaugcacuggaguccaucaugaccaccaagucugugaguuucagacgucucagucacuugaggaaacuugugcccggguuuggaaaagcauauaccauauucaauaagaccuugauggaggcugaugcucacuacaaaucaguccggacuuggaaugagaucaucccaucuaaaggguguuuaagagucggggggagaugucacccucaugugaacgggguguucuucaaugguaucaucuuaggcccugacggccaugugcuaaucccggagaugcagucgucucuccuccagcagcauauggaguuguuggaauccucagucauccccuuaaugcaucccuuggcagauccaucaacaguuuucaaagaugaugacgaggcggaagauuuuguugagguucaucuuccagaugugcacaagcaggucucaggggucgaucucggucucccaagcugggggaaguauguguugacgagcgcaggcgucuugaccgcacuaauguugaugauuuucuuaaugacguguuguagaaaggccaauagagcagaaucugcacaacacagucuuggagagagggggaggaaagugucaguaaccucucaaagcgggcggguuauauccucaugggagucauacaaaaguggaggugagaccaagcuguaa

SEQ ID NO: 63880 - RNA, 1575 nt, Artificial Sequence
  derived and/or modified CDS sequence (wt) from glycoprotein__RABV__LC018548.1
augauuccucaggcucuuuuguuuguaccccuucuggucuuuucauuguguuucggaaaauuucccaucuacacgauaccggacaaacuuggucccuggagccccauugauauacaucaucucagcuguccgaacaauuugguuguggaggaugaaggauguaccaaccugucagguuucucguacauggaacucaagguaggauacauuucagccaucaaagugaacggguucacuuguacggguguagugacagaagcagagaccuacaccaacuuuguuggcuaugucacuaccacguuuaagagaaagcacuuccgcccaacgccggaugcaugcagagccgcauauaacuggaagauggcuggugaccccagauaugaagaaucucugcauaacccuuacccugauuaucauuggcuccgaacugugaagaccaccaaagaaucucuugucaucauaucuccaaguguggcagauuuggacccauacgauaaaucccuucacucgagaguuuuuccuagcggaaaaugcucaggcauaacggugucuucuaccuacugcucuacuaaccacgacuauaccaucuggaugccugagaauccuagacuagggaccucuugugacauuuucaccaauagcagagggaagagagcauccaaagggagcaagaccuguggauuuguagaugagagaggccuguacaagucucugaaaggagcaugcaaacugaaacugugugggguuccgggacucagacuuauggauggaacaugggccgcgauccagacaucagaugagaccaaauggugcccuccugaucaguuagugaaccuacaugacuuucgcucggaugaaauugaacaucuugucguggaggagcuggucaagaaaagggaagagugucuagaugcacuggaguccaucaugaccaccaagucugugaguuucagacgucucagucacuugaggaaacuugugccuggguuuggaaaagcauauaccauauuuaauaagaccuugauggaggcugaugcucacuacaaaucaguccggacuuggaaugagaucauccccucuaaaggguguuuaagaguaggggggagaugucacccucaugugaacgggguguucuucaacgguaucaucuuaggcccugacggccaugugcuaaucccggagaugcagucgucucuccuccagcagcauauggaguuguuggaauccucagucauccccuuaaugcaccccuuggcagauccaucaacaguuuuuaaagaugaugacgaggcggaagauuuuguugagguucaccuuccagaugugcacaagcaggucucaggggucgaucucggucucccaagcugggggaaguauguguugaugagcgcaggcgucuugaccgcgcuaauguugaugauuuucuuaaugacguguuguagaagggccaauagagcagaaucagcacaacacagucuuggagagagggggaggaaagugucaguaaccucccaaagcgggcggguuauauccucaugggagucguacaaaaguggaggugagaccaagcuguaa

SEQ ID NO: 63881 - RNA, 1575 nt, Artificial Sequence
  derived and/or modified CDS sequence (wt) from glycoprotein__RABV__LC018549.1
augauuccucaggcucuuuuguuuguaccccuucuggucuuuucauuguguuucggaaaauuucccaucuacacgauaccggacaaacuuggucccuggagccccauugauauacaucaucucagcuguccgaacaauuugguuguggaggaugaaggauguaccaaccugucagguuucucguacauggaacucaagguaggauacauuucagccaucaaagugaacggguucacuuguacggguguagugacagaagcagagaccuacaccaacuuuguuggcuaugucacuaccacguuuaagagaaagcacuuccgcccaacgccggaugcaugcagagccgcauauaacuggaagauggcuggugaccccagauaugaagaaucucugcauaauccuuacccugauuaucauuggcuccgaacugugaagaccaccaaagaaucucuuguuaucauaucuccaaguguggcagauuuggacccauacgauaaaucccuucacucgagaguuuuuccuagcggaaaaugcucaggcauaacggugucuucuaccuacugcuccacuaaccacgacuauaccaucuggaugccugagaauccuagacuagggaccucuugugacauuuucaccaauagcagagggaagagagcguccaaagggagcaagaccuguggauuuguagaugagagaggccuguacaagucucugaaaggagcaugcaaacugaaacuaugugggguucugggacucagacuuauggaugggacaugggccgcaauccagacaucagaugagaccaaauggugcccuccugaucaguuagugaaccuacaugacuuucgcucggaugaaauugaacaucuuguuguggaggagcuggucaagaaaagggaagagugucuagaugcacuggaguccaucaugaccaccaagucuguuaguuucagacgucucagucacuugaggaaacuugugcccggguuuggaaaagcauauaccauauucaauaagaccuugauggaggcugaugcucacuacaaaucagucagaacuuggaaugagaucauccccucuaaaggguguuuaagagucggggggagaugucacccucaugugaacgggguguucuucaaugguaucaucuuaggcccugacggccaugugcuaaucccggagaugcagucgucucuccuccagcagcauauggaguuauuggaauccucagucauccccuuaaugcaucccuuggcagauccaucaacaguuuuuaaagaugaugacgaggcggaagauuuuguugagguucaccuuccagaugugcacaagcaggucucagggguugaucucggucucccaagcugggggaaguauguguugaugagcgcaggcgucuugaccgcauuaauguugaugauuuucuuaaugacguguuguagaagggccaauagaguagaaucagcacaacacagucuuggagagagggggaggaaagugucuguaaccucccaaagcgggcggguuauauccucaugggagucauacaaaaguggaggugagaccaagcuguaa

SEQ ID NO: 63882 - RNA, 1575 nt, Artificial Sequence
  derived and/or modified CDS sequence (wt) from glycoprotein__RABV__LC018552.1
augauuccucaggcucuuuuguuuguaccccuccuggucuuuucauuguguuucggaaaauuucccaucuacacgauaccggacaaacuuggucccuggagccccauugauauacaucaucucagcuguccgaacaauuugguuguggaggaugaaggauguaccaaccugucagguuucucguacauggaacucaagguaggauacauuucagccaucaaagugaauggguucacuuguacggguguagugacagaagcagagaccuacaccaacuuuguugguuaugucacuaccacguuuaagagaaagcacuuccgcccaacgccggaugcaugcagagccgcauauaacuggaagauggcuggugaccccagauaugaagaaucucugcauaauccuuacccugauuaucauuggcuccgaacugugaagaccaccaaagaaucucuuguuaucauaucuccaaguguggcagauuuggacccauacgauaaaucccuucacucgagaguuuuuccuaacggaaaaugcucaggcauaacggugucuucuaccuacugcuccacuaaccacgacuauaccaucuggaugccugagaauccuagacuagggaccucuugugacauuuucaccaacagcagagggaagagagcaucaaaagggagcaagaccuguggauuuguagacgagagaggccuguacaagucucugaaaggagcaugcaaacugaaacuaugugggguucugggacucagacuuauggauggaacaugggccgcgauccagacaucagaugagaccaaauggugcccuccugaucagcuagugaaccuacaugacuuucgcucggaugaaauugaacaucuuguuguggaggagcuggucaagaaaagagaagagugucuagaugcacuggaguccaucaugaccacaaagucugugaguuucagacgucucagucacuugaggaaacuugugcccggguuuggaaaagcauauaccauauucaauaagaccuugauggaggcugaugcucacuacaaaucaguccggacuuggaaugagaucauccccucuaaaggguguuuaagagucggggggagaugucacccucauguaaacgggguguucuucaaugguaucaucuuaggcccugacggccaugugcuaaucccggagaugcagucgucucuccuccagcagcauauggaguuauuggaauccucagucauccccuuaaugcaucccuuggcagauccaucaacaguuuuuaaagaugaugacgaggcggaagauuuuguugagguucaccuuccagaugugcacaagcaggucucaggggucgaucucggucucccaagcugggggaaguauguguugaugagcgcaggcgucuugaccgcauuaauguugaugauuuucuuaaugacguguugucgaagggccaauagagcagaaucagcacaacacagucuaggagagagggggaggaaagugucgguaaccucccaaagcgggcggguuauauccucaugggagucauacaaaaguggaggugagaccaagcuguaa

SEQ ID NO: 63883 - RNA, 1575 nt, Artificial Sequence
  derived and/or modified CDS sequence (wt) from glycoprotein__RABV__LC018553.1
augauuccucaggcucuuuuguuuguaccccuucuggucuuuucauuguguuucggaaaauuucccaucuacacgauaccggacaaacuuggucccuggagccccauugauauacaucaucucagcuguccgaacaauuugguuguggaggaugaaggauguaccaaccugucagguuucucguacauggaacucaagguaggauacauuucagccaucaaagugaacggguucacuuguacggguguagugacagaagcagagaccuacaccaacuuuguuggcuaugucacuaccacguuuaagagaaagcacuuccgcccaacgccggaugcaugcagagccgcauauaacuggaagauggcuggugaccccagauaugaagaaucucugcauaauccuuacccugauuaucauuggcuccgaacugugaagaccaccaaagaaucucuuguuaucauaucuccaaguguggcagauuuggacccauacgauaaaucccuucacucgagaguuuuuccuagcggaaaaugcucaggcauaacggugucuucuaccuacugcuccacuaaccacgacuauaccaucuggaugccugagaauccuagacuagggaccucuugugacauuuucaccaacagcagagggaagagagcaucaaaagggagcaagaccuguggauuuguagaugagagaggccuguacaagucucugaaaggagcaugcaaauugaaacuaugugggguucugggacucagacuuauggauggaacaugggccgcgauccagacgucagaugagaccaaauggugcccuccugaucaguuagugaaccuacaugacuuucgcucggaugaaauugaacaucuuguuguggaggagcuggucaagaaaagggaagagugucuagaugcacuggaguccaucaugaccacaaagucugugaguuucagacgucucagucacuugaggaaacuugugcccggguuuggaaaagcauauaccauauucaauaagaccuugauggaggcugaugcucacuacaaaucaguccggacuuggaaugagaucauccccucuaaaggguguuuaagagucggggggagaugucacccucauguaaacgggguguucuucaaugguaucaucuuaggcccugacggccaugugcuaaucccggagaugcagucgucucuccuccagcagcauauggaguuauuggaauccucagucauccccuuaaugcaucccuuggcagauccaucaacaguuuuuaaagaugaugacgaggcggaagauuuuguugagguucaccuuccagaugugcacaagcaggucucaggugucgaucucggucucccaagcugggggaaguauguguugaugagcgcaggcgucuugaccgcauuaauguugaugauuuucuuaaugacguguugucgaagggccaauagagcagaaucagcacaacacagucuuggagagagggggaggaaagugucgguaaccucccagagcgggcggguuauauccucaugggagucauacaaaaguggaggugagaccaagcuguaa

SEQ ID NO: 63884 - RNA, 1575 nt, Artificial Sequence
  derived and/or modified CDS sequence (wt) from glycoprotein__RABV__LC018554.1
augauuccucaggcucuuuuguuuguaccccuucuggucuuuucauuguguuucggaaaauuucccaucuacacgauaccggacaaacuuggucccuggagccccauugauauacaucaucucagcuguccgaacaauuugguuguggaggaugaaggauguaccaaccugucagguuucucguacauggaacucaagguaggauacauuucagccaucaaagugaacggguucacuuguacggguguagugacagaagcagagaccuacaccaacuuuguuggcuaugucacuaccacguuuaagagaaagcacuuccgcccaacgccggaugcaugcagagccgcauauaacuggaagauggcuggugaccccagauaugaagaaucucugcauaauccuuacccugauuaucauuggcuccgaacugugaagaccaccaaagaaucucuuguuaucauaucuccaaguguggcagauuuggacccauacgauaaaucccuucacucgagaguuuuuccuagcggaaaaugcucaggcauaacggugucuucuaccuacugcuccacuaaccacgacuauaccaucuggaugccugagaauccuagacuagggaccucuugugacauuuucaccaauagcagagggaagagagcguccaaagggagcaagaccuguggauuuguagaugagagaggccuguacaagucucugaaaggagcaugcaaacugaaacuaugugggguucugggacucagacuuauggaugggacaugggccgcgauccagacaucagaugagaccaaauggugcccuccugaucaguuagugaaccuacaugacuuucgcucggaugaaauugaacaucuuguuguggaggagcuggucaagaaaagggaagagugucuagaugcacuggaguccaucaugaccaccaagucuguuaguuucagacgucucagucacuugaggaaacuugugcccggguuuggaaaagcauauaccauauucaauaagaccuugauggaggcugaugcucacuacaaaucaguccgaacuuggaaugagaucauccccucuaaaggguguuuaagagucggggggagaugucacccucaugugaacgggguguucuucaaugguaucaucuuaggcccugacggccaugugcuaaucccggagaugcagucgucucuccuccagcagcauauggaguuauuggaauccucagucauccccuuaaugcaucccuuggcagauccaucaacaguuuuuaaagaugaugacgaggcggaagauuuuguugagguucaccuuccagaugugcacaagcaggucucagggguugaucucgguuucccaagcugggggaaguauguguugaugagcgcaggcgucuugaccucauuaauguugaugauuuucuuaaugacguguuguagaagggccaauagaguagaaucagcacaacacagucuuggagagagggggaggaaagugucuguaaccucccaaagcgggcggguuauauccucaugggagucauacaaaaguggaggugagaccaagcuguaa

SEQ ID NO: 63885 - RNA, 1575 nt, Artificial Sequence
  derived and/or modified CDS sequence (wt) from glycoprotein__RABV__LC018555.1
augauuccucaggcucuuuuguuuguaccccuucuggucuuuucacuguguuucggaaaauuucccaucuacacgauaccagacaaacuuggucccuggagccccauugauauacaucaucucagcuguccgaacaauuuaguugucgaggaugaaggauguaccaaccugucagguuucucguacauggaacucaagguaggauacauuucagccaucaaagugaacggguucacuuguacggguguagugacagaagcagagaccuacaccaacuuuguuggcuaugucacuaccacguuuaagagaaagcacuuccgcccaacgccggaugcaugcagagccgcauauaacuggaagauggccggugaccccagauaugaagaaucucugcauaauccuuacccugauuaucauuggcuccgaacugugaagaccacuaaagaaucucuuguuaucauaucuccgaguguggcagauuuggacccauacgauaaaucccuucacucgagaguuuuuccuagcggaagaugcucaggcauaacggugucuucuaccuacugcucuacuaaccacgacuauaccaucuggaugccugagaauccuagacuagggaccucuugugacauuuucacuaauagcagagggaagagagcauccaaagggaguaagaccuguggauuuguagaugagagaggccuguacaagucucugaaaggagcaugcaaacugaaacuauguggaguucugggacucagacuuauggauggaacaugggccgcgauccaaacaucagaugagaccaaauggugcccuccugaucaguuagugaaccuacaugacuuucgcucggaugaaauugaacaucuuguuguggaggagcuggucaagaaaagggaagagugucuagaugcacuggaguccaucaugaccaccaagucugugaguuucagacgucucagucacuugaggaaacuugugccuggguuuggaaaagcauauaccauauucaacaagaccuugauggaggcugaugcucacuacaaaucaguccggacuuggaaugagaucaucccaucuaaaggguguuuaagagucggggggagaugucacccucacgugaacgggguguucuucaacgguaucaucuugggcccugacggccaugugcuaaucccggagaugcagucgucucuccuccagcagcauauggaguuguuggaauccucagucauccccuuaaugcaucccuuggcagauccaucaacaguuuuuaaagaugaugacgaggcggaagauuuuguugagguucaccuuccagaugugcacaagcaggucucaggggucgaccucggucucccaagcugggggaaguauguguugaugagcgcaggcgucuugaccgcacuaauguugaugauuuucuuaaugacguguuguagaagggccaauagagcagaaucagcacaacacagucuuggagagagggggaggaaagugucgguaaccucccaaagcgggcggguuauauccucaugggagucauacaaaagugggggugagaccaagcuguaa

SEQ ID NO: 63886 - RNA, 1575 nt, Artificial Sequence
  derived and/or modified CDS sequence (wt) from glycoprotein__RABV__LC018556.1
augauuccucaggcucuuuuguuuguaccccuucuggucuuuucacuguguuucggaaaauuucccaucuacacgauaccggacaaacuuggucccuggagccccauugauauacaucaucucagcuguccgaacaauuuaguugucgaggaugaaggauguaccaaccugucagguuucucguacauggaacucaagguaggauacauuucagccaucaaagugaacggguucacuuguacggguguagugacagaagcagagaccuacaccaacuuuguuggcuaugucacuaccacguuuaagagaaagcacuuccgcccaacgccggaugcaugcagagccgcauauaacuggaagauggccggugaccccagauaugaagaaucucugcauaauccuuacccugauuaucauuggcuccgaacugugaagaccacuaaagaaucucuuguuaucauaucuccgaguguggcagauuuggacccauacgauaaaucccuucacucgagaguuuuuccuagcggaaaaugcucaggcauaacggugucuucuaccuacugcucuacuaaccacgacuauaccaucuggaugccugagaauccuagacuagggaccucuugugacauuuucacuaauagcagagggaagagagcauccaaagggaguaagaccuguggauuuguagaugagagaggccuguacaagucucugaaaggagcaugcaaacugaaacuauguggaguucugggacucagacuuauggauggaacaugggccgcgauccaaacaucagaugagaccaaauggugcccuccugaucaguuagugaaccuacaugacuuucgcucggaugaaauugaacaucuuguuguggaggagcucgucaagaaaagggaagagugucuagaugcacuggaguccaucaugaccaccaagucugugaguuucagacgucucagucacuugaggaaacuugugcccggguuuggaaaagcauauaccauauucaauaagaccuugauggaggcugaugcucacuacaaaucaguccggacuuggaaugagaucaucccaucuaaaggguguuuaagagucggggggagaugucacccucacgugaacgggguguucuucaaugguaucaucuugggcccugacggccaugugcuaaucccggagaugcagucgucucuccuccagcagcauauggaguuguuggaauccucagucauccccuuaaugcaucccuuggcagauccaucaacaguuuuuaaagaugaugacgaggcggaagauuuuguugagguucaccuuccagaugugcacaagcaggucucaggggucgaucucggucucccaagcugggggaaguauguguugaugagcgcaggcgucuugaccgcacuaauguugaugauuuucuuaaugacguguuguagaagggccaauagagcagaaucagcacaacacagucuuggagagagggggaggaaagugucaguaaccucccaaagcgggcggguuauauccucaugggagucauacaaaagugggggugagaccaagcuguaa

SEQ ID NO: 63887 - RNA, 1575 nt, Artificial Sequence
  derived and/or modified CDS sequence (wt) from glycoprotein__RABV__LC018557.1
augauuccucaggcucuuuuguuuguaccccuucuggucuuuucauuguguuucggaaaauuucccaucuacacgauaccggacaaacuuggucccuggagccccauugauauacaucaucucagcuguccgaacaauuugguuguggaggaugaaggauguaccaaccugucagguuucucguacauggaacucaagguaggauacauuucagccaucaaagugaacggguucacuuguacggguguagugacagaagcagagaccuacaccaacuuuguuggcuaugucacuaccacguuuaagagaaagcacuuccgcccaacgccggaugcaugcagagccgcauauaacuggaagauggcuggugaccccagauaugaagaaucucugcauaauccuuacccugauuaucauuggcuccgaacugugaagaccaccaaagaaucucuuguuaucauaucuccaaguguggcagauuuggacccauacgauaaaucccuucacucgagaguuuuuccuagcggaaaaugcucaggcauaacggugucuucuaccuacugcuccacuaaccacgacuauaccaucuggaugccugagaauccuagacuagggaccucuugugacauuuucaccaacagcagagggaagagagcaucaaaagggagcaagaccuguggauuuguagaugagagaggccuguacaagucucugaaaggagcaugcaaacugaaacuaugugggguucugggacucagacuuauggauggaacaugggccgcgauccagacaucagaugagaccaaauggugcccuccugaucaguuagugaaccuacaugacuuucgcucggaugaaauugaacaucuuguuguggaggagcuggucaagaaaagggaagagugucuagaugcacuggaguccaucaugaccacaaagucugugaguuucagacgucucagucacuugaggaaacuugugcccggguuuggaaaagcauauaccauauucaauaagaccuugauggaggcugaugcucacuacaaaucaguccggacuuggaaugagaucauccccucuaaaggguguuuaagagucggggggagaugucacccucauguaaacgggguguucuucaaugguaucaucuuaggcccugacggccaugugcuaaucccggagaugcagucgucucuccuccagcagcauauggaguuauuggaaucuucagucauccccuuaaugcaucccuuggcagauccaucaacaguuuuuaaagaugaugacgaggcggaagauuuuguugagguucaccuuccagaugugcacaagcaggucucagggguugaucucggucucccaagcugggggaaguauguguugaugagcgcaugcgucuugaccgcauuaauguugaugauuuucuuaaugacguguuguagaagggccaauagagcagaaucagcacaacacagucuuggagagagggggaggaaagugucgguaaccucccaaagcgggcggguuauauccucaugggagucauacaaaaguggaggugagaccaagcuguaa

SEQ ID NO: 63888 - RNA, 1575 nt, Artificial Sequence
  derived and/or modified CDS sequence (wt) from glycoprotein__RABV__LC018558.1
augauuccucaggcucuuuuguuuguaccccuucuggucuuuucauuguguuucggaaaauuucccaucuacacaauaccggacaaacuuggucccuggagccccauugauauacaucaucucagcuguccgaauaauuugguuguggaggaugaaggauguaccaaccugucagguuucucguacauggaacucaagguaggauacauuucagccaucaaagugaacggguucacuuguacggguguagugacagaagcagagaccuacaccaacuuuguuggcuaugucacuaccacguuuaagagaaagcacuuccgcccaacgccggaugcaugcagagccgcauauaacuggaagauggcuggugaccccagauaugaagaaucucugcauaauccuuacccugauuaucauuggcuccgaacugugaagaccaccaaagaaucucuuguuaucauaucucccaguguggcagauuuggacccauaugauaaaucccuucacucgagagucuuuccuagcggaaaaugcucaggcauaacggugucuucuaccuacugcuccacuaaccacgacuauaccaucuggaugcccgagaauccuagacuagggaccucuugugacauuuucaccaauagcagagggaagagagcauccaaagggagcaagaccuguggauuuguggaugagagaggccuguacaagucucugaaaggagcaugcaaacugaaacuaugugggguucugggacucagacuuauggauggaacaugggccgcgauccagacaucagaugagaccaaauggugcccuccugaccaguuagugaaccuacaugacuuucgcucggaugaaauugagcaucuuguuguggaggagcuggucaagaaaagggaagagugucuagaugcacuggaguccaucaugaccaccaagucugugaguuucagacgucucagucacuugaggaaacuugugcccggguuuggaaaagcauauaccauauucaauaagaccuugauggaggcugaugcucacuacaaaucaguccggaccuggaaugagaucauccccuccaaaggguguuuaagagucggggggagaugucacccucaugugaacgggguguucuucaaugguaucaucuuaggcccugacggccaugugcuaaucccggagaugcagucgucucuccuccagcagcauauggaguuauuggaauccucagucauucccuuaaugcaucccuuggcagauccaucaacaguuuuuaaagaugaugacgaggcggaagauuuuguugagguucaccuuccagaugugcacaagcaggucucaggggucgaucucggucucccaagcugggggaaguauguguugaugagcgcaggcgucuugaccgcauuaauguugaugauuuucuuaaugacguguuguagaaggaccaauagagcagaaucagcacaacacagucuuggagagagggggaggaaagugucgguaaccucccaaagcgggcggguuauauccucaugggagucauacaaaaguggaggugagaccaagcuguaa

SEQ ID NO: 63889 - RNA, 1575 nt, Artificial Sequence
  derived and/or modified CDS sequence (wt) from glycoprotein__RABV__LC018561.1
augauuccucaggcucuuuuguuuguaccccuucuggucuuuucauuguguuucggaaaauuucccaucuacacgauaccggacaaacuuggucccuggagccccauugauauacaucaucucagcuguccgaauaauuugguuguggaggaugaaggauguaccaaccugucagguuucucguacauggaacucaagguaggauacauuucagccaucaaagugaacggguucacuuguacggguguagugacagaagcagagaccuacaccaacuuuguuggcuaugucacuaccacguuuaagagaaagcacuuccgcccaacgccggaugcaugcagagccgcauauaacuggaagauggcuggugaccccagauaugaagaaucucugcauaauccuuacccugauuaucauuggcuccgaacugugaagaccaccaaagaaucucuuguuaucauaucucccaguguggcagauuuggacccauaugauaaaucccuucacucgagagucuuuccuagcggaaaaugcucaggcauaacggugucuucuaccuacugcuccacuaaccacgacuauaccaucuggaugcccgagaauccuagacuagggaccucuugugacauuuucaccaauagcagagggaagagagcauccaaagggagcaagaccuguggauuuguggaugagagaggccuguacaagucucugaaaggagcaugcaaacugaaacuaugugggguucugggacucagacuuauggauggaacaugggccgcgauccagacaucagaugagaccaaauggugcccuccugaccaguuagugaaccuacaugacuuucgcucggaugaaauugagcaucuuguuguggaggagcuggucaagaaaagggaagagugucuagaugcacuggaguccaucaugaccaccaagucugugaguuucagacgucucagucacuugaggaaacuugugcccggguuuggaaaagcauauaccauauucaauaagaccuugauggaggcugaugcucacuacaaaucaguccggaccuggaaugagaucauccccuccaaaggguguuuaagagucggggggagaugucacccucaugugaacgggguguucuucaaugguaucaucuuaggcccugacggccaugugcuaaucccggagaugcagucgucucuccuccagcagcauauggaguuauuggaauccucagucauucccuuaaugcaucccuuggcagauccaucaacaguuuuuaaagaugaugacgaggcggaagauuuuguugagguucaccuuccagaugugcacaagcaggucucaggggucgaucucggucucccaagcugggggaaguauguguugaugagcgcaggcgucuugaccgcauuaauguugaugauuuucuuaaugacguguuguagaaggaccaauagagcagagucagcacaacacagucuuggagagagggggaggaaagugucgguaaccucccaaagcgggcggguuauauccucaugggagucauacaaaaguggaggugagaccaagcuguaa

SEQ ID NO: 63890 - RNA, 1575 nt, Artificial Sequence
  derived and/or modified CDS sequence (wt) from glycoprotein__RABV__LC018562.1
augauuccucaggcucuuuuguuuguaccccuucuggucuuuucauuguguuucggaaaauuucccaucuacacgauaccggacaaacuuggucccuggagccccauugauauacaucaucucagcuguccgaacaauuugguuguggaggaugaaggauguaccaaccugucagguuucucguacauggaacucaagguaggauacauuucagccaucaaagugaacggguucacuuguacggguguagugacagaagcagagaccuacaccaacuuuguuggcuaugucacuaccacguuuaagagaaagcacuuccgcccaacgccggaugcaugcagagccgcauauaacuggaagauggcuggugaccccagauaugaagaaucucugcauaauccuuacccugauuaucauuggcuccgaacugugaagaccaccaaagaaucucuuguuaucauaucuccaaguguggcagauuuggacccauaugauaaaucccuucacucgagaguuuuuccuagcggaaaaugcucaggcauaacggugucuucuaccuacugcuccacuaaccacgacuauaccaucuggaugcccgagaauccuagacuagggaccucuugugacauuuucaccaauagcagagggaagagagcauccaaagggagcaagaccuguggauuuguggaugagagaggccuguacaagucucugaaaggagcaugcaaacugaaacuaugugggguucugggacucagacuuauggauggaacaugggccgcgauccagacaucagaugagaccaaauggugcccuccugaccaguuagugaaccuacaugacuuucgcucggaugaaauugagcaucuuguuguggaggagcuggucaagaaaagggaagagugucuagaugcacuggaguccaucaugaccaccaagucugugaguuucagacgucucagucacuugaggaaacuugugcccggguuuggaaaagcauauaccauauucaauaagaccuugauggaggcugaugcucacuacaaaucaguccggacuuggaaugagaucauccccuccaaagggugcuuaagagucggggggagaugucacccucaugugaacgggguguucuucaaugguaucaucuuaggcccugacggccaugugcuaaucccggagaugcagucgucucuccuccagcagcauauggaguuauuggaauccucagucauucccuuaaugcaucccuuggcagauccaucaacaguuuuuaaagaugaugacgaggcggaagauuuuguugagguucaccuuccagaugugcacaagcaggucucaggggucgaucucggucucccaagcugggggaaguauguguugaugagcgcaggcgucuugaccgcauuaauguugaugauuuucuuaaugacguguuguagaaggaccaauagagcagaaucagcacaacacagucuuggagagagggggaggaaagugucgguaaccucccaaagcgggcggguuauauccucaugggagucauacaaaaguggaggugagaccaagcuguaa

SEQ ID NO: 63891 - RNA, 1575 nt, Artificial Sequence
  derived and/or modified CDS sequence (wt) from glycoprotein__RABV__LC018564.1
augauuccucaggcucuuuuguuuguaccccuucuggucuuuucguuguguuucggaaaauuucccaucuacacgauaccggacaaacuuggucccuggagccccauugauauacaucaucucagcuguccgaacaauuugguuguggaggaugaaggauguaccaaccugucagguuucucguacauggaacuuaagguaggauacauuucagccaucaaaguaaacggguucacuuguacggguguagugacagaagcagagaccuacaccaacuuuguuggcuaugucacuaccacguuuaagagaaagcacuuccgcccaacgccggaugcaugcagagccgcauauaacuggaagauggcuggugaccccagauaugaagaaucucugcauaauccuuacccugauuaucauuggcuccgaacugugaagaccaccaaagaaucucuuguuaucauaucuccaaguguggcagauuuggacccauaugauaaaucccuucacucgagaguuuuuccuagcggaaaaugcucaggcauaacggugucuucuaccuacugcuccacuaaccacgacuauaccaucuggaugccugagaauccuagacuagggaccucuugugacauuuucaccaauagcagagggaagagagcauccaaagggagcaagaccuguggauuuguggaugagagaggccuguacaagucucugaaaggagcaugcaaacugaaacuaugugggguucugggacucagacuuauggauggaacaugggccgcgauccagacaucagaugagaccaaauggugcccuccugaccaguuagugaaccuacaugacuuucgcucggaugaaauugagcaucuuguuguggaggagcuggucaagaaaagggaagagugucuagaugcacuggaguccaucaugaccaccaagucugugaguuucagacgucucagucacuugaggaaacuugugcccggguuuggaaaagcauauaccauauucaacaagaccuugauggaggcugaugcucacuacaaaucaguccggacuuggaaugagaucauccccuccaaaggguguuuaagagucggggggagaugucacccucaugugaacgggguguucuucaaugguaucaucuuaggcccugacggccaugugcuaaucccggagaugcagucgucucuccuccagcagcauauggaguuauuggaauccucagucauucccuuaaugcaucccuuggcagauccaucaacaguuuuuaaagaugaugacgaggcggaagauuuuguugagguucaccuuccagaugugcacaagcaggucucaggggucgaucucggucucccaagcugggggaaguauguguugaugagcgcaggcgucuugaccgcauuaauguugaugauuuucuuaaugacguguuguagaaggaccaauagagcagaaucagcacaacacagucuuggagagagggggaggaaagugucgguaaccucccaaagcgggcggguuauauccucaugggagucauacaaaaguggaggugagaccaagcuguaa

SEQ ID NO: 63892 - RNA, 1575 nt, Artificial Sequence
  derived and/or modified CDS sequence (wt) from glycoprotein__RABV__LC018565.1
augauuccucaggcucuuuuguuuguaccccuucuagucuuuucauuguguuucggaaaauuuccuaucuacacaauaccggacaaacuuggucccuggagccccauugauauacaucaucucagcuguccgaacaauuugguuguggaggaugaaggauguaccaacuugucagguuucucguacauggaacucaagguaggauacauuucagccaucaaagugaacggguucacuuguacggguguagugacagaagcagagaccuacaccaacuuuguuggcuaugucacuaccacguuuaagagaaagcacuuccgcccaacgccggaugcaugcagagccgcauauaacuggaagauggcuggugaccccagauaugaagaaucucugcauaauccuuacccugauuaucauuggcuccgaacugugaagaccaccaaagaaucucuuguuaucauaucuccaaguguggcagauuuggacccauacgauaaaucccuucacucgagaguuuuuccuagcggaaaaugcucaggcauaacggugucuucuaccuacugcuccacuaaccacgacuauaccaucuggaugccugagaauccuagacuagggaccucuugugacauuuucaccaauagcagagggaagagagcauccaaagggagcaagaccuguggauuuguagaugagagaggccuguacaagucucugaaaggagcaugcaaacugaaacuaugugggguucugggacucagacuuauggauggaacaugggccgcgauccagacaucagaugagaccaaauggugcccuccugaucaguuagugaaccuacaugacuuucgcucggaugaaauugaacaucuuguuguggaggagcuggucaagaaaagagaagagugucuagaugcacuggaguccaucaugaccaccaagucugugaguuucagacgucucagucacuugaggaaacuugugcccggguuuggaaaagcauauaccauauucaauaagaccuugauggaggcugaugcucacuacaaaucaguccggacuuggaaugagaucauccccucuaaaggguguuuaagagucggggggagaugucacccucaugugaacgggguguucuucaaugguaucaucuuaggcccugacggccaugugcuaaucccggagaugcagucgucucuccuccagcagcauauggaguuauuggaauccucagucauccccuuaaugcaccccuuggcagauccaucaacaguuuuuaaagaugaugacgaggcggaagauuuuguugagguucaccuuccagaugugcacaagcaggucucaggggucgaucucggucucccaagcugggggaauuauguguugaugagcgcaggcgucuugaccgccuuaauguugaugauuuucuuaaugacguguuguagaaggaccaauagagcagaaucagcacaacacagucuuggagagagggggaggaaagugucgguaaccucccaaagugggcggguuauauccucaugggagucauacaaaaguggaggugagaccaagcuguag

SEQ ID NO: 63893 - RNA, 1575 nt, Artificial Sequence
  derived and/or modified CDS sequence (wt) from glycoprotein__RABV__LC018567.1
augauuccucaggcucuuuuguuuguaccccuucuggucuuuucauuguguuucggaaaauuucccaucuacacgauaccggacaaacuuggucccuggagccccauugauauacaucaucucagcuguccgaauaauuugguuguggaggaugaaggauguaccaaccugucagguuucucguacauggaacucaagguaggauacauuucagccaucaaagugaacggguucacuuguacggguguagugacagaagcagaaaccuacaccaacuuuguuggcuaugucacuaccacguuuaagagaaagcacuuccgcccaacgccggaugcaugcagagccgcauauaacuggaagauggcuggugaccccagauaugaagaaucucugcauaauccuuacccugauuaucauuggcuccgaacugugaagaccaccaaagaaucucuuguuaucauaucuccaaguguggcagauuuggacccauaugauaaaucccuucacucgagaguuuuuccuagcggaaaaugcucaggcauaacggugucuucuaccuacugcuccacuaaccacgacuauaccaucuggaugcccgagaauccuagacuagggaccucuugugacauuuucaccaauagcagagggaagagagcauccaaagggagcaagaccuguggauuuguggaugagagaggccuguacaagucucugaaaggagcaugcaaacugaaacuaugugggguucugggacucagacuuauggauggaacaugggccgcgauccagacaucagaugagaccaaauggugcccuccugaccaguuagugaaccuacaugacuuucgcucggaugaaauugaacaucuuguuguggaggagcuggucaagaaaagggaagagugucuagaugcacuggaguccaucaugaccaccaagucugugaguuucagacgucucagucacuugaggaaacuugugcccggguuuggaaaagcauauaccauauucaauaagaccuugauggaggcugaugcucacuacaaaucaguccggaccuggaaugagaucauccccuccaaaggguguuuaagagucggggggagaugucacccucaugugaacgggguguucuucaaugguaucaucuuaggcccugacggccaugugcuaaucccggagaugcagucgucucuccuccagcagcauauggaguuauuggaauccucagucauucccuuaaugcaucccuuggcagauccaucaacaguuuuuaaagaugaugacgaggcggaagauuuuguugagguucaccuuccagaugugcacaagcaggucucaggggucgaucucggucucccaagcugggggaaguauguguugaugagcgcaggcgucuugaccgcauuaauguugaugauuuucuuaaugacguguuguagaaggaccaauagagcagaaucagcacaacacagucuuggagagagggggaggaaagugucgguaaccucccaaagcgggcggguuauauccucaugggagucauacaaaaguggaggugagaccaagcuguaa

SEQ ID NO: 63894 - RNA, 1575 nt, Artificial Sequence
  derived and/or modified CDS sequence (wt) from glycoprotein__RABV__LC018569.1
augauuccucaggcucuuuuguuuguaccccuucuggucuuuucauuguguuucggaaaauuucccaucuacacgauaccggacaaacuuggucccuggagccccauugauauacaucaucucagcuguccgaauaauuugguuguggaggaugaaggauguaccaaccugucagguuucucguacauggaacucaagguaggauacauuucagccaucaaagugaacggguucacuuguacggguguagugacagaagcagagaccuacaccaacuuuguuggcuaugucacuaccacguuuaagagaaagcacuuccgcccaacgccggaugcaugcagagccgcauauaacuggaagauggcuggugaccccagauaugaagaaucucugcauaauccuuacccugauuaucauuggcuccgaacugugaagaccaccaaagaaucucuuguuaucauaucuccaaguguggcagauuuggacccauaugauaaaucccuucacucgagaguuuuuccuagcggaaaaugcucaggcauaacggugucuucuaccuacugcuccacuaaccacgacuauaccaucuggaugcccgagaauccuagacuagggaccucuugugacauuuucaccaauagcagagggaagagagcauccaaagggagcaagaccuguggauuuguggaugagagaggccuguacaagucucugaaaggagcaugcaaacugaaacuaugugggguucugggacucagacuuauggauggaacaugggccgcgauccagacaucagaugagaccaaauggugcccuccugaccaguuagugaaccuacaugacuuucacucggaugaaauugagcaucuuguuguggaggagcuggucaagaaaagggaagagugucuagaugcacuggaguccaucaugaccaccaagucugugaguuucagacgucucagucacuugaggaaacuugugcccggguuuggaaaagcauauaccauauucaauaagaccuugauggaggcugaugcucacuacaaaucaguccggaccuggaaugagaucauccccuccaaaggguguuuaagagucggggggagaugucacccucaugugaacgggguguucuucaaugguaucaucuuaggcccugacggccaugugcuaaucccggagaugcagucgucucuccuccagcagcauauggaguuauuggaauccucaguuauucccuuaaugcaucccuuggcagauccaucaacaguuuuuaaagaugaugacgaggcggaagauuuuguugagguucaccuuccagaugugcacaagcaggucucaggggucgaucucggucucccaagcugggggaaguauguguugaugagcgcaggcgucuugaccgcauuaauguugaugauuuucuuaaugacguguuguagaaggaccaauagagcagaaucagcacaacacagucuuggagagagggggaggaaagugucgguaaccucccaaagcgggcggguuauauccucaugggagucauacaaaaguggaggugagaccaagcuguaa

SEQ ID NO: 63895 - RNA, 1575 nt, Artificial Sequence
  derived and/or modified CDS sequence (wt) from glycoprotein__RABV__LC018570.1
augauuccucaggcucuuuuguuuguaccccuucuggucuuuucauuguguuucggaaaauuucccaucuacacgauaccggacaaacuuggucccuggagccccauugauauacaucaucucagcuguccgaauaauuugguuguggaggaugaaggauguaccaaccugucagguuucucguacauggaacucaagguaggauacauuucagccaucaaagugaacggguucacuuguacggguguagugacagaagcagagaccuacaccaacuuuguuggcuaugucacuaccacguuuaagagaaagcacuuccgcccaacgccggaugcaugcagagccgcauauaacuggaagauggcuggugaccccagauaugaagaaucucugcauaauccuuacccugauuaucauuggcuccgaacugugaagaccaccaaagaaucucuuguuaucauaucuccaaguguggcagauuuggacccauaugauaaaucccuucacucgagaguuuuuccuagcggaaaaugcucaggcauaacggugucuucuaccuacugcuccacuaaccacgacuauaccaucuggaugcccgagaauccuagacuagggaccucuugugacauuuucaccaauagcagagggaagagagcauccaaagggagcaagaccuguggauuuguggaugagagaggccuguacaagucucugaaaggagcaugcaaacugaaacuaugugggguucugggacucagacuuauggauggaacaugggccgcgauccagacaucagaugagaccaaauggugcccuccugaccaguuagugaaccuacaugacuuucgcucggaugaaauugagcaucuuguuguggaggagcuggucaagaaaagggaagagugucuagaugcacuggaguccaucaugaccaccaagucugugaguuucagacgucucagucacuugaggaaacuugugcccggguuuggaaaagcauauaccauauucaauaagaccuugauggaggcugaugcucacuacaaaucaguccggaccuggaaugagaucauccccuccaaaggguguuuaagagucggggggagaugucacccucaugugaacgggguguucuucaaugguaucaucuuaggcccugacggccaugugcuaaucccggagaugcagucgucucuccuccagcagcauauggaguuauuggaauccucaguuauucccuuaaugcaucccuuggcagauccaucaacaguuuuuaaagaugaugacgaggcggaagauuuuguugagguucaccuuccagaugugcacaagcaggucucaggggucgaucucggucucccaagcugggggaaguauguguugaugagcgcaggcgucuugaccgcauuaauguugaugauuuucuuaaugacguguuguagaaggaccaauagagcagaaucagcacaacacagucuuggagagagggggaggaaagugucgguaaccucccaaagcgggcggguuauauccucaugggagucauacaaaaguggaggcgagaccaagcuguaa

SEQ ID NO: 63896 - RNA, 1575 nt, Artificial Sequence
  derived and/or modified CDS sequence (wt) from glycoprotein__RABV__LC018571.1
augauuccucaggcucuuuuguuuguaccccuucuggucuuuucauuguguuucggaaaauuucccaucuacacgauaccggacaaacuuggucccuggagccccauugauauacaucaucucagcuguccgaauaauuugguuguggaggaugaaggauguaccaaccugucagguuucucguacauggaacucaagguaggauacauuucagccaucaaagugaacggguucacuuguacggguguagugacagaagcagagaccuacaccaacuuuguuggcuaugucacuaccacguuuaagagaaagcacuuccgcccaacgccggaugcaugcagagccgcauauaacuggaagauggcuggugaccccagauaugaagaaucucugcauaauccuuacccugauuaucauuggcuccgaacugugaagaccaccaaagaaucucuuguuaucauaucuccaaguguggcagauuuggacccauaugauaaaucccuucacucgagaguuuuuucuagcggaaaaugcucaggcauaacggugucuucuaccuacugcuccacuaaccacgacuauaccaucuggaugcccgagaauccuagacuagggaccucuugugacauuuucaccaauagcagagggaagagagcauccaaagggagcaagaccuguggauuuguggaugagagaggccuguacaagucucugaaaggagcaugcaaacugaaacuaugugggguucugggacucagacuuauggauggaacaugggccgcgauccagacaucagaugagaccaaauggugcccuccugaccaguuagugaaccuacaugacuuucgcucggaugaaauugagcaucuuguuguggaggagcuggucaagaaaagggaagagugucuagaugcacuggaguccaucaugaccaccaagucugugaguuucagacgucucagucacuugaggaaacuugugcccggguuuggaaaagcauauaccauauucaauaagaccuugauggaggcugaugcucacuacaaaucaguccggaccuggaaugagaucauccccuccaaaggguguuuaagagucggggggagaugucacccucaugugaacgggguguucuucaaugguaucaucuuaggcccugacggccaugugcuaaucccggagaugcagucgucucuccuccagcagcauauggaguuauuggaauccucaguuauucccuuaaugcaucccuuggcagauccaucaacaguuuuuaaagaugaugacgaggcggaagauuuuguugagguucaccuuccagaugugcacaagcaggucucaggggucgaucucggucucccaagcugggggaaguauguguugaugagcgcaggcgucuugaccgcauuaauguugaugauuuucuuaaugacguguuguagaaggaccaauagagcagaaucagcacaacacagucuuggagagagggggaggaaagugucgguaaccucccaaagcgggcggguuauauccucaugggagucauacaaaaguggaggugagaccaagcuguaa

SEQ ID NO: 63897 - RNA, 1575 nt, Artificial Sequence
  derived and/or modified CDS sequence (wt) from glycoprotein__RABV__LC018572.1
augauuccucaggcucuuuuguuuguaccccuucuggucuuuucauuguguuucggaaaauuucccaucuacacgauaccggacaaacuuggucccuggagccccauugauauacaucaucucagcuguccgaauaauuugguuguggaggaugaaggauguaccaaccugucagguuucucguacauggaacucaagguaggauacauuucagccaucaaagugaacggguucacuuguacggguguagugacagaagcagagaccuacaccaacuuuguuggcuaugucacuaccacguuuaagagaaagcacuuccgcccaacgccggaugcaugcagagccgcauauaacuggaagauggcuggugaccccagauaugaagaaucucugcauaauccuuacccugauuaucauuggcuccgaacugugaagaccaccaaagaaucucuuguuaucauaucuccaaguguggcagauuuggacccauaugauaaaucccuucacucgagaguuuuuccuagcggaaaaugcucaggcauaacggugucuucuaccuacugcuccacuaaccacgacuauaccaucuggaugcccgagaauccuagacuagggaccucuugugacauuuucaccaauagcagagggaagagagcauccaaagggagcaagaccuguggauuuguggaugagagaggccuguacaagucucugaaaggagcaugcaaacugaaacuaugugggguucugggacucagacuuauggauggaacaugggccgcgauccagacaucagaugagaccaaauggugcccuccugaccaguuagugaaccuacaugacuuucgcucggaugaaauugagcaucuuguuguggaggagcuggucaagaagagggaagagugucuagaugcacuggaguccaucaugaccaccaagucugugaguuucagacgucucagucacuugaggaaacuugugcccggguuuggaaaagcauauaccauauucaauaagaccuugauggaggcugaugcucacuauaaaucaguccggaccuggaaugagaucauccccuccaaaggguguuuaagagucggggggagaugucacccucaugugaacgggguguucuucaaugguaucaucuuaggcccugacggccaugugcuaaucccggagaugcagucgucucuccuccagcagcauauggaguuauuggaauccucaguuauucccuuaaugcaucccuuggcagauccaucaacaguuuuuaaagaugaugacgaggcggaagauuuuguugagguucaccuuccagaugugcacaagcaggucucaggggucgaucucggucucccaagcugggggaaguauguguugaugagcgcaggcgucuugaccgcauuaauguugaugauuuucuuaaugacguguuguagaaggaccaauagagcagaaucagcacaacacagucuuggagagagggggaggaaagugucgguaaccucccaaagcgggcggguuauauccucaugggagucauacaaaaguggaggugagaccaagcuguaa

SEQ ID NO: 63898 - RNA, 1575 nt, Artificial Sequence
  derived and/or modified CDS sequence (wt) from glycoprotein__RABV__LC018573.1
augauuccucaggcucuuuuguuuguaccccuucuggucuuuucauuguguuucggaaaauuucccaucuacacgauaccggacaaacuuggucccuggagccccauugauauacaucaucucagcuguccgaacaauuugguuguggaggaugaaggauguaccaaccugucagguuucucguacauggaacucaagguaggauacauuucagccaucaaagugaacggguucacuuguacggguguagugacagaagcagagaccuacaccaacuuugucggcuaugucacuaccacguuuaagagaaagcacuuccgcccaacgccggaugcaugcagagccgcauauaacuggaagauggcuggugaccccagauaugaagaaucucugcauaauccuuacccugauuaucauuggcuccgaacugugaagaccaccaaagaaucucuuguuaucauaucuccaaguguggcagauuuggacccauaugauaaaucccuucacucgagaguuuuuccuagcggaaaaugcucaggcauaacggugucuucuaccuacugcuccacuaaccacgacuauaccaucuggaugcccgagaauccuagacuagggaccucuugugacauuuucaccaauagcagagggaagagagcauccaaagggagcaagaccuguggauuuguggaugagagaggccuguacaagucucugaaaggagcaugcaaacugaaacuaugugggguucugggacucagacuuauggauggaacaugggccgcgauccagacaucagaugagaccaaauggugcccuccugaccaguuagugaaccuacaugacuuucgcucggaugaaauugagcaucuuguuguggaggagcuggucaagaaaagggaagagugucuagaugcacuggaguccaucaugaccaccaagucugugaguuucagacgucucagucacuugaggaaacuugugcccggguuuggaaaagcauauaccauauucaauaagaccuugauggaggcugaugcucacuacaaaucaguccggacuuggaaugagaucauccccuccaaaggguguuuaagagucggggggagaugucacccucaugugaacgggguguucuucaaugguaucaucuuaggcccugacggccaugugcuaaucccggagaugcagucgucucuccuccagcagcauauggaguuauuggaauccucagucauucccuuaaugcaucccuuggcagauccaucaacaguuuuuaaagaugaugacgaggcggaagauuuuguugagguucaccuuccagaugugcacaagcaggucucaggggucgaucucggucucccaagcugggggaaguauguguugaugagcgcaggcgucuugaccgcauuaauguugaugauuuucuuaaugacguguuguagaaggaccaauagagcagaaucagcacaacacagucuuggagagagggggaggaaagugucgguaaccucccaaagcgggcggguuauauccucaugggagucauacaaaaguggaggugagaccaagcuguaa

SEQ ID NO: 63899 - RNA, 1575 nt, Artificial Sequence
  derived and/or modified CDS sequence (wt) from glycoprotein__RABV__LC018581.1
augauuccucaggcucuuuuguuuguaccccuucuggucuuuuccuuguguuucggaaaauuucccaucuacacgauaccggacaaacuuggucccuggagccccauugauauacaucaucucagcuguccgaacaauuugguuguggaggaugaaggauguaccaaccugucagguuucucguacauggaacucaagguaggauacauuucagccaucaaagugaacggguucacuuguacggguguagugacagaagcagagaccuacaccaacuuuguuggcuaugucacuaccacguuuaagagaaagcacuuccgcccaacgccggaugcaugcagagccgcauauaacuggaagauggcuggugaccccagauaugaagaaucucugcauaauccuuacccugauuaucauuggcuccgaacugugaagaccaccaaagaaucucuuguuaucauaucuccaaguguggcagauuuggacccauaugauaaaucccuucacucgagaguuuuuccuagcggaaaaugcucaggcauaacggugucuucuaccuacugcuccacuaaccacgacuauaccaucuggaugcccgagaauccuagacuagggaccucuugugacauuuucaccaauagcagagggaagagagcauccaaagggagcaagaccuguggauuuguggaugagagaggccuguacaagucucugaaaggagcaugcaaacugaaacuaugugggguucugggacucagacuuauggauggaacaugggccgcgauccagacaucagaugagaccaaauggugcccuccugaccaguuagugaaccuacaugacuuucgcucggacgaaauugagcaucuuguuguggaggagcuggucaagaaaagggaagagugucuagaugcacuggaguccaucaugaccaccaagucugugaguuucagacgucucagucacuugaggaaacuugugcccggguuuggaaaagcauauaccauauucaauaagaccuugauggaggcugaugcucacuacaaaucaguccggacuuggaaugagaucauccccuccaaaggguguuuaagagucggggggagaugucacccucaugugaacgggguguucuucaaugguaucaucuuaggcccugacggccaugugcuaaucccggagaugcagucgucucuccuccagcagcauauggaguuauuggaauccucagucauucccuuaaugcaucccuuggcagauccaucaacaguuuuuaaagaugaugacgaggcggaagauuuuguugagguucaccuuccagaugugcacaagcaggucucaggggucgaucucggucucccaagcugggggaaguauguguugaugagcgcaggcgucuugaccgcauuaauguugaugauuuucuuaaugacguguuguagaaggaccaauagagcagaaucagcacaacacagucuuggagagagggggaggaaagugucgguaaccucccaaagcgggcggguuauauccucaugggagucauacaaaaguggaggugagaccaagcuguaa

SEQ ID NO: 63900 - RNA, 1575 nt, Artificial Sequence
  derived and/or modified CDS sequence (wt) from glycoprotein__RABV__LC018584.1
augauuccucaggcucuuuuguuuguaccccuucuggucuuuucguuguguuucgggaaauuccccaucuacacgauaccggacaaacuugguccuuggagccccauugauauacaucaucucagcugcccaaacaauuugguuguggaggaugaaggauguaccaaccugucagguuucucauaccuggaacucaaaguaggauacauuucagccaucaaagugaacggguucacuuguacggguguggugacagaagcagaaaccuacaccaacuuugucggcuaugucacuaccacguuuaagagaaagcacuuccgcccgaugccagaugcauguagagccgcguauaacuggaagauggcuggugaccccagauaugaagagucucugcauaacccuuacccugauuaucauuggcuccggacugugaagaccaccaaagaaucucuuguuaucauaucuccaaguguggcagaucuggacccguauaauaaaucccuucacucgagaguuuuuccuagcggaaaaugcucaggcauaacagugucuucuaccuacuguucuacuaaccaugacuauaccaucuggaugccugagaauccuagacuagggaccucuugugacauuuucaccaauagcagagggaagagagcauccaaggggagcaagaccuguggauuuguagacgagaggggccuauacaaaucucugaaaggagccugcaaauugaaacuaugugggguucuuggacucagacuuauggauggaacaugggccgcaauccagacaucagaugagaccaaauggugcccucccgaucaguuagugaaccuacaugacuuccguucggaugaaauugaacaucuuguuguggaggagcuggucaagaaaagggaagagugucuagaugcacuggaguccaucaugaccaccaaguccgugaguuucagacgucucagucacuugaggaaacuugugccuggguucggaaaagcauauaccauauucaacaagaccuugauggaggcugaugcucacuacaaaucaguccggacuuggaaugagauccuccccucuaaaggguguuuaagagucggggggagaugucacccucaugugaacgggguuuucuucaauggcaucaucuuaggccccgacggccaugugcuaaucccggagaugcagucgucucuccuucagcagcauauggaguuguuggaauccucagucauccccuuaaugcaucccuuagcagauccaucaacaguuuuuaaagaugaugacgaggcggaagauuuuguugagguucaccuuccagaugugcacaagcaggucucaggggucgaucucggucucccaagcugggggaaguauguguugaugagcgcaggcgucuugaccgcacuaauguugaugauuuucuuaaugacguguuguagaaggcccaauagagcagaaucagcgcaacacagucuuggagaaagggaaaagaaagugucgguaaccucucaaagcgggcgagucauauccucaugggagucauacaaaaguggaggugagaccaaacuguaa

SEQ ID NO: 63901 - RNA, 1575 nt, Artificial Sequence
  derived and/or modified CDS sequence (wt) from glycoprotein__RABV__LC018585.1
augauuccucaggcucuuuuguuuguaccccuucuggucuuuucguuguguuucgggaaauuccccaucuacacgauaccggacaaacuugguccuuggagccccauugauauacaucaucucagcugcccaaacaauuugguuguggaggaugaaggauguaccaaccugucagguuucucauaccuggaacucaaaguaggauacauuucagccaucaaagugaacggguucacuuguacggguguggugacagaagcagaaaccuacaccaacuuugucggcuaugucacuaccacguuuaagagaaagcacuuccgcccgaugccagaugcauguagagccgcguauaacuggaagauggcuggugaccccagauaugaagagucucugcauaacccuuacccugauuaucauuggcuccggacugugaagaccaccaaagaaucucuuguuaucauaucuccaaguguggcagauuuggacccguaugauaaaucccuucacucgagaguuuuuccuagcggaaaaugcucaggcauaacagugucuucuaccuacuguucuacuaaccaugacuauaccaucuggaugccugagaauccuagacuagggaccucuugugacauuuucaccaauagcagagggaagagagcauccaaggggagcaagaccuguggauuuguagacgagaggggccuauacaaaucucugaaaggagccugcaaauugaaacuaugugggguucuuggacucagacuuauggauggaacaugggccgcaauccagacaucagaugagaccaaauggugcccucccgaucaguuagugaaccuacaugacuuccguucggaugaaauugaacaucuuguuguggaggagcuggucaagaaaagggaagagugucuagaugcacuggaguccaucaugaccaccaaguccgugaguuucagacgucucagucacuugaggaaacuugugccuggguucggaaaagcauauaccauauucaacaagaccuugauggaggcugaugcucacuacaagucaguccggacuuggaaugagaucauccccucuaaaggguguuuaagagucggggggagaugucacccucaugugaacgggguuuucuucaauggcaucaucuuaggccccgacggccaugugcuaaucccggagaugcagucgucucuccuucagcagcauauggaguuguuggaauccucagucauccccuuaaugcaucccuuagcagauccaucaacaguuuuuaaagaugaugacgaggcggaagauuuuguugagguucaccuuccagaugugcacaagcaggucucaggggucgaucucggucucccaagcugggggaaguauguguugaugagcgcaggcgucuugaccgcacuaauguugaugauuuucuuaaugacguguuguagaaggcccaauagagcagaaucagcgcaacacagucuuggagaaagggaaaagaaagugucgguaaccucucaaagcgggcgagucauauccucaugggagucauacaaaaguggaggugagaccaaacuguaa

SEQ ID NO: 63902 - RNA, 1575 nt, Artificial Sequence
  derived and/or modified CDS sequence (wt) from glycoprotein__RABV__LC018586.1
augauuccucaggcucuuuuguuuguaccccuucuggucuuuucacuguguuucggaaaauuucccaucuacacgauaccggacaaacuuggucccuggagccccauugauauacaucaucucagcuguccgaacaauuuaguugucgaggaugaaggauguaccaaccugucagguuucucguacauggaacucaagguaggauacauuucagccaucaaagugaacggguucacuuguacggguguagugacagaagcagagaccuacaccaacuuuguuggcuaugucacuaccacguuuaagagaaagcacuuccgcccaacgccggaugcaugcagagccgcauauaacuggaagauggccggugaccccagauaugaagaaucucugcauaauccuuacccugauuaucauuggcuccgaacugugaagaccacuaaagaaucucuuguuaucauaucuccgaguguggcagauuuggacccauacgauaaaucccuucacucgagaguuuuuccuagcggaaaaugcucaggcauaacggugucuucuaccuacugcucuacuaaccacgacuauaccaucuggaugccugagaauccuagacuagggaccucuugugacauuuucacuaauagcagagggaagagagcauccaaagggaguaagaccuguggauuuguagaugagagaggccuguacaagucucugaaaggagcaugcaaacugaaacuauguggaguucugggacucagacuuauggauggaacaugggccgcgauccaaacaucagaugagaccaaauggugcccuccugaccaguuagugaaccuacaugacuuucgcucggaugaaauugaacaucuuguuguggaggagcucgucaagaaaagggaagagugucuagaugcacuggaguccaucaugaccaccaagucugugaguuucagacgucucagucacuugaggaaacuugugcccggguuuggaaaagcauauaccauauucaauaagaccuugauggaggcugaugcucacuacaaaucaguccggacuuggaaugagaucaucccaucuaaaggguguuuaagagucggggggagaugucacccucacgugaacgggguguucuucaaugguaucaucuugggcccugacggccaugugcuaaucccggagaugcagucgucucuccuccagcagcauauggaguuguuggaauccucagucauccccuuaaugcaucccuuggcagauccaucaacaguuuuuaaagaugaugacgaggcggaagauuuuguugagguucaccuuccagaugugcacaagcaggucucaggggucgaucucggucucccaagcugggggaaguauguguugaugagcgcaggcgucuugaccgcacuaauguugaugauuuucuuaaugacguguuguagaagggccaauagagcagaaucagcacaacacagucuuggagagagggggaggaaagugucgguaaccucccaaagcgggcgggugauauccucaugggagucauacaaaagugggggugagaccaagcuguaa

SEQ ID NO: 63903 - RNA, 1575 nt, Artificial Sequence
  derived and/or modified CDS sequence (wt) from glycoprotein__RABV__LC018587.1
augauuccucaggcucuuuuguuuguaccccuucuggucuucucauuguguuucggaaaauuucccaucuacacgauaccggacaaacuuggucccuggagccccauugauauacaucaucucagcuguccgaacaauuugguuguggaggaugaaggauguaccaaccugucagguuucucguacauggaacucaagguaggauacauuucagccaucaaagugaacggguucacuuguacggguguagugacagaagcagagaccuacaccaacuuuguuggcuaugucacuaccacguuuaagagaaagcacuuccgcccaacgccggaugcaugcagagccgcauauaacuggaagauggcuggugaccccagauaugaagaaucucugcauaauccuuaccccgauuaucauuggcuccgaacugugaagaccaccaaagaaucucuuguuaucauaucuccaaguguggcagauuuggacccauacgauaaaucccuucacucgagaguuuuuccuagcggaaaaugcucaggcauaacggugucuucuaccuacugcuccacuaaccacgacuauaccaucuggaugccugagaauccuagacuagggaccucuugugacauuuucaccaauagcagagggaagagagcauccaaagggagcaagaccuguggauuuguagaugagagaggccuguacaagucucugaaaggagcaugcaaacugaaacuaugugggguucugggacucagacuuauggauggaacaugggucgcgauccagacaucagaugagaccaaauggugcccuccugaucaguuagugaaccuacaugacuuucgcucggaugaaauugaacaucuuguuguggaggagcuggucaagaaaagggaagagugucuagaugcacuggaguccaucaugaccaccaagucugugaguuucagacgucucagucacuugaggaaacuugugcccggguuuggaaaagcauauaccauauucaauaagaccuugauggaggcugaugcucacuacaaaucaguccggacuuggaaugagaucauccccucuaaaggguguuuaagagucggggggagaugucacccucaugugaacgggguguucuucaaugguaucaucuuaggcccugacggccaugugcuaaucccggagaugcagucgucucuccuccagcagcauauggaguuauuggaauccucagucauccccuuaaugcaucccuuggcagauccaucaacaguuuuuaaagaugaugacgaggcggaagauuuuguugagguucaccuuccagaugugcacaagcaggucucaggggucgaucucggucucccaagcugggggaaguauguguugaugagcgcaggcgucuugaccgcauuaauguugaugauuuucuuaaugacguguuguagaagggccaauagagcagaaucagcacaacacagucuuggagagagggggaggaaagugucgguaaccucccaaagcgggcggguuauauccucaugggagucauacaaaaguggaggugagaccaagcuguaa

SEQ ID NO: 63904 - RNA, 1575 nt, Artificial Sequence
  derived and/or modified CDS sequence (wt) from glycoprotein__RABV__LC018588.1
augauuccucaggcucuuuuguuuguaccccuucuggucuuuucacuguguuucggaaaauuucccaucuacacgauaccggacaaacuuggucccuggagccccauugauauacaucaucucagcuguccgaacaauuuaguugucgaggaugaaggauguaccaaccugucagguuucucguacauggaacucaagguaggauacauuucagccaucaaagugaacggguucacuuguacggguguagugacagaagcagagaccuacaccaacuuuguuggcuaugucacuaccacguuuaagagaaagcacuuccgcccaacgccggaugcaugcagagccgcauauaacuggaagauggccggugaccccagauaugaagaaucucugcauaauccuuacccugauuaucauuggcuccgaacugugaagaccacuaaagaaucucuuguuaucauaucuccgaguguggcagauuuggacccauacgauaaaucccuucacucgagaguuuuuccuagcggaaaaugcucaggcauaacgguguccucuaccuacugcucuacuaaccacgacuauaccaucuggaugccugagaauccuagacuagggaccucuugugacauuuucacuaauagcagagggaagagagcauccaaagggaguaagaccuguggauuuguagaugagagaggccuguacaagucucugaaaggagcaugcaaacugaaacuauguggaguucugggacucagacuuauggauggaacaugggccgcgauccaaacaucagaugagaccaaauggugcccuccugaucaguuagugaaccuacaugacuuucgcucggaugaaauugaacaucuuguuguggaggagcucgucaagaaaagggaagagugucuagaugcacuggaguccaucaugaccaccaagucugugaguuucagacgucucagucacuugaggaaacuugugcccggguuuggaaaagcauauaccauauucaauaagaccuugauggaggcugaugcucacuacaaaucaguccggacuuggaaugagaucaucccaucuaaaggguguuuaagagucggggggagaugucacccucacgugaacgggguguucuucaaugguaucaucuugggcccugacggccaugugcuaaucccggagaugcagucgucucuccuccagcagcauauggaguuguuggaauccucagucauacccuuaaugcaucccuuggcagauccaucaacaguuuuuaaagaugaugacgaggcggaagauuuuguugagguucaccuuccagaugugcacaagcaggucucaggggucgaucucggucucccaagcugggggaaguauguguugaugagcgcaggcgucuugaccgcacuaauguugaugauuuucuuaaugacguguuguagaagggccaauagagcagaaucagcacaacacagucuuggagagaggggaaggaaagugucaguaaccucccaaagcgggcggguuauauccucaugggagucauacaaaagugggggugagaccaagcuguaa

SEQ ID NO: 63905 - RNA, 1575 nt, Artificial Sequence
  derived and/or modified CDS sequence (wt) from glycoprotein__RABV__LC018589.1
augauuccucaggcucuuuuguuuguaccccuccuggucuuuucacuguguuucggaaaauuucccaucuacacgauaccggacaaacuuggucccuggagccccauugauauacaucaucucagcuguccgaacaauuuaguugucgaggaugaaggauguaccaaccugucagguuucucguacauggaacucaagguaggauacauuucagccaucaaagugaacggguucacuuguacggguguagugacagaagcagagaccuacaccaacuuuguuggcuaugucacuaccacguuuaagagaaagcacuuccgcccaacgccggaugcaugcagagccgcauauaacuggaagauggccggugaccccagauaugaagaaucucugcauaauccuuacccugauuaucauuggcuccgaacugugaagaccacuaaagaaucucuuguuaucauaucuccgaguguggcagauuuggacccauacgauaaaucccuucacucgagaguuuuuccuagcggaaaaugcucaggcauaacggugucuucuaccuacugcucuacuaaccacgacuauaccaucuggaugccugagaauccuagacuagggaccucuugugacauuuucacuaauagcagagggaagagagcauccaaagggaguaagaccugcggauuuguagaugagagaggccuguacaagucucugaaaggagcaugcaaacugaaacuauguggaguucugggacucagacuuauggauggaacaugggccgcgauccaaacaucagaugagaccaaauggugcccuccugaucaguuagugaaccuacaugacuuucgcucggaugaaauugaacaucuuguuguggaggagcuagucaagaaaagggaagagugucuagaugcacuggaguccaucaugaccaccaagucugugaguuucagacgucucagucacuugaggaaacuugugcccggguuuggaaaggcauauaccauauucaauaagaccuugauggaggcugaugcucacuacaaaucaguccggacuuggaaugagaucaucccaucuaaaggguguuuaagagucggggggagaugucacccucacgugaacgggguguucuucaaugguaucaucuugggcccugacggccaugugcuaaucccggagaugcagucgucucuccuccagcagcauauggaguuguuggaauccucagucauccccuugaugcaucccuuggcagauccaucaacaguuuuuaaagaugaugacgaggcggaagauuuuguugagguucaccuuccagaugugcacaagcaggucucaggggucgaucucggucucccaagcugggggaaguauguguugaugagcgcaggcgucuugaccgcacuaauguugaugauuuucuuaaugacguguuguagaagggccaauagagcagaaucagcacgacacagucuuggggagagggggaggaaagugucgguaaccucccaaagcgggcggguuauauccucaugggagucauacaaaagugggggugagaccaagcuguaa

SEQ ID NO: 63906 - RNA, 1575 nt, Artificial Sequence
  derived and/or modified CDS sequence (wt) from glycoprotein__RABV__LC018590.1
augauuccucaggcucuuuuguuuguaccccuucuggucuuuucacuguguuucggaaaauuucccaucuacacgauaccggacaaacuuggucccuggagccccauugauauacaucaucucagcuguccgaacaauuuaguugucgaggaugaaggauguaccaaccugucagguuucucguacauggaacucaagguaggauacauuucagccaucaaagugaacggguucacuuguacggguguagugacagaagcagagaccuacaccaacuuuguuggcuaugucacuaccacguuuaagagaaagcacuuccgcccaacgccggaugcaugcagagccgcauauaacuggaagauggccggugaccccagauaugaagaaucucugcauaauccuuacccugauuaucauuggcuccgaacugugaagaccacuaaagaaucucuuguuaucauaucuccgaguguggcagauuuggacccauacgauaaaucccuucacucgagaguuuuuccuagcggaaaaugcucaggcauaacggugucuucuaccuacugcucuacuaaccacgacuauaccaucuggaugccugagaauccuagacuagggaccucuugugacauuuucauuaauagcagagggaagagagcauccaaagggaguaagaccuguggauuuguagaugagagaggccuguacaagucucugaaaggagcaugcaaacugaaacuauguggaguuccgggacucagacuuauggauggaacaugggccgcgauccaaacaucagaugagaccaaauggugcccuccugaucaguuagugaaccuacaugacuuucgcucggaugaaauugaacaucuuguuguggaggagcuagucaagaaaagggaagagugucuagaugcacuggaguccaucaugaccaccaagucugugaguuucagacgucucagucacuugaggaaacuugugcccggguuuggaaaagcauauaccauauucaauaagaccuugauggaggcugaugcucacuacaaaucaguccggacuuggaaugagaucaucccaucuaaaggguguuuaagagucggggggagaugucacccucacgugaacgggguguucuucaaugguaucaucuugggcccugacggccaugugcuaaucccggagaugcagucgucucuccuccagcagcauauggaguuguuggaauccucagucauccccuuaaugcaucccuuggcagauccaucaacaguuuuuaaagaugaugacgaggcggaagauuuuguugagguucaccuuccagaugugcacaagcaggucucaggggucgaucucggucucccgagcugggggaaguauguguugaugagcgcaggcgucuugaccgcacuaauguugaugauuuucuuaaugacguguuguagaagggccaauagagcagaaucagcacaacacagucuuggagagagggggaggaaagugucgguaaccucccaaagcgggcggguuauauccucaugggagucauacaaaagugggggugagaccaagcuguaa

SEQ ID NO: 63907 - RNA, 1575 nt, Artificial Sequence
  derived and/or modified CDS sequence (wt) from glycoprotein__RABV__LC071936.1
augauuccucaggcucuuuugcuuguaccccuuuugguuuuccccuuauguuucgggaaauucccaaucuacacaauaccagacaaacuuggcccuuggaguccuauugauauacaucaucucaguugcccuaacaaucuaguuguggaggaugaggggugcaccaaccugucaggauucuccuacauggaacucaaaguaggguacauuucagcuauaaaagugaacggguucacuugcacggguguggugacagaagcagagaccuacacaaacuuuguuggcuaugucaccaccacguuuaagagaaagcacuuccgcccgacaccagaugcaugcagagcagcauacaacuggaagauggcaggcgaccccagauaugaggaaucucuccacaauccguaucccgauuaucacuggcuccggacuguaaaggccaccaaggagucucuugucaucauaucuccaagugugucggacuuagacccguacgauaaaucccuucauuccagaguuuuucccagcgguaaaugcucgggaauaacagugucuucuaccuauugucccacuagccaugauuauaccaucuggaugccugaaaauccuagacuagggacaucuugugacauuuucaucaauagcagagggaagagagcauccaaagggagcaagaccuguggauuuguggacgaaagaggcuuguacaagucucuaaaaggggcaugcaaguugaagcuauguggaguucucggacuuagacuuauggacggaacaugggcugcgauucaaacaucugaugaggccaaauggugcccuccugaucaguuagugaacauacaugauuuucacucggaugagauugaacaucucguuguggaggaguuaguaaagaaaagggaagagugucuagaugcacuggagucuaucaugaccaccaaguccguaaguuucagacgccucagucacuugaggaagcucguccccggguuuggaaaagcauauaccauauucaacaaaaccuugauggaggcugaugcucacuauaaaucaguccguacauggaaugagaucauccccucuaaaggguguuuaagagucggggggagaugucacccccauguaaacgggguguuuuucaaugguaucauucuagguccugauggacauguucuaaucccagagaugcagucgucucuccuucaacagcauauggaguuauuggaauccucgguaaucccgcuaaugcaucccuuggcggaucccucaacaguuuuuaaggacggugacgaggcggaagauuuuguugagguucaccuuccggauguccacaagcaggucucgggaguugaucucggucucccaagcugggggaaguaugugcugaugaguguggguacucugauugcacugauggugaugauuuucuugaugacguguugcagaaaagcuaauggaguagaaucaaugcgacaccgucucggagagacgggaaggaaagugucugucaccucccaaagcgggagggucauauccuccugggagucguauaaaagcgggggugagaccaagcuguaa

SEQ ID NO: 63908 - RNA, 1575 nt, Artificial Sequence
  derived and/or modified CDS sequence (wt) from glycoprotein__RABV__LC071937.1
augauuccucaggcucuuuuguuuguaccccuuuugguuuucucauugugcuucgggaaauuccccaucuacacgauaccagacaaacucggcccuuggaguccuauugauauacaucaccucaguugcccuaacaauuuaguuguggaggaugaggggugcaccaaccugucaggauucuccuacauggaacucaaagugggguacauuucagccauaaaagugaacggguucacuugcacggguguagugacagaggcagagaccuacacaaacuuugucggcuacgucaccaccacguuuaagagaaagcacuuccgcccgacaccagaugccugcagagcagcauauaacuggaagauggcaggugaccccagauaugaggaaucucugcauaauccguaucccgauuaucacuggcuccggacuguaaagaccaccaaggagucucuuguuaucauaucuccgagugugucggauuuagacccguacgauaaaucucuucauuccagaguuuuucccagcgguaaaugcucagggauaacaguaucuuccaccuauugucccacuaaccaugacuauacuaucuggaugccggaaaauccaagacucgggaccucuugugacauuuucaccacuagcagagggaagagagcaucaaaagggggcaagaccuguggauuuguggacgaaagaggcuuguacaagucucuaaaaggggcaugcaaauugaagcuauguggaguucuuggacuuagacuuauggacggaacaugggcugcgauucaaacaucugaugaggccaaauggugcccuccugaucaguuagugaauauccaugauuuucgcucagaugagauugaacaucuuguuguggaagaguuaguaaagaaaagggaagaguguuuagaugcacuggagucuaucaugaccaccaaguccguaaguuucagacgccucagucacuugaggaagcucguccccggguuugggaaagcauauaccauauucaacaaaaccuugauggaggcugaugcucacuacaaaucaguccguacauggaaugaaaucaucccuucuaaaggauguuuaagaguuggggggcgaugucacccccaugugaacgggguguuuuucaaugguaucauccuggguccugauggacauguucuaaucccagagaugcagucgucucuccuucaacagcauauggaguuguuggaaucuucgguaaucccgcucaugcaucccuuggcagaucccucaacaguguuuaaggacgaugacgaggcagaagauuuugucgagguucaccuuccggauguccacaagcaggucucgggaguugaucucggucucccaagcugggggaaguaugugcugaugaguguaggcgcuaugauugcacugauguugaugauuuucuugacgacguguugcagaaaagcuaacggagcagaaucaacaccacaccgucucggagagacgggaaggaaagugucggucaccucccaaagcgggagggucauaucuuccugggagucguauaaaagcgggggugagaccaagcuguaa

SEQ ID NO: 63909 - RNA, 1575 nt, Artificial Sequence
  derived and/or modified CDS sequence (wt) from glycoprotein__RABV__LC071938.1
augauuccucaggcucuuuuguuuguaccccuuuugguuuucucauugugcuucgggaaauuccccaucuacacgauaccagacaaacucggcccuuggaguccuauugauauacaucaccucaguugcccuaacaauuuaguuguggaggaugaggggugcaccaaccugucaggauucuccuacauggaacucaaagugggguacauuucagccauaaaagugaacggguucacuugcacggguguagugacagaggcagagaccuacacaaacuuugucggcuacgucaccaccacguuuaagagaaagcacuuccgcccgacaccagaugccugcagagcagcauauaacuggaagauggcaggugaccccagauaugaggaaucucugcauaauccguaucccgauuaucacuggcuccggacuguaaagaccaccaaggagucucuuguuaucauaucuccgagugugucggauuuagacccguacgauaaaucucuucauuccagaguuuuucccagcgguaaaugcucagggauaacaguaucuuccaccuauugucccacuaaccaugacuauacuaucuggaugccggaaaauccaagacucgggaccucuugugacauuuucaccacuagcagagggaagagagcaucaaaagggggcaagaccuguggauuuguggacgaaagaggcuuguacaagucucuaaaaggggcaugcaaauugaagcuauguggaguucuuggacuuagacuuauggacggaacaugggcugcgauucaaacaucugaugaggccaaauggugcccuccugaucaguuagugaauauccaugauuuucgcucagaugagauugaacaucuuguuguggaagaguuaguaaagaaaagggaagaguguuuagaugcacuggagucuaucaugaccaccaaguccguaaguuucagacgccucagucacuugaggaagcucguccccggguuugggaaagcauauaccauauucaacaaaaccuugauggaggccgaugcucacuacaaaucaguccguacauggaaugaaaucaucccuucuaaaggauguuuaagaguuggggggagaugucacccccaugugaacgggguguuuuucaaugguaucauccuggguccugauggacauguucuaaucccagagaugcagucgucucuccuucaacagcauauggaguuguuggaaucuucgguaaucccgcucaugcaucccuuggcagaucccucaacaguguuuaaggacgaugacgaggcagaagauuuugucgagguucaccuuccggauguccacaagcaggucucgggaguugaucucggucucccaagcugggggaaguaugugcugaugaguguaggcgcuaugauugcacugauguugaugauuuucuugacgacguguugcagaaaagcuaacggagcagaaucaacaccacaccgucucggagagacgggaaggaaagugucggucaccucccaaagcgggagggucauaucuuccugggagucguauaaaagcgggggugagaccaagcuguaa

SEQ ID NO: 63910 - RNA, 1575 nt, Artificial Sequence
  derived and/or modified CDS sequence (wt) from glycoprotein__RABV__LC071939.1
augauuccucaggcucuuuuguuuguaccccuuuugguuuucucauugugcuucgggaaauuccccaucuacacgauaccagacaaacucggcccuuggaguccuauugauauacaucaccucaguugcccuaacaauuuaguuguggaggaugaggggugcaccaaccugucaggauucuccuacauggaacucaaagugggguacauuucagccauaaaagugaacggguucacuugcacggguguagugacagaggcagagaccuacacaaacuuugucggcuacgucaccaccacguuuaagagaaagcacuuccgcccgacaccagaugccugcagagcagcauauaacuggaagauggcaggugaccccagauaugaggaaucucugcauaauccguaucccgauuaucacuggcuccggacuguaaagaccaccaaggagucucuuguuaucauaucuccgagugugucggauuuagacccguacgauaaaucucuucauuccagaguuuuucccagcgguaaaugcucagggauaacaguaucuuccaccuauugucccacuaaccaugacuauacuaucuggaugccggaaaauccaagacucgggaccucuugugacauuuucaccacuagcagagggaagagagcaucaaaagggggcaagaccuguggauuuguggacgaaagaggcuuguacaagucucuaaaaggggcaugcaaauugaagcuauguggaguucuuggacuuagacuuauggacggaacaugggcugcgauucaaacaucugaugaggccaaauggugcccuccugaucaguuagugaauauccaugauuuucgcucagaugagauugaacaucuuguuguggaagaguuaguaaagaaaagggaagaguguuuagaugcacuggagucuaucaugaccaccaaguccguaaguuucagacgccucagucacuugaggaagcucguccccggguuugggaaagcauauaccauauucaacaaaaccuugauggaggcugaugcucacuacaaaucaguccguacauggaaugaaaucaucccuucuaaaggauguuuaagaguuggggggagaugucacccccaugugaacgggguguuuuucaaugguaucauccuggguccugauggacauguucuaaucccagagaugcagucgucucuccuucaacagcauauggaguuguuggaaucuucgguaaucccgcucaugcaucccuuggcagaucccucaacaguguuuaaggacgaugacgaggcagaagauuuugucgagguucaccuuccggauguccacaagcaggucucgggaguugaucucggucucccaagcugggggaaguaugugcugaugaguguaggcgcuaugauugcacugauguugaugauuuuucugacgacguguugcagaaaagcuaacggagcagaaucaacaccacaccgucucggagagacgggaaggaaagugucggucaccucccaaagcgggagggucauaucuuccugggagucguauaaaagcgggggugagaccaagcuguaa

SEQ ID NO: 63911 - RNA, 1575 nt, Artificial Sequence
  derived and/or modified CDS sequence (wt) from glycoprotein__RABV__LC071940.1
augauuccucaggcucuuuuguuuguaccccuuuugguuuucucauugugcuucgggaaauucuccaucuacacgauaccagacaaacucggcccuuggaguccuauugauauacaucaccucaguugcccuaacaauuuaguuguggaggaugaggggugcaccaaccugucaggauucuccuacauggaacucaaagugggguacauuucagccauaaaagugaacggguucacuugcacggguguagugacagaggcagagaccuacacaaacuuugucggcuacgucaccaccacguuuaagagaaagcacuuccgcccgacaccagaugccugcagagcagcauauaacuggaagauggcaggugaccccagauaugaggaaucucugcauaauccguaucccgauuaucacuggcuccggacuguaaagaccaccaaggagucucuuguuaucauaucuccgagugugucggauuuagacccguacgauaaaucucuucauuccagaguuuuucccagcgguaaaugcucagggauaacaguaucuuccaccuauugucccacuaaccaugacuauacuaucuggaugccggaaaauccaagacucgggaccucuugugacauuuucaccacuagcagagggaagagagcaucaaaagggggcaagaccuguggauuuguggacgaaagaggcuuguacaagucucuaaaaggggcaugcaaauugaagcuauguggaguucuuggacuuagacuuauggacggaacaugggcugcgauucaaacaucugaugaggccaaauggugcccuccugaucaguuagugaauauccaugauuuucgcucagaugagauugaacaucuuguuguggaagaguuaguaaagaaaagggaagaguguuuagaugcacuggagucuaucaugaccaccaaguccguaaguuucagacgccucagucacuugaggaagcucguccccggguuugggaaagcauauaccauauucaacaaaaccuugauggaggcugaugcucacuacaaaucaguccguacauggaaugaaaucaucccuucuaaaggauguuuaagaguuggggggagaugucacccccaugugaacgggguguuuuucaaugguaucauccuggguccugauggacauguucuaaucccagagaugcagucgucucuccuucaacagcauauggaguuguuggaaucuucgguaaucccgcucaugcaucccuuggcagaucccucaacaguguuuaaggacgaugacgaggcagaagauuuugucgagguucaccuuccggauguccacaagcaggucucgggaguugaucucggucucccaagcugggggaaguaugugcugaugaguguaggcgcuaugauugcacugauguugaugauuuucuugacgacguguugcagaaaagcuaacggagcagaaucaacacaacaccgucucggagagacgggaaggaaagugucggucaccucccaaagcgggagggucauaucuucccgggagucguauaaaagcgggggugagaccaagcuguaa

SEQ ID NO: 63912 - RNA, 1575 nt, Artificial Sequence
  derived and/or modified CDS sequence (wt) from glycoprotein__RABV__LC071941.1
augauuccucaggcucuuuuguuuguaccccuuuugguuuucucauugugcuucgggaaauuccccaucuacacgauaccagacaaacucggcccuuggaguccuauugauauacaucaccucaguugcccuaacaauuuaguuguggaggaugaggggugcaccaaccugucaggauucuccuacauggaacucaaagugggguacauuucagccauaaaagugaacggguucacuugcacggguguagugacagaggcagagaccuacacaaacuuugucggcuacgucaccaccacguuuaagagaaagcacuuccgcccgacaccagaugccugcagagcagcauauaacuggaagauggcaggugaccccagauaugaggaaucucugcauaauccguaucccgauuaucacuggcuccggacuguaaagaccaccaaggagucucuuguuaucauaucuccgagugugucggauuuagaccuguacgauaaaucucuucauuccagaguuuuucccagcgguaaaugcucagggauaacaguaucuuccaccuauugucccacuaaccaugacuauacuaucuggaugccggaaaauccaagacucgggaccucuugugacauuuucaccacuagcagagggaagagagcaucaaaagggggcaagaccuguggauuuguggacgaaagaggcuuguacaagucucuaaaaggggcaugcaaauugaagcuauguggaguucuuggacuuagacuuauggacggaacaugggcugcgauucaaacaucugaugaggccaaauggugcccuccugaucaguuagugaauauccaugauuuucgcucagaugagauugaacaucuuguuguggaagaguuaguaaagaaaagggaagaguguuuagaugcacuggagucuaucaugaccaccaaguccguaaguuucagacgccucagucacuugaggaagcucguccccggguuugggaaagcauauaccauauucaacaaaaccuugauggaggcugaugcucacuacaaaucaguccguacauggaaugaaaucaucccuucuaaaggauguuuaagaguuggggggagaugucacccccaugugaacgggguguuuuucaaugguaucauccuggguccugauggacauguucuaaucccagagaugcagucgucucuccuucaacagcauauggaguuguuggaaucuucgguaaucccgcucaugcaucccuuggcagaucccucaacaguguuuaaggacgaugacgaggcagaagauuuugucgagguucaccuuccggauguccacaagcaggucucgggaguugaucucggucucccaagcugggggaaguaugugcugaugaguguaggcgcuaugauugcacugauguugaugauuuucuugacgacguguugcagaaaagcuaacggagcagaaucaacacaacaccgucucggagagacgggaaggaaagugucggucaccucccaaagcgggagggucauaucuuccugggagucguauaaaagcgggggugagaccaagcuguaa

SEQ ID NO: 63913 - RNA, 1575 nt, Artificial Sequence
  derived and/or modified CDS sequence (wt) from glycoprotein__RABV__LC071943.1
augauuccucaggcucuuuuguuuguaccccuuuugguuuucucauugugcuucgggaaauuccccaucuacacgauaccagacaaacucggcccuuggaguccuauugauauacaucaccucaguugcccuaacaauuuaguuguggaggaugaggggugcaccaaccugucaggauucuccuacauggaacucaaagugggguacauuucagccauaaaagugaacggguucacuugcacggguguagugacagaggcagagaccuacacaaacuuugucggcuacgucaccaccacguuuaagagaaagcacuuccgcccgacaccagaugccugcggagcagcauauaacuggaagauggcaggugaccccagauaugaggaaucucugcauaauccguaucccgauuaucacuggcuccggacuguaaagaccaccaaggagucucuuguuaucauaucuccgagugugucggauuuagacccguacgauaaaucucuucauuccagaguuuuucccagcgguaaaugcucagggauaacaguaucuuccaccuauugucccacuaaccaugacuauacuaucuggaugccggaaaauccaagacucgggaccucuugugacauuuucaccacuagcagagggaagagagcaucaaaagggggcaagaccuguggauuuguggacgaaagaggcuuguacaagucucuaaaaggggcaugcaaauugaagcuauguggaguucuuggacuuagacuuauggacggaacaugggcugcgauucaaacaucugaugaggccaaauggugcccuccugaucaguuagugaauauccaugauuuucgcucagaugagauugaacaucuuguuguggaagaguuaguaaagaaaagggaagaguguuuagaugcacuggagucuaucaugaccaccaaguccguaaguuucagacgccucagucacuugaggaagcucguccccggguuugggaaagcauauaccauauucaacaaaaccuugauggaggcugaugcucacuacaaaucaguccauacauggaaugaaaucaucccuucuaaaggauguuuaagaguuggggggagaugucacccccaugugaacgggguguuuuucaaugguaucauccuggguccugauggacauguucuaaucccagagaugcagucgucucuccuucaacagcauauggaguuguuggaaucuucgguaaucccgcucaugcaucccuuggcagaucccucaacaguguuuaaggacgaugacgaggcagaagauuuugucgagguucaccuuccggauguccacaagcaggucucgggaguugaucucggucucccaagcugggggaaguaugugcugaugaguguaggcgcuaugauugcacugauguugaugauuuucuugacgacguguugcagaaaagcuaacggagcagaaucaacacaacaccgucucggagagacgggaaggaaagugucggucaccucccaaagcgggagggucauaucuuccugggagucguauaaaagcgggggugagacuaagcuguag

SEQ ID NO: 63914 - RNA, 1575 nt, Artificial Sequence
  derived and/or modified CDS sequence (wt) from glycoprotein__RABV__LC071944.1
augauuccucaggcucuuuuguuuguaccccuuuugguuuucucauugugcuucgggaaauuccccaucuacacgauaccagacaaacucggcccuuggaguccuauugauauacaucaccucaguugcccuaacaauuuaguuguggaggaugaggggugcaccaaccugucaggauucuccuacauggaacucaaagugggguacauuucagccauaaaagugaacggguucacuugcacggguguagugacagaggcagagaccuacacaaacuuugucggcuacgucaccaccacguuuaagagaaagcacuuccgcccgacaccagaugccugcagagcagcauauaacuggaagauggcaggugaccccagauaugagguaucucugcauaauccguaucccgauuaucacuggcuccggacuguaaagaccaccaaggagucucuuguuaucauaucuccgagugugucggauuuagacccguacgauaaaucucuucauuccagaguuuuucccagcgguaaaugcucagggauaacaguaucuuccaccuauugucccacuaaccaugacuauacuaucuggaugccggaaaauccaagacucgggaccucuugugacauuuucaccacuagcagagggaagagagcaucaaaagggggcaagaccuguggauuuguggacgaaagaggcuuguacaagucucuaaaaggggcaugcaaauugaagcuauguggaguucuuggacuuagacuuauggacggaacaugggcugcgauucaaacaucugaugaggccaaauggugcccuccugaucaguuagugaauauccaugauuuucgcucagaugagauugaacaucuuguuguggaagaguuaguaaagaaaagggaagaguguuuagaugcacuggagucuaucaugaccaccaaguccguaaguuucagacgccucagucacuugaggaagcucguccccggguuugggaaagcauauaccauauucaacaaaaccuugauggaggcugaugcucacuacaaaucaguccguacauggaaugaaaucaucccuucuaaaggauguuuaagaguuggggggagaugucacccccaugugaacgggguguuuuucaaugguaucauccuggguccugauggacauguucuaaucccagagaugcagucgucucuccuucaacagcauauggaguuguuggaaucuucgguaaucccgcucaugcaucccuuggcagaucccucaacaguguuuaaggacgaugacgaggcagaagauuuugucgagguucaccuuccggauguccacaagcaggucucgggaguugaucucggucucccaagcugggggaaguaugugcugaugaguguaggcgcuaugauugcacugauguugaugauuuucuugacgacguguugcagaaaagcuaacggagcagaaucaacacaacaccgucucggagagacgggaaggaaagugucggucaccucccaaagcgggagggucauaucuuccugggagucguauaaaagcgggggugagaccaagcuguag

SEQ ID NO: 63915 - RNA, 1575 nt, Artificial Sequence
  derived and/or modified CDS sequence (wt) from glycoprotein__RABV__LC071945.1
augauuccucaggcucuuuuguuuguaucccuuuugguuuucucauugugcuucgggaaauuccccaucuacacgauaccagacaaacucggcccuuggaguccuauugauauacaucaccucaguugcccuaacaauuuaguuguggaggaugaggggugcaccaaccugucaggauucuccuacauggaacucaaagugggguacauuucagccauaaaagugaacggguucacuugcacggguguagugacagaggcagagaccuacacaaacuuugucggcuacgucaccaccacguuuaagagaaagcacuuccgcccgacaccagaugccugcagagcagcauauaacuggaagauggcaggugaccccagauaugaggaaucucugcauaauccguaucccgauuaucacuggcuccggacuguaaagaccaccaaggagucucuuguuaucauaucuccgagugugucggauuuagacccguacgauaaaucucuucauuccagaguucuucccggcgguaaaugcucagggauaacaguaucuuccaccuauugucccacuaaccaugacuauacuaucuggaugccggaaaauccaagacucgggaccucuugugacauuuucaccacuagcagagggaagagagcaucaaaagggggcaagaccuguggauuuguggacgaaagaggcuuguacaagucucuaaaaggggcaugcaaauugaagcuauguggaguucuuggacuuagacuuauggacggaacaugggcugcgauucaaacaucugaugaggccaaauggugcccuccugaucaguuagugaauauccaugauuuucgcucagaugagauugaacaucuuguuguggaagaguuaguaaagaaaagggaagaguguuuagaugcacuggagucuaucaugaccaccaaguccguaaguuucagacgccucagucacuugaggaagcucguccccggguuugggaaagcauauaccauauucaacaaaaccuugauggaggcugaugcucacuacaaaucaguccguacauggaaugaaaucaucccuucuaaaggauguuuaagaguuggggggagaugucacccccaugugaacgggguguuuuucaaugguaucauccuggguccugauggacauguucuaaucccagagaugcagucgucucuccuucaacagcauauggaguuguuggaaucuucgguaaucccgcucaugcaucccuuggcagaucccucaacaguguuuaaggacgaugacgaggcagaagauuuugucgagguucaccuuccggauguccacaagcaggucucgggaguugaucucggucucccaagcugggggaaguaugugcugaugaguguaggcgcuaugauugcacugauguugaugauuuucuugacgacguguugcagaaaagcuaacggagcagaaucaacacaacaccgucucggagagacgggaaggaaagugucggucaccucccaaagcgggagggucauaucuuccugggagucguauaaaagcgggggugagaccaagcuguag

SEQ ID NO: 63916 - RNA, 1575 nt, Artificial Sequence
  derived and/or modified CDS sequence (wt) from glycoprotein__RABV__LC071946.1
augauuccucaggcucuuuuguuuguaccccuuuugguuuucucauugugcuucgggaaauuccccaucuacacgauaccagacaaacucggcccuuggaguccuauugauauacaucaccucaguugcccuaacaauuuaguuguggaggaugaggggugcaccaaccugucaggauucuccuacauggaacucaaagugggguacauuucagccauaaaagugaacggguucacuugcacggguguagugacagaggcagagaccuacacaaacuuugucggcuacgucaccaccacguuuaagagaaagcacuuccgcccgacaccagaugccugcagagcagcauauaacuggaagauggcaggugaccccagauaugaggaaucucugcauaauccguaucccgauuaucacuggcuccggacuguaaagaccaccaaggagucucuuguuaucauaucuccgagugugucggauuuagacccguacgauaaaucucuucauuccagaguuuuucccggcgguaaaugcucagggauaacaguaucuuccaccuauugucccacuaaccaugacuauacuaucuggaugccggaaaauccaagacucgggaccucuugugacauuuucaccacgagcagagggaagagagcaucaaaagggggcaagaccuguggauuuguggacgaaagaggcuuguacaagucucuaaaaggggcaugcaaauugaagcuauguggaguucuuggacuuagacuuauggacggaacaugggcugcgauucaaacaucugaugaggccaaauggugcccuccugaucaguuagugaauauccaugauuuucgcucagaugagauugaacaucuuguuguggaagaguuaguaaagaaaagggaagaguguuuagaugcacuggagucuaucaugaccaccaaguccguaaguuucagacgccucagucacuugaggaagcucguccccggguuugggaaagcauauaccauauucaacaaaaccuugauggaggcugaugcucacuacaaaucaguccguacauggaaugaaaucaucccuucuaaaggauguuuaagaguuggggggagaugucacccccaugugaacgggguguuuuucaaugguaucauccuggguccugauggacauguucuaaucccagagaugcagucgucucuccuucaacagcauauggagcuguuggaaucuucgguaaucccgcucaugcaucccuuggcagaucccucaacaguguuuaaggacgaugacgaggcagaagauuuugucgagguucaccuuccggauguccacaagcaggucucgggaguugaucucggucucccaagcugggggaagcaugugcugaugaguguaggcgcuaugauugcacugauguugaugauuuucuugacgacguguugcagaaaagcuaacggagcagaaucaacacaacaccgucucggagagacgggaaggaaagugucggucaccucccaaagcggaagggucauaucuuccugggagucguauaaaagcgggggugagaccaagcuguag

SEQ ID NO: 63917 - RNA, 1575 nt, Artificial Sequence
  derived and/or modified CDS sequence (wt) from glycoprotein__RABV__LC071947.1
augauuccucaggcucuuuuguuuguaccccuuuugguuuucucauugugcuucgggaaauuccccaucuacacgauaccagacaaacucggcccuuggaguccuauugauauacaucaucucaguugcccuaacaauuuaguuguggaggaugaggggugcaccaaccugucaggauucuccuacauggaacucaaagugggguacauuucggccauaaaagugaacggguucacuugcacggguguagugacagaggcagagaccuacacaaacuuugucggcuacgucaccaccacguuuaagagaaagcacuuucgcccgacaccagaugccugcagagcagcauauaacuggaagauggcaggugaccccagauaugaggaaucucugcauaauccguaucccgauuaucacuggcuccggacaguaaagaccaccaaggagucucuuguuaucauaucuccgagugugucggauuuagacccguacgauaaaucucuucauuccagaguuuuucccagcgguaaaugcucagggauaacaguaucuuccaccuauugucccacuaaccaugacuauacuaucuggaugccggaaaauccaagacucgggaccucuugugacauuuucaccacuagcagagggaagagagcaucaaaggggggcaagaccuguggauuuguggacgaaagaggcuuguacaagucucuaaaaggggcaugcaaauugaagcuauguggaguucuuggacuuagacuuauggacggaacaugggcugcgauucaaacaucugaugaggccaaauggugcccuccugaucaguuagugaauauccaugauuuucgcucagaugagauugaacaucuuguuguggaagaguuaguaaagaaaagggaagaguguuuagaugcacuggagucuaucaugaccaccaaguccguaaguuucagacgccucagucacuugaggaagcucguccccggguuugggaaagcauauaccauauucaacaaaaccuugauggaggcugaugcucacuacaaaucaguccguacauggaaugaaaucaucccuucuaaaggauguuuaagaguuggggggagaugucacccccaugugaacgggguguuuuucaaugguaucauccuggguccugauggacauguucuaaucccagagaugcagucgucucuccuucaacagcauauggaguuguuggaaucuucgguaaucccgcucaugcaucccuuggcagaucccucaacaguguuuaaggacgaugacgaggcagaagauuuugucgagguucaccuuccggauguccacaagcaggucucgggaguugaucucggucucccaagcugggggaaguaugugcugaugaguguaggcgcuaugauugcacugauguugaugauuuucuugacgacguguugcagaaaagcuaacggagcagaaucaacacaacaccgucucggagagacgggaaggaaagugucggucaccucccaaagcgggagggucauaucuuccugggagucguauaaaagcgggggugagaccaagcuguag

SEQ ID NO: 63918 - RNA, 1575 nt, Artificial Sequence
  derived and/or modified CDS sequence (wt) from glycoprotein__RABV__LC071948.1
augauuccucaggcucuuuuguuuguaccccuuuugguuuucucauugugcuucgggaaauuccccaucuacacgauaccagacaaacucggcccuuggaguccuauugauauacaucaucucaguugcccuaacaauuuaguuguggaggaugaggggugcaccaaccugucaggauucuccuacauggaacucaaagugggguacauuucagccauaaaagugaacggguucacuugcacggguguagugacagaggcagagaccuacacaaacuuugucggcuacgucaccaccacguuuaagagaaagcacuuccgcccgacaccagaugccugcagagcagcauauaacuggaagauggcaggugaccccagauaugaggaaucucugcauaauccguaucccgauuaucacuggcuccggacuguaaagaccaccaaggagucucuuguuaucauaucuccgagugugucggauuuagacccguacgauaaaucucuucauuccagaguuuuucccagcgguaaaugcucagggauaacaguaucuuccaccuauugucccacuaaccaugacuauacuaucuggaugccggaaaauccaagacucgggaccucuugugacauuuucaccacuagcagagggaagagagcaucaaaagggggcaagaccuguggauuuguggacgaaagaggcuuguacaagucucuaaaaggggcaugcaaauugaagcuauguggaguucuuggacuuagacuuauggacggaacaugggcugcgauucaaacaucugaugaggccaaauggugcccuccugaucaguuagugaauauccaugauuuucgcucagaugagauugaacaucuuguuguggaagaguuaguaaagaaaagggaagaauguuuagaugcacuggagucuaucaugaccaccaaguccguaaguuucagacgccucagucacuugaggaagcucguccccggguuugggaaagcauauaccauauucaacaaaaccuugauggaggcugaugcucacuacaaaucaguccguacauggaaugaaaucaucccuucuaaaggauguuuaagaguuggggggagaugucacccccaugugaacgggguguuuuucaaugguaucauccuggguccugauggacauguucuaaucccagagaugcagucgucucuccuucaacagcauauggaguuguuggaaucuucgguaaucccgcucaugcaucccuuggcagaucccucaacaguguuuaaggacgaugacgaggcagaagauuuugucgagguucaccuuccggauguccacaagcaggucucgggaguugaucucggucucccaagcugggggaaguaugugcugaugaguguaggcgcuaugauugcacugauguugaugauuuucuugaugacguguugcagaaaagcuaacggagcagaaucaacacaacaccgucucggagagacgggaaggaaagugucggucaccucccaaagcgggagggucauaucuuccugggagucguauaaaagcgggggugagaccaagcuguaa

SEQ ID NO: 63919 - RNA, 1575 nt, Artificial Sequence
  derived and/or modified CDS sequence (wt) from glycoprotein__RABV__LC071949.1
augauuccucaggcucuuuuguuuguaccccuuuugguuuucucauugugcuucgggaaauuccccaucuacacgauaccagacaaacucggcccuuggaguccuauugauauacaucaucucaguugcccuaacaauuuaguuguggaggaugaggggugcaccaaccugucaggauucuccuacauggaacucaaagugggguacauuucagccauaaaagugaacggguucacuugcacggguguagugacagaggcagagaccuacacaaacuuugucggcuacgucaccaccacguuuaagagaaagcacuuccgcccgacaccagaugccugcagagcagcauauaacuggaagauggcaggugaccccagguaugaggaaucucugcauaauccguaucccgauuaucacuggcuccggacuguaaagaccaccaaggagucucuuguuaucauaucuccgagugugucggauuuagacccguacgauaaaucucuucauuccagaguuuuucccagcgguaaaugcucagggauaacaguaucuuccaccuauugucccacuaaccaugacuauacuaucuggaugccggaaaauccaagacucgggaccucuugugacauuuucaccacuagcagagggaagagagcaucaaaagggggcaagaccuguggauuuguggacgaaagaggcuuguacaagucccuaaaaggggcaugcaaauugaagcuauguggaguucuuggacuuagacuuauggacggaacaugggcugcgauucaaacauccgaugaggccaaauggugcccuccugaucaguuagugaauauccaugauuuucgcucagaugagauugaacaucuuguuguggaagaguuaguaaagaaaagggaagaauguuuagaugcacuggagucuaucaugaccaccaaguccguaaguuucagacgccucagucacuugaggaagcucguccccggguuugggaaagcauauaccauauucaacaaaaccuugauggaggcugaugcucacuacaaaucaguccguacauggaaugaaaucaucccuucuaaaggauguuuaagaguuggggggagaugucacccccaugugaacgggguguuuuucaaugguaucauccuggguccugauggacauguucuaaucccagagaugcagucgucucuccuucaacagcauauggaguuguuggaaucuucgguaaucccgcucaugcaucccuuggcagaucccucaacaguguuuaaggacgaugacgaggcagaagauuuugucgagguucaccuuccggauguccacaagcaggucucgggaguugaucucggucucccaagcugggggaaguaugugcugaugaguguaggcgcuaugauugcacugauguugaugauuuucuugacgacguguugcagaaaagcuaacggagcagaaucaacacaacaccgucucggagagacgggaaggaaagugucggucaccucccaaagcgggagggucauaucuuccugggagucguauaaaagcgggggugagaccaagcuguaa

SEQ ID NO: 63920 - RNA, 1575 nt, Artificial Sequence
  derived and/or modified CDS sequence (wt) from glycoprotein__RABV__LC071950.1
augauuccucaggcucuuuuguuuguaccccuuuugguuuucucauugugcuucgggaaauuccccaucuacacgauaccagacaaacucggcccuuggaguccuauugauauacaucaucucaguugcccuaacaauuuaguuguggaggaugaggggugcaccagccugucaggauucuccuacauggaacucaaagugggguacauuucagccauaaaagugaacggguucacuugcacggguguagugacagaggcagagaccuacacaaacuuugucggcuacgucaccaccacguuuaagagaaagcacuuccgcccgacaccagaugccugcagagcagcauauaacuggaagauggcaggugaccccagguaugaggaaucucugcauaauccguaucccgauuaucacuggcuccggacuguaaagaccaccaaggagucucuuguuaucauaucuccgagugugucggauuuagacccguacgauaaaucucuucauuccagaguuuuucccagcgguaaaugcucagggauaacaguaucuuccaccuauugucccacuaaccaugacuauacuaucuggaugccggaaaagccaagacucgggaccucuugugacauuuucaccacuagcagagggaagagagcaucaaaagggggcaagaccuguggauuuguggacgaaagaggcuuguacaagucucuaaaaggggcaugcaaauugaagcuauguggaguucuuggacuuagacuuauggacggaacaugggcugcgauucaaacaucugaugaggccaaauggugcccuccugaucaguuagugaauauccaugauuuucgcucagaugagauugaacaucuuguuguggaagaguuaguaaagaaaagggaagaauguuuagaugcacuggagucuaucaugaccaccaaguccguaaguuucagacgccucagucacuugaggaagcucguccccggguuugggaaagcauauaccauauucaacaaaaccuugauggaggcugaugcucacuacaaaucaguccguacauggaaugaaaucaucccuucuaaaggauguuuaagaguuggggggagaugucacccccaugugaacgggguguuuuucaaugguaucauccuggguccugauggacauguucuaaucccagagaugcagucgucucuccuucaacagcauauggaguuguuggaaucuucgguaaucccgcucaugcaucccuuggcagaucccucaacaguguuuaaggacgaugacgaggcagaagauuuugucgagguucaccuuccggauguccacaagcaggucucgggaguugaucucggucucccaagcugggggaaguaugugcugaugaguguaggcgcuaugauugcacugauguugaugauuuucuugacgacguguugcagaaaagcuaacggagcagaaucaacacaacaccgucucggagagacgggaaggaaagugucggucaccucccaaagcgggagggucauaucuuccugggagucguauaaaagcgggggugagaccaagcuguaa

SEQ ID NO: 63921 - RNA, 1575 nt, Artificial Sequence
  derived and/or modified CDS sequence (wt) from glycoprotein__RABV__LC071951.1
augauuccucaggcucuuuuguuuguaccccuuuugguuuucucauugugcuucgggaaauuccccaucuacacgauaccagacaaacucggcccuuggaguccuauugauauacaucaucucaguugcccuaacaauuuaguuguggaggaugaggggugcaccaaccugucaggauucuccuacauggaacucaaggugggguacauuucagccauaaaagugaacggguucacuugcacggguguagugacagaggcagagaccuacacaaacuuugucggcuacgucaccaccacguuuaagagaaagcacuuccgcccgacaccagaugccugcagagcagcauauaacuggaagauggcaggugaccccagguaugaggaaucucugcauaauccguaucccgauuaucacuggcuccggacuguaaagaccaccaaggagucucuuguuaucauaucuccgagugugucggauuuagacccguacgauaaaucucuucauuccagaguuuuucccagcgguaaaugcucagggauaacaguaucuuccaccuauugucccacuaaccaugacuauacuaucuggaugccggaaaauccaagacucgggaccucuugugacauuuucaccacuagcagagggaagagagcaucaaaagggggcaagaccuguggauuuguggacgaaagaggcuuguacaagucucuaaaaggggcaugcaaauugaagcuauguggaguucuuggacuuagacuuauggacggaacaugggcugcgauucaaacaucugaugaggccaaauggugcccuccugaucaguuagugaauauccaugauuuucgcucagaugagauugaacaucuuguuguggaagaguuaguaaagaaaagggaagaauguuuagaugcacuggagucuaucaugaccaccaaguccguaaguuucagacgccucagucacuugaggaggcucguccccggguuugggaaagcauauaccauauucaacaaaaccuugauggaggcugaugcucacuacaaaucaguccguacauggaaugaaaucaucccuucuaaaggauguuuaagaguuggggggagaugucacccccaugugaacgggguguuuuucaaugguaucauccuggguccugauggacauguucuaaucccagagaugcagucgucucuccuucaacagcauauggaguuguuggaaucuucgguaaucccgcucaugcaucccuuggcagaucccucaacaguguuuaaggacgaugacgaggcagaagauuuugucgagguucaccuuccggauguccacaagcaggucucgggaguugaucucggucucccaagcugggggaaguaugugcugaugaguguaggcgcuaugauugcacugauguugaugauuuucuugacgacguguugcagaaaagcuaacggagcagaaucaacacaacaccgucucggagagacgggaaggaaagugucggucaccucccaaagcgggagggucauaucuuccugggagucguauaaaagcgggggugagaccaagcuguaa

SEQ ID NO: 63922 - RNA, 1575 nt, Artificial Sequence
  derived and/or modified CDS sequence (wt) from glycoprotein__RABV__LC071952.1
augauuccucaggcucuuuuguuuguaccccuuuugguuuucucauugugcuucgggaaauuccccaucuacacgauaccagacaaacucggcccuuggaguccuauugauauacaucaucucaguugcccuaacaauuuaguuguggaggaugaggggugcaccaaccugucaggauucuccuacauggaacucaaagugggguacauuucagccauaaaagugaacggguucacuugcacggguguagugacagaggcagagaccuacacaaacuuugucggcuacgucaccaccacguuuaagagaaagcacuuccgcccgacaccagaugccugcagagcagcauauaacuggaagauggcaggugaccccagauaugaggaaucucugcauaauccguaucccgauuaucacuggcuccggacuguaaagaccaccaaggagucucuuguuaucauaucuccgagugugucggauuuagacccguacgauaaaucucuucauuccagaguuuuucccagcgguaaaugcucaggaauaacaguaucuuccaccuauugucccacuaaccaugacuauacuaucuggaugccggaaaauccaagacucgggaccucuugugacauuuucaccacuagcagagggaagagagcaucaaaagggggcaagaccuguggauuuguggacgaaagaggcuuguacaagucucuaaaaggggcaugcaaauugaagcuauguggaguucuuggacuuagacuuauggacggaacaugggcugcgauucaaacaucugaugaggccaaauggugcccuccugaucaguuagugaauauccaugauuuucgcucagaugagauugaacaucuuguuguggaagaguuaguaaagaaaagggaagaguguuuagaugcacuggagucuaucaugaccaccaaguccguaaguuucagacgccucagucacuugaggaagcucguccccggguuugggaaagcauauaccauauucaacaaaaccuugauggaggcugaugcucacuacaaaucaguccguacauggaaugaaaucaucccuucuaaaggauguuuaagaguuggggggagaugucacccccaugugaacgggguguuuuucaaugguaucauccuggguccugauggacauguucuaaucccagagaugcagucgucucuccuucaacagcauauggaguuguuggaaucuucgguaaucccgcucaugcaucccuuggcagaucccucaacaguguuuaaggacgaugacgaggcagaagauuuugucgagguucaccuuccggauguccacaagcaggucucgggaguugaucucggucucccaagcugggggaaguaugugcugaugaguguaggcgcuaugauugcacugauguugaugauuuucuugacgacguguugcagaaaagcuaacggagcagaaucaacacaacaccgucucggagagacgggaaggaaagugucggucaccucccaaagcgggagggucauaucuuccugggagucguauaaaagcgggggugagaccaagcuguaa

SEQ ID NO: 63923 - RNA, 1575 nt, Artificial Sequence
  derived and/or modified CDS sequence (wt) from glycoprotein__RABV__LC071953.1
augauuccucaggcucuuuuguuuguaccccuuuugguuuucucauugugcuucgggaaauuccccaucuacacgauaccagacaaacucggcccuuggaguccuauugauauacaucaucucaguugccccaacaauuuaguuguggaggaugaggggugcaccaaccugucaggauucuccuacauggaacucaaagugggguacauuucagccauaaaagugaacggguucacuugcacggguguagugacagaggcagagaccuacacaaacuuugucggcuacgucaccaccacguuuaagagaaagcacuuccgcccgacaccagaugccugcagagcagcauauaacuggaagauggcaggugaccccagauaugaggaaucucugcauaauccguaucccgauuaucacuggcuccggacuguaaagaccaccaaggagucucuuguuaucauaucuccgagugugucggauuuagacccguacgauaaaucucuucauuccagaguuuuucccagcgguaaaugcucaggaauaacaguaucuuccaccuauugucccacuaaccaugacuauacuaucuggaugccggaaaauccaagacucgggaccucuugugacauuuucaccacuagcagagggaagagagcaucaaaagggggcaagaccuguggauuuguggacgaaagaggcuuguacaagucucuaaaaggggcaugcaaauugaagcuauguggaguucuuggacuuagacuuauggacggaacaugggcugcgauucaaacaucugaugaggccaaauggugcccuccugaucaguuagugaauauccaugauuuucgcucagaugagauugaacaucuuguuguggaagaguuaguaaagaaaagggaagaguguuuagaugcacuggagucuaucaugaccaccaaguccguaaguuucagacgccucagucacuugaggaagcucguccccggguuugggaaagcauauaccauauucaacaaaaccuugauggaggcugaugcucacuacaaaucaguccguacguggaaugaaaucaucccuucuaaaggauguuuaagaguuggggggagaugucacccccaugugaacgggguguuuuucaaugguaucauccuggguccugauggacauguucuaaucccagagaugcagucgucucuccuucaacagcauauggaguuguuggaaucuucgguaaucccgcucaugcaucccuuggcagaucccucaacaguguuuaaggacgaugacgaggcagaagauuuugucgagguucaccuuccggauguccacaagcaggucucgggaguugaucucggucucccaagcugggggaaguaugugcugaugaguguaggcgcuaugauugcacugacguugaugauuuucuugacgacguguugcagaaaagcuaacggagcagaaucaacacaacaccgucucggagagacgggaaggaaagugucggucaccucccaaagcgggagggucauaucuuccugggagucguauaaaagcgggggugagaccaagcuguaa

SEQ ID NO: 63924 - RNA, 1575 nt, Artificial Sequence
  derived and/or modified CDS sequence (wt) from glycoprotein__RABV__LC071954.1
augauuccucaggcucuuuuguuuguaccccuuuugguuuucucauugugcuucgggaaauuccccaucuacacgauaccagacaaacucggcccuuggaguccuauugauauacaucaucucaguugcccuaacaauuuaguuguggaggaugaggggugcaccaaccugucaggauucuccuacauggaacucaaagugggguacauuucagccauaaaagugaacggguucacuugcacggguguaguggcagaggcagagaccuacacaaacuuugucggcuacgucaccaccacguuuaagagaaagcacuuccgcccgacaccagaugccugcagagcagcauauaacuggaagauggcaggugaccccagauaugaggaaucucugcauaauccguaucccgauuaucacuggcuccggacuguaaagaccaccaaggagucucuuguuaucauaucuccgagugugucggauuuagacccguacgauaaaucucuucauuccagaguuuuucccagcgguaaaugcucaggaauaacaguaucuuccaccuauugucccacuaaccaugacuauacuaucuggaugccggaaaauccaagacucgggaccucuugugacauuuucaccacuagcagagggaagagagcaucaaaagggggcaagaccuguggauuuguggacgaaagaggcuuguacaagucucuaaaaggggcaugcaaauugaagcuauguggaguucuuggacuuagacuuauggacggaacaugggcugcgauucaaacaucugaugaggccaaauggugcccuccugaucaguuagugaauauccaugauuuucgcucagaugagauugaacaucuuguuguggaagaguuaguaaagaaaagggaagaguguuuagaugcacuggagucuaucaugaccaccaaguccguaaguuucagacgccucagucacuugaggaaguucguccccggguuugggaaagcauauaccauauucaacaaaaccuugauggaggcugaugcucacuacaaaucaguccguacauggaaugaaaucaucccuucuaaaggauguuuaagaguuggggggagaugucacccccaugugaacgggguguuuuucaaugguaucauccuggguccugauggacauguucuaaucccagagaugcagucgucucuccuucaacagcauauggaguuguuggaaucuucgguaaucccgcucaugcaucccuuggcagaucccucaacaguguuuaaggacgaugacgaggcagaagauuuugucgagguucaccuuccggauguccacaagcaggucucgggaguugaucucggucucccaagcugggggaaguaugugcugaugaguguaggcgcuaugauugcacugauguugaugauuuucuugacgacguguugcagaaaagcuaacggagcagaaucaacacaacaccgucucggagagacgggaaggaaagugucggucaccucccaaagcgggagggucauaucuuccugggagucguauaaaagcgggggugagaccaagcuguaa

SEQ ID NO: 63925 - RNA, 1575 nt, Artificial Sequence
  derived and/or modified CDS sequence (wt) from glycoprotein__RABV__LC071955.1
augauuccucaggcucuuuuguuuguaccccuuuugguuuucucauugugcuucgggaaauuccccaucuacacgauaccagacaaacucggcccuuggaguccuauugauauacaucaucucaguugcccuaacaauuuaguuguggaggaugaggggugcaccaaccugucaggauucuccuacauggaacucaaagugggguacauuucagccauaaaagugaacggguucacuugcacggguguagugacagaggcagagaccuacacaaacuuugucggcuacgucaccaccacguuuaagagaaagcacuuccgcccgacaccagaugccugcagagcagcauauaacuggaagauggcaggugaccccagauaugaggaaucucugcauaauccguaucccgauuaucacuggcuccggacuguaaagaccaccaaggagucucuuguuaucauaucuccgagugugucggauuuagacccguacgauaaaucucuucauuccagaguuuuucccagcgguaaaugcucaggaauaacaguaucuuccaccuauugucccacuaaccaugacuauacuaucuggaugccggaaaauccaagacucgggaccucuugugacauuuucaccacuagcagagggaagagagcaucaaaagggggcaagaccuguggauuuguggacgaaagaggcuuguacaagucucuaaaaggggcaugcaaauugaagcuauguggaguucuuggacuuagacuuauggacggaacaugggcugcgauucaaacaucugaugaggccaaauggugcccuccugaucaguuagugaauauccaugauuuucgcucagaugagauugaacaucuuguuguggaagaguuaguaaagaaaagggaagaguguuuagaugcacuggagccuaucaugaccaccaaguccguaaguuucagacgccucagucacuugaggaagcucguccccggguuugggaaagcauauaccauauucaacaaaaccuugauggaggcugaugcucacuacaaaucaguccguacauggaaugaaaucaucccuucuaaaggauguuuaagaguuggggggagaugucacccccaugugaacgggguguuuuucaaugguaucauccuggguccugauggacauguucuaaucccagagaugcagucgucucuccuucaacagcauauggaguuguuggaaucuucgguaaucccgcucaugcaucccuuggcagaucccucaacaguguuuaaggaugaugacgaggcagaagauuuugucgagguucaccuuccggauguccacaagcaggucucgggaguugaucucggucucccaagcugggggaaguaugugcugaugaguguaggcgcuaugauugcacugauguugaugauuuucuugacgacguguugcagaaaagcuaacggagcagaaucaacacaacaccgucucggagagacgggaaggaaagugucggucaccucccaaagcgggagggucauaucuuccugggagucguauaaaagcgggggugagaccaagcuguaa

SEQ ID NO: 63926 - RNA, 1575 nt, Artificial Sequence
  derived and/or modified CDS sequence (wt) from glycoprotein__RABV__LC071956.1
augauuccucaggcucuuuuguuuguaccccuuuugguuuucucauugugcuucgggaaauuccccaucuacacgauaccagacaaacucggcccuuggaguccuauugauauacaucaucucaguugcccuaacaauuuaguuguggaggaugaggggugcaccaaccugucaggauucuccuacauggaacucaaagugggguacauuucagccauaaaagugaacggguucacuugcacggguguagugacagaggcagagaccuacacaaacuuugucggcuacgucaccaccacguuuaagagaaagcacuuccgcccgacaccagaugccugcagagcagcauauaacuggaagauggcaggugaccccagauaugaggaaucucugcauaauccguaucccgauuaucacuggcuccggacuguaaagaccaccaaggagucucuuguuaucauaucuccgagugugucggauuuagacccguacgauaaaucucuucauuccaaaguuuuucccagcgguaaaugcucaggaauaacaguaucuuccaccuauugucccacuaaccaugacuauacuaucuggaugccggaaaauccaagacucgggaccucuugugacauuuucaccacuagcagagggaagagagcaucaaaagggggcaagaccuguggauuuguggacgaaagaggcuuguacaagucucuaaaaggggcaugcaaauugaugcuauguggaguucuuggacuuagacuuauggacggaacaugggcugcgauucaaacaucugaugaggccaaauggugcccuccugaucaguuagugaauauccaugauuuucgcucagaugagauugaacaucuuguuguggaagaguuaguaaagaaaagggaagaguguuuagaugcacuggagucuaucaugaccaccaaguccguaaguuucagacgccucagucacuugaggaagcucguccccggguuugggaaagcauauaccauauucaacaaaaccuugauggaggcugaugcucacuacaaaucaguccguacauggaaugaaaucaucccuucuaaaggauguuuaagaguuggggggagaugucacccccaugugaacgggguguuuuucaaugguaucauccuggguccugauggacauguucuaaucccagagaugcagucgucucuccuucaacagcauauggaguuguuggaaucuucgguaaucccgcucaugcaucccuuggcagaucccucaacaguguuuaaggacgaugacgaggcagaagauuuugucgagguucaccucccggauguccacaagcaggucucgggaguugaucucggucucccaagcugggggaaguaugugcugaugaguguaggcgcuaugauugcacugauguugaugauuuucuugacgacguguugcagaaaggcuaacggagcagaaucaacacaacaccgucucggagagacgggaaggaaagugucggucaccucccaaagcgggagggucauaucuuccugggagucguauaaaagcgggggugagaccaagcuguag

SEQ ID NO: 63927 - RNA, 1575 nt, Artificial Sequence
  derived and/or modified CDS sequence (wt) from glycoprotein__RABV__LC071957.1
augauuccucaggcucuuuuguuuguaccccuuuugguuuucucauugugcuucgggaaauuccccaucuacacgauaccagacaaacucggcccuuggaguccuauugauauacaucaucucaguugcccuaacaauuuaguuguggaggaugaggggugcaccaaccugucaggauucuccuacauggaacucaaagugggguacauuucagccauaaaagugaacggguucacuugcacggguguagugacagaggcagagaccuacacaaacuuugucggcuacgucaccaccacguuuaagagaaagcacuuccgcccgacaccagaugccugcagagcagcauauaacuggaagauggcaggugaccccagauaugaggaaucucugcauaauccguaucccgauuaucacuggcuccggacuguaaagaccaccaaggagucucuuguuaucauaucuccgagugugucggauuuagacccguacgauaaaucucuucauuccaaaguuuuucccagcgguaaaugcucaggaauaacaguaucuuccaccuauugucccacuaaccaugacuauacuaucuggaugccggaaaauccaagacucgggaccucuugugacauuuucaccacuagcagagggaagagagcaucaaaagggggcaagaccuguggauuuguggacgaaagaggcuuguacaagucucuaaaaggggcaugcaaauugaugcuauguggaguucuuggacuuagacuuauggacggaacaugggcugcgauucaaacaucugaugaggccaaauggugcccuccugaucaguuagugaauauccaugauuuucgcucagaugagauugaacaucuuguuguggaagaguuaguaaagaaaagggaagaguguuuagaugcacuggagucuaucaugaccaccaaguccguaaguuucagacgccucagucacuugaggaagcucguccccggguuugggaaagcauauaccauauucaacaaaaccuugauggaggcugaugcucacuacaaaucaguccguacauggaaugaaaucaucccuucuaaaggauguuuaagaguuggggggagaugucacccccaugugaacgggguguuuuucaaugguaucauccuggguccugauggacauguucuaaucccagagaugcagucgucucuccuucaacagcauauggaguuguuggaaucuucgguaaucccgcucaugcaucccuuggcagaucccucaacaguguuuaaggacgaugacgaggcagaagauuuugucgagguucaccucccggauguccacaagcaggucucgggaguugaucucggucucccaagcugggggaaguaugugcugaugaguguaggcgcuaugauugcacugauguugaugauuuucuugacgacguguugcagaaaggcuaacggagcagaaucaacacaacaccgucucggagagacgggaaggaaagugucggucaccucccaaagcgggagggucauaucuuccugggagucguauaaaagcgggggugagaccaagcuguaa

SEQ ID NO: 63928 - RNA, 1575 nt, Artificial Sequence
  derived and/or modified CDS sequence (wt) from glycoprotein__RABV__LC071958.1
augauuccucaggcucuuuuguuuguaccccuuuugguuuucucaucgugcuucgggaaauuccccaucuacacgauaccagacaaacucggcccuuggaguccuauugacauacaucaccucaguugcccuaacaauuuaguugugggggaugaggggugcaccaaccugucaggauucuccuacauggaacucaaagugggguacauuucagccauaaaagugaacggguucacuugcacggguguagugacagaggcagagaccuacacaaacuuugucggcuacgucaccaccacguuuaagagaaagcacuuccgcccgacaccagaugccugcagagcagcauauaacuggaagauggcaggugaccccagauaugaggaaucucugcauaauccguaucccgauuaucacuggcuccggacuguaaagaccaccaaggagucucuuguuaucauaucuccgagugugucggauuuagacccguacgauaaaucucuucauuccagaguuuuucccagcgguaaaugcucaggaauaacaguaucuuccaccuauugucccacuaaccaugacuauacuaucuggaugccggaaaauccaagacucgggaccucuugugacauuuucaccacuagcagagggaagagagcaucaaaagggggcaagaccuguggauuuguggacgaaagaggcuuguacaagucucuaaaaggggcaugcaaauugaugcuauguggaguucuuggacuuagacuuacggacggaacaugggcugcgauucaaacaucugaugaggccaaauggugcccuccugaucaguuagugaauauccaugauuuucgcucagaugagauugaacaucuuguuguggaagaguuaguaaagaaaagggaagaguguuuagaugcacuggagucuaucaugaccaccaaguccguaaguuucagacgccucagucacuugaggaagcucguccccggguuugggaaagcauauaccauauucaacaaaaccuugauggaggcugaugcucacuacaaaucaguccguacauggaaugaaaucaucccuucuaagggauguuuaagaguuggggggagaugucacccccaugugaacgggguguuuuucaaugguaucauccuggggccugauggacauguucuaaucccagagauacagucgucucuccuucaacagcauauggaguuguuggaaucuucgguaaucccgcucaugcaucccuuggcagaucccucaacaguguuuaaggacgaugacgaggcagaagauuuugucgagguucaccucccggauguccacaagcaggucucgggaguugaucucggucucccaagcugggggaaguaugugcugaugaguguaggcgcuaugauugcacugauguugaugauuuucuugacgacguguugcagaaaggcuaacggagcagaaucaacacaacaccgucucggagagacgggaaggaaagugucggucaccucccaaagcgggagggucauaucuuccugggagucguauaaaagcgggggugagaccaagcuguag

SEQ ID NO: 63929 - RNA, 1575 nt, Artificial Sequence
  derived and/or modified CDS sequence (wt) from glycoprotein__RABV__LC071959.1
augauuccucaggcucuuuuguuuguaccccuuuugguuuucucauugugcuucgggaaauuccccaucuacacgauaccagacaaacucggcccuuggaguccuauugauauacaucaucucaguugcccuaacaauuuaguuguggaggaugaggggugcaccaaccugucaggauucuccuacauggaacucaaagugggguacauuucagccauaaaagugaacggguucacuugcacggguguagugacagaggcagagaccuacacaaacuuugucggcuacgucaccaccacguuuaagagaaagcacuuccgcccgacaccagaugccugcagagcagcauauaacuggaagauggcaggugaccccagauaugaggaaucucugcauaauccguaucccgauuaucacuggcuccggacuguaaagaccaccaaggagucucuuguuaucauaucuccgagugugucggauuuagacccguacgauaaaucucuucauuccagaguuuuucccagcgguaaaugcucaggaauaacaguaucuuccaccuauugucccacuaaccaugacuauacuaucuggaugccggaaaauccaagacucgggaccucuugugacauuuucaccacuagcagagggaagagagcaucaaaagggggcaagaccuguggauuuguggacgaaagaggcuuguacaagucucuaaaaggggcaugcaaauugaagcuauguggaguucuuggacuuagacuuauggacggaacaugggcugcgauucaaacaucugaugaggccaaauggugcccuccugaucaguuagugaauauccaugauuuucgcucagaugagauugaacaucuuguuguggaagaguuaguaaagaaaagggaagaguguuuagaugcacuggagucuaucaugaccaccaaguccguaaguuucagacgccucagucacuugaggaagcucguccccggguuugggaaagcauauaccauauucaacaaaaccuugauggaggcugaugcucacuacaaaucaguccguacauggaaugaaaucaucccuucuaaaggauguuuaagaguuggggggagaugucacccccaugugaacgggguguuuuucaaugguaucauccuggguccugauggacauguucuaaucccagagaugcagucgucucuccuucaacagcauauggaguuguuggaaucuucgguaaucccgcucaugcaucccuuggcagaucccucaacaguguuuaaggacgaugacgaggcagaagauuuugucgagguucaccuuccggauguccacaagcaggucucgggaguugaucucggucucccaagcugggggaaguaugugcugaugaguguaggcgcuaugauugcacugauguugaugauuuucuugacgacguguugcagaaaggcuaacggagcagaaucaacacaacaccgucucggagagacgggaaggaaagugucggucaccucccaaagcgggagggucauaucuuccugggagucguauaaaagcgggggugagaccaagcuguag

SEQ ID NO: 63930 - RNA, 1575 nt, Artificial Sequence
  derived and/or modified CDS sequence (wt) from glycoprotein__RABV__LC071960.1
augauuccucaggcucuuuuguuuguaccccuuuugguuuucucauugugcuucgggaaauuccccaucuacacgauaccagacaaacucggcccuuggaguccuauugauauacaucaucucaguugcccuaacaauuuaguuguggaggaugaggggugcaccaaccugucaggauucuccuacauggaacucaaagugggguacauuucagccauaaaagugaacggguucacuugcacggguguagugacagaggcagagaccuacacaaacuuugucggcuacgucaccaccacguuuaagagaaagcacuuccgcccgacaccagaugccugcagagcagcauauaacuggaagauggcaggugaccccagauaugaggaaucucugcauaauccguaucccgauuaucacuggcuccggacuguaaagaccaccaaggagucucuuguuaucauaucuccgagugugucggauuuagacccguacgauaaaucucuucauuccagaguuuuucccagcgguaaaugcucaggaauaacaguaucuuccaccuauugucccacuaaccaugacuauacuaucuggaugccggaaaauccaagacucgggaccucuugugacauuuucaccacuagcagagggaagagagcaucaaaagggggcaagaccuguggauuuguggacgaaagaggcuuguacaagucucuaaaaggggcaugcaaauugaagcuauguggaguucuuggacuuagacuuauggacggaacauggggcgcgauucaaacaucugaugaggccaaauggugcccuccugaucaguuagugaauauccaugauuuucgcucagaugagauugaacaucuuguuguggaagaguuaguaaagaaaagggaagaguguuuagaugcacuggagucuaucaugaccaccaaguccguaaguuucagacgccucagucacuugaggaagcucguccccggguuugggaaagcauauaccauauucaacaaaaccuugauggaggcugaugcucacuacaaaucaguccguacauggaaugaaaucaucccuucuaaaggauguuuaagaguuggggggagaugucacccccaugugaacgggguguuuuucaaugguaucauccuggguccugauggacauguucuaaucccagagaugcagucgucucuccuucaacagcauauggaguuguuggaaucuucgguaaucccgcucaugcaucccuuggcagaucccucaacaguguuuaaggacgaugacgaggcagaagauuuugccgagguucaccuuccggauguccacaagcaggucucgggaguugaucucggucucccaagcugggggaaguaugugcugaugaguguaggcgcuaugauugcacugauguugaugauuuucuugacgacguguugcagaaaggcuaacggagcagaaucaacacaacaccgucucggagagacgggaaggaaagugucggucaccucccaaagcgggagggucauaucuuccugggagucguauaaaagcgggggugagaccaagcuguaa

SEQ ID NO: 63931 - RNA, 1575 nt, Artificial Sequence
  derived and/or modified CDS sequence (wt) from glycoprotein__RABV__LC071961.1
augauuccucaggcucuuuuguuuguaccccuuuugguuuucucauugugcuucgggaaauuccccaucuacacgauaccagacaaacucggcccuuggaguccuauugauauacaucaucucaguugcccuaacaauuuaguuguggaggaugaggggugcaccaaccugucaggauucuccuacauggaacucaaagugggguacauuucagccauaaaagugaacggguucacuugcacggguguagugacagaggcagagaccuacacaaacuuugucggcuacgucaccaccacguuuaagagaaagcacuuccgcccgacaccagaugccugcagagcagcauauaacuggaagauggcaggugaccccagauaugaggaaucucugcauaauccguaucccgauuaucacuggcuccggacuguaaagaccaccaaggagucucuugauaucauaucuccgagugugucggauuuagacccguacgauaaaucucuucauuccagaguuuuucccagcgguaaaugcucaggaauaacaguaucuuccaccuauugucccacuaaccaugacuauacuaucuggaugccggaaaauccaagacucgggaccucuugugacauuuucaccacuagcagagggaagagagcaucaaaagggggcaagaccuguggauuuguggacgaaagaggcuuguacaagucucuaaaaggggcaugcaaauugaagcuauguggaguucuuggacuuagacuuauggacggaacaugggcugcgauucaaacaucugaugaggccaaauggugcccuccugaucaguuagugaauauccaugauuuucgcucagaugagauugaacaucuuguuguggaagaguuaguaaagaaaagggaagaguguuuagaugcacuggagucuaucaugaccaccaaguccguaaguuucagacgccucagucacuugaggaagcucguccccggguuugggaaagcauauaccauauucaacaaaaccuugauggaggcugaugcucacuacaaaucaguccguacauggaaugaaaucaucccuucuaaaggauguuuaagaguuggggggagaugucacccccaugugaacgggguguuuuucaaugguaucauccuggguccugauggacauguucuaaucccagagaugcagucgucucuccuucaacagcauauggaguuguuggaaucuucgguaaucccgcucaugcaucccuuggcagaucccucaacaguguuuaaggacgaugacgaggcagaagauuuugucgagguucaccuuccggauguccacaagcaggucucgggaguugaucucggucucccaagcugggggaaguaugugcugaugaguguaggcgcuaugauugcacugauguugaugauuuucuugacgacguguugcagaaaagcuaacggagcagaaucaacacaacaccgucucggagagacgggaaggaaagugucggucaccucccaaagcgggagggucauaucuuccugggagucguauaaaagcgggggugagaccaagcuguag

SEQ ID NO: 63932 - RNA, 1575 nt, Artificial Sequence
  derived and/or modified CDS sequence (wt) from glycoprotein__RABV__LC071962.1
augauuccucaggcucuuuuguuuguaccccuuuugguuuucucauugugcuucgggaaauuccccaucuacacgauaccagacaaacucggcccuuggaguccuauugauauacaucaucucaguugcccuaacaauuuaguuguggaagaugaggggugcaccaaccugucaggauucuccuacauggaacucaaagugggguacauuucagccauaaaagugaacggguucacuugcacggguguagugacggaggcagagaccuacacaaacuuugucggcuacgucaccaccacguuuaagagaaagcacuuccgcccgacaccagaugccugcagagcagcauauaacuggaagauggcaggugaccccagauaugaggaaucucugcauaauccguaucccgauuaucacuggcuccggacuguaaagaccaccaaggagucucuuguuaucauaucuccgagugugucggauuuagacccguacgauaaaucucuucauuccagaguuuuucccagcgguaaaugcucaggaauaacaguaucuuccaccuauugucccacuaaccaugacuauacuaucuggaugccggaaaauccaagacucgggaccucuugugacauuuucaccacuagcagagggaagagagcaucaaaagggggcaagaccuguggauuuguggacgaaagaggcuuguacaagucucuaaaaggggcaugcaaauugaagcuauguggaguucuuggacuuagacuuauggacggaacaugggcugcgauucaaacaucugaugaggccaaauggugcccuccugaucaguuagugaauauccaugauuuucgcucagaugagauugaacaucuuguuguggaagaguuaguaaagaaaagggaagaguguuuagaugcacuggagucuaucaugaccaccaaguccguaaguuucagacgccucagucacuugaggaagcucguccccggguuugggaaagcauauaccauauucaacaaaaccuugauggaggcugaugcucacuacaaaucaguccguacauggaacgaaaucaucccuucuaaaggauguuuaagaguuggggggagaugucacccccaugugaacgggguguuuuucaaugguaucauccuggguccugauggacauguucuaaucccagagaugcagucgucucuccuucaacagcauauggaguuguuggaaucuucgguaaucccgcucaugcaucccuuggcagaucccucaacaguguuuaaggacgaugacgaggcagaagauuuugucgagguucaccuuccggauguccacaagcaggucucgggaguugaucucggucucccaagcugggggaaguaugugcugaugaguguaggcgcuaugauugcacugauguugaugauuuucuugacgacguguugcagaaaagcuaacggagcagaaucaacacaacaccgucucggagagacgggaaggaaagugucggucaccucccaaagcgggagggucauaucuuccugggagucguauaaaagcgggggugagaccaagcuguag

SEQ ID NO: 63933 - RNA, 1575 nt, Artificial Sequence
  derived and/or modified CDS sequence (wt) from glycoprotein__RABV__LC071963.1
augauuccucaggcucuuuuguuuguaccccuuuugguuuucucauugugcuucgggaaauuccccaucuacacgauaccagacaaacucggcccuuggaguccuauugauauacaucaucucaguugcccuaacaauuuaguuguggaggaugaggggugcaccaaccugucaggauucuccuacauggaacucaaagugggguacauuucagccauaaaagugaacggguucacuugcacggguguagugacagaggcagagaccuacacaaacuuugucggcuacgucaccaccacguuuaagagaaagcacuuccgcccgacaccagaugccugcagagcagcauauaacuggaagauggcaggugaccccagauaugaggaaucucugcauaauccguaucccgauuaucacuggcuccggacuguaaagaccaccaaggagucucuuguuaucauaucuccgagugugucggauuuagacccguacgauaaaucucuucauuccagaguuuuucccagcgguaaaugcucaggaauaacaguaucuuccaccuauugucccacuaaccaugacuauacuaucuggaugccggaaaauccaagacucgggaccucuugugacauuuucaccacuagcagagggaagagagcaucaaaagggggcaagaccuguggauuuguggacgaaagaggcuuguacaagucucuaaaaggggcaugcaaauugaagcuauguggaguucuuggacuuagacuuauggacggaacaugggcugcgauucaaacaucugaugaggccaaauggugcccuccugaucaguuagugaauauccaugauuuucgcucagaugagauugaacaucuuguuguggaagaguuaguaaagaaaagggaagaguguuuagaugcacuggagucuaucaugaccaccaaguccguaaguuucagacgccucagucacuugaggaagcucguccccggguuugggaaagcauauaccauauucaacaaaaccuugauggaggcugaugcucacuacaaaucaguccguacauggaaugaaaucaucccuucuaaaggauguuuaagaguuggggggagaugucacccccaugugaacgggguguuuuucaaugguaucauccuggguccugauggacauguucuaaucccagagaugcagucgucucuccuucaacagcauauggaguuguuggaaucuucgguaaucccgcucaugcaucccuuggcagaucccucaacaguguuuaaggacgaugacgaggcagaagauuuugucgagguucaccuuccggauguccacaagcaggucucgggaguugaucucggucucccaagcugggggaaguaugugcugaugaguguaggcgcuaugauugcacugauguugaugauuuucuugacgacguguugcagaaaagcuaacggagcagaaucaacacaacaccgucucggagagacgggaaggaaagugucggucaccucccaaagcgggagggucauaucuuccugggagucguauaaaagcgggggugagaccaagcuguag

SEQ ID NO: 63934 - RNA, 1575 nt, Artificial Sequence
  derived and/or modified CDS sequence (wt) from glycoprotein__RABV__LC071965.1
augauuccucaggcucuuuuguuuguaccccuuuugguuuucucauugugcuucgggaaauuccccaucuacacgauaccagacaaacucggcccuuggaguccuauugauauacaucaucucaguugcccuaacaauuuaguuguggaggaugaggggugcaccaaccugucaggauucuccuacauggaacucaaagugggguacauuucagccauaaaagugaacggguucacuugcacggguguagugacagaggcagagaccuacacaaacuuugucggcuacgucaccaccacguuuaagagaaagcacuuccgcccgacaccagaugccugcagagcagcauauaacuggaagauggcaggugaccccagauaugaggaaucucugcauaauccguaucccgauuaucacuggcuccggacuguaaagaccaccaaggagucucuuguuaucauaucuccgagugugucggauuuagacccguacgauaaaucucuucauuccagaguuuuucccagcgguaaaugcucaggaauaacaguaucuuccaccuauugucccacuaaccaugacuauacuaucuggaugccggaaaauccaagacucgggaccucuugugacauuuucaccacuagcagagggaagagagcaucaaaagggggcaagaccuguggauuuguggacgaaagaggcuuguacaagucucuaaaaggggcaugcaaauugaagcuauguggaguucuuggacuuagacuuauggacggaacaugggcugcgauucaaacaucugaugaggccaaauggugcccuccugaucaguuagugaauauccaugauuuucgcucagaugagauugaacaucuuguuguggaagaguuaguaaagaaaagggaagaguguuuagaugcacuggagucuaucaugaccaccaaguccguaaguuucagacgccucagucacuugaggaagcucguccccggguuugggaaagcauauaccauauucaacaaaaccuugauggaggcugaugcucacuacaaaucaguccguacauggaaugaaaucaucccuucuaaaggauguuuaagaguuggggggagaugucacccccaugugaacgggguguuuuucaaugguaucauccuggguccugauggacauguucuaaucccagagaugcagucgucucuccuucaacagcauauggaguuguuggaaucuucgguaaucccgcucaugcaucccuuggcagaucccucaacaguguuuaaggacgaugacgaggcagaagauuuugucgagguucaccuuccggauguccacaagcaggucucgggaguugaucucggucucccaagcugggggaaguaugugcugaugaguguaggcgcuaugauugcacugauguugaugauuuucuugacgauguguugcagaaaagcuaacggagcagaaucaacacaacaccgucucggagagacgggaaggaaagugucggucaccucccaaagcgggagggucauaucuuccugggagucguauaaaagcgggggugagaccaagcuguag

SEQ ID NO: 63935 - RNA, 1575 nt, Artificial Sequence
  derived and/or modified CDS sequence (wt) from glycoprotein__RABV__LC071966.1
augauuccucaggcucuuuuguuuguaccccuuuugguuuucucauugugcuucgggaaauuccccaucuacacgauaccagacaaacucggcccuuggaguccuauugauauacaucaucucaguugcccuaacaauuuaguuguggaggaugaggggugcaccaaccugucaggauucuccuacauggaacucaaagugggguacauuucagccauaaaagugaacggguucacuugcacggguguagugacagaggcagagaccuacacaaacuuugucggcuacgucaccaccacguuuaagagaaagcacuuccgcccgacaccagaugccugcagugcagcauauaacuggaagauggcaggugaccccagauaugaggaaucucugcauaauccguaucccgauuaucacuggcuccggacuguaaagaccaccaaggagucucuuguuaucauaucuccgagugugucggauuuagacccguacgauaaaucucuucauuccagaguuuuucccagcgguaaaugcucaggaauaacaguaucuuccaccuauugucccacuaaccaugacuauacuaucuggaugccggaaaauccaagacucgggaccucuugugacauuuucaccacuagcagagggaagagagcaucaaaagggggcaagaccuguggauuugcggacgaaagaggcuuguacaagucucuaaaaggggcaugcaaauugaagcuauguggaguucuuggacuuagacuuauggacggaacaugggcugcgauucaaacaucugaugaggccaaauggugccccccugaucaguuagugaauauccaugauuuucgcucagaugagauugaacaucuuguuguggaagaguuaguaaagaaaagggaagaguguuuagaugcacuggagucuaucaugaccaccaaguccguaaguuucagacgccucagucacuugaggaagcucguccccggguuugggaaagcauauaccauauucaacaaaaccuugauggaggcugaugcucacuacaaaucaguccguacauggaaugaaaucaucccuucuaaaggauguuuaagaguuggggggagaugucacccccaugugaacgggguguuuuucaaugguaucauccuggguccugauggacauguucuaaucccagagaugcagucgucucuccuucaacagcauauggaguuguuggaaucuucgguaaucccgcucaugcaucccuuggcagaucccucaacaguguuuaaggacgaugacgaggcagaagauuuugucgagguucaccuuccggauguccacaagcaggucucgggaguugaucucggucucccaagcugggggaaguaugugcugaugaguguaggcgcuaugauugcacugauguugaugauuuucuugacgauguguugcagaaaagcuaacggagcagaaucaacacaacaccgucucggagagacgggaaggaaagugucggucaccucccaaagcgggagggucauaucuuccugggagucguauaaaagcgggggugagacuaagcuguaa

SEQ ID NO: 63936 - RNA, 1575 nt, Artificial Sequence
  derived and/or modified CDS sequence (wt) from glycoprotein__RABV__LC071967.1
augauuccucaggcucuuuuguuuguaccccuuuugguuuucucauugugcuucgggaaauuccccaucuacacgauaccagacaaacucggcccuuggaguccuauugauauacaucaucucaguugcccuaacaauuuaguuguggaggaugaggggugcaccaaccugucaggauucuccuacauggaacucaaagugggguacauuucagccauaaaagugaacggguucacuugcacggguguagugacagaggcagagaccuacacaaacuuugucggcuacgucaccaccacguuuaagagaaagcacuuccgcccgacaccagaugccugcagagcagcauauaacuggaagauggcaggugaccccagauaugaggaaucucugcauaauccguaucccgauuaucacuggcuccggacuguaaagaccaccaaggagucucuuguuaucauaucuccgagugugucggauuuagacccguacgauaaaucucuucauuccagaguuuuucccagcgguaaaugcucaggaauaacaguaucuuccaccuauugucccacuaaccaugacuauacuaucuggaugccggaaaauccaagacucgggaccucuugugacauuuucaccacuagcagagggaagagagcaucaaaagggggcaagaccuguggauuuguggacgaaagaggcuuguacaagucucuaaaaggggcaugcaaauugaagcuauguggaguucuuggacuuagacuuauggacggaacaugggcugcgauucaaacaucugaugaggccaaauggugcccuccugaucaguuagugaauauccaugauuuucgcucagaugagauugaacaucuuguuguggaagaguuaguaaagaaaagggaagaguguuuagaugcacuggaguccaucaugaccaccaaguccguaaguuucagacgcuucagucacuugaggaagcucguccccggguuugggaaagcauauaccauauucaacaaaaccuugauggaggcugaugcucacuacaaaucaguccguacauggaaugaaaucaucccuucuaaaggauguuuaagaguuggggggagaugucacccccaugugaacgggguguuuuucaaugguaucauccuggguccugauggacauguucuaaucccagagaugcagucgucucuccuucaacagcauauggaguuguuggaaucuucgguaaucccgcucaugcaucccuuggcagaucccucaacaguguuuaaggacgaugacgaggcagaagauuuugucgagguucaccuuccggauguccacaagcaggucucgggaguugaucucggucucccaagcugggggaaguaugugcugaugaguguaggcgcuaugauugcacugauguugaugauuuucuugacgauguguugcagaaaagcuaacggagcagaaucaacacaacaccgucucggagagacgggaaggaaagugucggucaccucccaaagcgggagggucauaucuuccugggagucguauaaaagcgggggugagaccaagcuguaa

SEQ ID NO: 63937 - RNA, 1575 nt, Artificial Sequence
  derived and/or modified CDS sequence (wt) from glycoprotein__RABV__LC071968.1
augauuccucaggcucuuuuguuuguaccccuuuugguuuucucauugugcuucgggaaauuccccaucuacacgauaccagacaaacucggcccuuggaguccuauugauauacaucaucucaguugcccuaacaauuuaguuguggaggaugaggggugcaccaaccugucaggauucuccuacauggaacucaaagugggguacauuucagccauaaaagugaacggguucacuugcacggguguagugacagaggcagagaccuacacaaacuuugucgguuacgucaccaccacguuuaagagaaagcacuuccgcccgacaccagaugccugcagagcagcauauaacuggaagauggcaggugaccccagauaugaggaaucucugcauaauccguaucccgauuaucacuggcuccggacuguaaagaccaccaaggagucucuuguuaucauaucuccgagugugucggauuuagacccguacgauaaaucucuucauuccagaguuuuucccagcgguaaaugcucaggaauaacaguaucuuccaccuauugucccacuaaccaugacuauacuaucuggaugccggaaaauccaagacucgggaccucuugugacauuuucaccacuagcagagggaagagagcaucaaaagggggcaagaccuguggauuuguggacgaaagaggcuuguacaagucucuaaaaggggcaugcaaauugaagcuauguggaguucuuggacuuagacuuauggacggaacaugggcugcgauucaaacaucugaugaggccaaauggugcccuccugaucaguuagugaauauccaugauuuucgcucagaugagauugaacaucuuguuguggaagaguuaguaaagaaaagggaagaguguuuagaugcacuggagucuaucaugaccaccaaguccguaaguuucagacgccucagucacuugaggaagcucguccccggguuugggaaagcauauaccauauucaacaaaaccuugauggaggcugaugcucacuacaaaucaguccguacauggaaugaaaucaucccuucuaaaggauguuuaagaguuggggggagaugucacccccaugugaacgggguguuuuucaaugguaucauccuggguccugauggacauguucuaaucccagagaugcagucgucucuccuucaacagcauauggaguuguuggaaucuucgguaaucccgcucaugcaucccuuggcagaucccucaacaguguuuaaggacgaugacgaggcagaagauuuugucgagguucaccuuccggauguccacaagcaggucucgggaguugaucucggucucccaagcugggggaaguaugugcugaugaguguaggcgcuaugauugcacugauguugaugauuuucuugacgauguguugcagaaaagcuaacggagcagaaucaacacaacaccgucucggagagacgggaaggaaagugucggucaccucccaaagcgggagggucauaucuuccugggagucguauaaaagcgggggugagaccaagcuguaa

SEQ ID NO: 63938 - RNA, 1575 nt, Artificial Sequence
  derived and/or modified CDS sequence (wt) from glycoprotein__RABV__LC071969.1
augauuccucaggcucuuuuguuuguaccccuuuugguuuucucaucgugcuucgggaaauuccccaucugcacgauaccagacaaacucggcccuuggaguccuauugacauacaucaccucaguugcccuaacaauuuaguuguggaggaugaggggugcaccaaccugucaggauucuccuacauggaacucaaagugggguacauuucagccauaaaagugaacggguucacuugcacggguguggugacagaagcagagaccuacacaaacuuugucggcuacgucaccaccacauuuaagagaaagcacuuccgcccgacaccugacgccugcagagcagcauauaacuggaagauggcaggugaccccagauaugaggaaucucugcauaauccguaucccgauuaucacuggcuccggacuguaaaaaccaccaaggagucucuuguuaucauaucuccgagugugucggacuuagacccguacgacaaaucucuucauuccagaguuuuucccagcgguaaaugcucaggaauaacaguaucuucuaccuauugucccacuaaccaugacuauacugucuggaugccggaaaauccgagacuagggaccucuugugacauuuucaccaauagcagagggaagagagcauccaaagggggcaagaccuguggauuuguggaugaaagaggcuuguacaagucucuaaaaggggcaugcaaauugaaacuauguggaguucuuggacuuagacuuauggacggaacauggguugcgauucaaacaucugaugaggccaaauggugcccuccugaucaguuagugaauauacaugauuuucgcucggaugagauugaacaucuuguuguggaagaguuaguaaagaaaagagaagagugucuagaugcacuggagucuaucaugaccaccaaguccguaaguuucagacgccucagucacuugaggaagcucguccccggguuugggaaagcauauaccauauucaacaaaaccuugauggaggcugaugcucacuacaaaucaguccguacauggaaugagaucauccccucuaaaggauguuuaagaguuggggggagaugucacccccaugugaacgggguguuuuucaaugguaucauccuggguccugauggacauguucuaaucccagagaugcagucaucucuccuucaacagcauauggaguuguuggaauccucgguaaucccgcuaaugcauccuuuggcagaucccucaacgguuuuuaaggacggugacgaggcggaagauuuugucgagguucaccuuccggauguccacaagcaggucucgggaguugaucucggucucccaagcugggggaaguaugugcugaugaguguaggcgcuaugauugcacugauguugaugauuuuccugaugacguguugcagaaaagcuaacggagcagaaacaauacaacaccgucucggagagacgggaaggaaagugucugucaccucccaaagcgggagggucauaucuuccugggagucguauaaaagcgggggugagaccaagcuguag

SEQ ID NO: 63939 - RNA, 1575 nt, Artificial Sequence
  derived and/or modified CDS sequence (wt) from glycoprotein__RABV__LC071970.1
augauuccucaggcucuuuuguuuguaccccuuuugguuuucucaucgugcuucgggaaauuccccaucuacacgauaccagacaaacucggcccuuggaguccuauugacauacaucaccucaguugcccuaacaauuuaguuguggaggaugaggggugcaccaaccugucaggauucuccuacauggaacucaaagugggguacauuucagccauaaaagugaacggguucacuugcacggguguggugacagaagcagagaccuacacaaacuuugucggcuacgucaccaccacauuuaagagaaagcacuuccgcccgacaccugacgccugcagagcagcauauaacuggaagauggcaggugaccccagauaugaggaaucucugcauaauccguaucccgauuaucacuggcuccggacuguaaaaaccaccaaggagucucuuguuaucauaucuccgagugugucggacuuagacccguacgacaaaucuuuucauuccagaguuuuucccagcgguaaaugcucaggaauaacaguaucuucuaccuauugucccacuaaccaugacuauacuaucuggaugccggaaaauccgagacuagggaccucuugugacauuuucaccaauagcagagggaagagagcauccaaagggggcaagaccuguggauuuguggaugaaagaggcuuguacaagucucuaaaaggggcaugcaaauugaaacuauguggaguucuuggacuuagacuuauggacggaacauggguugcgauucaaacaucugaugaggccaaauggugcccuccugaucaguuagugaauauacaugauuuucgcucggaugagauugaacaucuuguuguggaagaguuaguaaagaaaagagaagagugucuagaugcacuggagucuaucaugaccaccaaguccguaaguuucagacgccucagucacuugaggaagcucguccccggguuugggaaagcauauaccauauucaacaaaaccuugauggaggcugaugcucacuacaaaucaguccguacauggaaugagaucauccccucuaaaggauguuuaagaguugggggaagaugucacccccaugugaacgggguguuuuucaaugguaucauccuggguccugauggacauguucuaaucccagagaugcagucaucucuccuucaacagcauauggaguuguuggaauccucgguaaucccgcuaaugcauccuuuggcagaucccucaacgguuuuuaaggacggugacgaggcggaagauuuugucgagguucaccuuccggauguccacaagcaggucucgggaguugaucucggucucccaagcugggggaaguaugugcugaugaguguaggcgcuaugauugcacugauguugaugauuuuccugaugacguguugcagaaaagcuaacggagcagaaacaauacaacaccgucucggagagacgggaaggaaagugucugucaccucccaaagcgggagggucauaucuuccugggagucguauaaaagcgggggugagaccaagcuguaa

SEQ ID NO: 63940 - RNA, 1575 nt, Artificial Sequence
  derived and/or modified CDS sequence (wt) from glycoprotein__RABV__LC071971.1
augauuccucaggcucuuuuguuuguaccccuuuugguuuucucaucgugcuucgggaaauuccccaucuacacgauaccagacaaacucggcccuuggaguccuauugacauacaucaccucaguugcccuaacaauuuaguuguggaggaugaggggugcaccaaccugucaggauucuccuacauggaacucaaagugggguacauuucagccauaaaagugaacggauucacuugcacggguguggugacagaagcagagaccuacacaaacuuugucggcuacgucaccaccacauuuaagagaaagcacuuccgcccgacaccugacgccugcagagcagcauauaacuggaagauggcaggugacccuagauaugaggaaucucugcauaauccguaucccgauuaucacuggcuccggacuguaaaaaccaccaaggagucucuuguuaucauaucuccgagugugucggacuuagacccguacgacaaaucucuucauuccagaguuuuucccagcgguaaaugcucaggaauaacaguaucuucuaccuauugucccacuaaccgugacuauacuaucuggaugccggaaaauccgagacuagggaccucuugugacauuuucaccaauagcagagggaagagagcauccaaagggggcaagaccuguggauuuguggaugaaagaggcuuguacaagucucuaaaaggggcaugcaaauugaaacuauguggaguucuuggacuuagacuuauggacggaacauggguugcgauucaaacaucugaugaggccaaauggugcccuccugaucaguuagugaauauacaugauuuucgcucggaugagauugaacaucuuguuguggaagaguuaguaaagaaaagagaagagugucuagaugcacuggagucuaucaugaccaccaaguccguaaguuucagacgccucagucacuugaggaagcucguccccggguuugggaaagcauauaccauauucaacaaaaccuugauggaggcugaugcucacuacaaaucaguccguacauggaaugagaucauccccucuaaaggauguuuaagaguuggggggagaugucacccccaugugaacgggguguuuuucaaugguaucauccuggguccugauggacauguucuaaucccagagaugcagucaucucuccuucaacagcauauggaguuguuggaauccucgguaaucccgcuaaugcauccuuuggcagaucccucaacgguuuuuaaggacggugacgaggcggaagauuuugucgagguucaccuuccggauguccacaagcaggucucgggaguugaucucggucucccaagcugggggaaguaugugcugaugaguguaggcgcuaugauugcacugauguugaugauuuuccugaugacguguugcagaaaagcuaacggagcagaaacaauacaacaccgucucggagagacgggaaggaaagugucugucaccucccaaagcgggagggucauaucuuccugggagucguauaaaagcgggggugagaccaagcuguag

SEQ ID NO: 63941 - RNA, 1575 nt, Artificial Sequence
  derived and/or modified CDS sequence (wt) from glycoprotein__RABV__LC071972.1
augauuccucaggcucuuuuguuuguaccccuuuugguuuucucaucgugcuucgggaaauuccccaucuacacgauaccagacaaacucggcccuuggaguccuauugacauacaucaccucaguugcccuaacaauuuaguuguggaggaugaggggugcaccaaccugucaggauucuccuacauggaacucaaagugggguacauuucagccauaaaagugaacggguucacuugcacggguguggugacagaagcagagaccuacacaaacuuugucggcuacgucaccaccacauuuaagagaaagcacuuccgcccgacaccugacgccugcagagcagcauauaacuggaagauggcaggugaccccagauaugaggaaucucugcauaauccguaucccgauuaucacuggcuccggacuguaaaaaccaccaaggagucucuuguuaucauaucuccgagugugucggacuuagacccguacgacaaaucucuucauuccagaguuuuucccagcgguaaaugcucaggaauaacaguaucuucuaccuauugucccacuaaccaugacuauacuaucuggaugccggaaaauccgagacuagggaccucuugugacauuuucaccaauagcagagggaagagagcauccaaagggggcaagaccuguggauuuguggaugaaagaggcuuguacaagucucuaaaaggggcaugcaaauugaaacuauguggaguucuuggacuuagacuuauggacggaacauggguugcgauucaaacaucugaugaggccaaauggugcccuccugaucaguuagugaauauacaugauuuucgcucggaugagauugaacaucuuguuguggaagaguuaguaaagaaaagagaagagugucuagaugcacuggagucuaucaugaccaccaaguccguaaguuucagacgccucagucacuugaggaagcucguccccggguuugggaaagcauauaccauauucaacaaaaccuugauggaggcugaugcucacuacaaaucaguccguacauggaaugagaucauccccucuaaaggauguuuaagaguuggggggagaugucacccccaugugaacgggguguuuuucaaugguaucauccuggguccugauggacauguucuaaucccagagaugcagucaucucuccuucaacagcauauggaguuguuggaauccucgguaaucccgcuaaugcauccuuuggcagaucccucaacgguuuuuaaggacggugacgaggcggaagauuuugucgagguucaccuuccggauguccacaagcaggucucgggaguugaucucggucucccaagcugggggaaguaugugcugaugaguguaggcgcuaugauugcacugauguugaugauuuuccugaugacguguugcagaaaagcuaacggagcagaaacaauacaacaccgucucggagagacgggaaggaaagugucugucaccucccaaagcgggagggucauaucuuccugggagucguauaaaagcgggggugagaccaagcuguag

SEQ ID NO: 63942 - RNA, 1575 nt, Artificial Sequence
  derived and/or modified CDS sequence (wt) from glycoprotein__RABV__LC071973.1
augauuccucaggcucuuuuguuuguaccccuuuugguuuucucaucgugcuucgggaaauuccccaucuacacgauaccagacaaacucggcccuuggaguccuauugacauacaucaccucaguugcccuaacaauuuaguuguggaggaugaggggugcaccaaccugucaggauucuccuacauggaacucaaagugggguacauuucagccauaaaagugaacggguucacuugcacggguguggugacagaagcagagaccuacacaaacuuugucggcuacgucaccaccacauuuaagagaaagcacuuccgcccgacaccugacgccugcagagcagcauauaacuggaagauggcaggugaccccagauaugaggaaucucugcauaauccguaucccgauuaucacuggcuccggacuguaaaaaccaccaaggagucucuuguuaucauaucuccgagugugucggacuuagacccguacgacaaaucucuucauuccagaguuuuucccagcgguaaaugcucaggaauaacaguaucuucuaccuauugucccacuaaccaugacuauacuaucuggaugccggaaaauccgagacuagggaccucuugugacauuuucaccaauagcagagggaagagagcauccaaagggggcaagaccuguggauuuguggaugaaagaggcuuguacaagucucuaaaaggggcaugcaaauugaaacuauguggaguucuuggacuuagacuuauggacggaacauggguugcgauucaaacaucugaugaggccaaauggugcccuccugaucaguuagugaauauacaugauuuucgcucggaugagauugaacaucuuguuguggaagaguuaguaaagaaaagagaagagugucuagaugcacuggagucuaucaugaccaccaaguccguaaguuucagacgccucagucacuugaggaagcucguccccggguuugggaaagcauauaccauauucaacaaaaccuugauggaggcugaugcucacuacaaaucaguccguacauggaaugagaucauccccucuaaaggauguuuaagaguuggggggagaugucacccccaugugaacgggguguuuuucaaugguaucauccuggguccugauggacauguucuaaucccagagaugcagucaucucuccuucaacagcauaugggguuguuggaauccucgguaaucccgcuaaugcauccuuuggcagaucccucaacgguuuuuaaggacggugacgaggcggaagauuuugucgagguucaccuuccggacguccacaagcaggucucgggaguugaucucggucucccaagcugggggaaguaugugcugaugaguguaggcgcuaugauugcacugauguugaugauuuuccugaugacguguugcagaaaagcuaacggagcagaaacaauacaacaccgucucggagagacgggaaggaaagugucugucaccucccaaagcgggagggucauaucuuccugggagucguauaaaagcgggggugagaccaagcuguaa

SEQ ID NO: 63943 - RNA, 1575 nt, Artificial Sequence
  derived and/or modified CDS sequence (wt) from glycoprotein__RABV__LC071974.1
augauuccucaggcucuuuuguuuguaccccuuuugguuuucucaucgugcuucgggaaauuccccaucuacacgauaccagacaaacucggcccuuggaguccuauugacauacaucaccucaguugcccuaacaauuuaguuguggaggaugaggggugcaccaaccugucaggauucuccuacauggaacucaaagugggguacauuucagccauaaaagugaacggguucacuugcacggguguggugacagaagcagagaccuacacaaacuuugucggcuacgucaccaccacauuuaagagaaagcacuuccgcccgacaccugacgccugcagagcagcauauaacuggaagauggcaggugaccccagauaugaggaaucucugcauaauccguaucccgauuaucacuggcuccggacuguaaaaaccaccaaggagucucuuguuaucauaucuccgagugugucggacuuagacccguacgacaaaucucuucauuccagaguuuuucccagcgguaaaugcucaggaauaacaguaucuucuaccuauugucccacuaaccaugacuauacuaucuggaugccggaaaauccgagacuagggaccucuugugacauuuucaccaauagcagagggaagagagcauccaaagggggcaagaccuguggauuuguggaugaaagaggcuuguacaagucucuaaaaggggcaugcaaauugaaacuauguggaguucuuggacuuagacuuauggacgggacauggguugcgauucaaacaucugaugaggccaaauggugcccuccugaucaguuagugaauauacaugauuuucgcucggaugagauugaacaucuuguuguggaagaguuaguaaagaaaagagaagagugucuagaugcacuggagucuaucaugaccaccaaguccguaaguuucggacgccucagucacuugaggaagcucguccccggguuugggaaagcauauaccauauucaacaaaaccuugauggaggcugaugcucacuacaaaucaguccguacauggaaugagaucauccccucuaaaggauguuuaagaguuggggggagaugucacccccaugugaacgggguguuuuucaaugguaucauccuggguccugauggacauguucuaaucccagaggugcagucaucucuccuucaacagcauauggaguuguuggaauccucgguaaucccgcuaaugcauccuuuggcagaucccucaacgguuuuuaaggacggugacgaggcggaagauuuugucgagguucaccuuccggauguccacaagcaggucucgggaguugaucucggucucccaagcugggggaaguaugugcugaugaguguaggcgcuaugauugcacugauguugaugauuuuccugaugacguguugcagaaaagcuaacggagcagaaacaauacaacaccgucucggagagacgggaaggaaagugucugucaccucccaaagcgggagggucauaucuuccugggagucguauaaaagcgggggugagaccaagcuguag

SEQ ID NO: 63944 - RNA, 1575 nt, Artificial Sequence
  derived and/or modified CDS sequence (wt) from glycoprotein__RABV__LC071975.1
augauuccucaggcucuuuuguuuguaccccuuuugguuuucucaucgugcuucgggaaauuccccaucuacacgauaccagacaaacucggcccuuggaguccuauugacauacaucaccucaguugcccuaacaauuuaguuguggaggaugaggggugcaccaaccugucaggauucuccuacauggaacucaaagugggguacauuucagccauaaaagugaacggguucacuugcacggguguggugacagaagcagagaccuacacaaacuuugucggcuacgucaccaccacauuuaagagaaagcacuuccgcccgacaccugacgccugcagagcagcauauaacuggaagauggcaggugaccccagauaugaggaaucucugcauaauccguaucccgauuaucacuggcuccggacuguaaaaaccaccaaggagucucuuguuaucauaucuccgagugugucggacuuagacccguacgacaaaucucuucauuccagaguuuuucccagcgguaaaugcucaggaauaacaguaucuucuaccuauugucccacuaaccaugacuauacuaucuggaugccggaaaauccgagacuagggaccucuugugacauuuucaccaauagcagagggaagagagcauccaaagggggcaagaccuguggauuuguggaugaaagaggcuuguacaagucucuaaaaggugcaugcaaauugaaacuauguggaguucuuggacuuagacuuauggacggaacauggguugcgauucaaacaucugaugaggccaaauggugcccuccugaucaguuagugaauauacaugauuuucgcucggaugagauugaacaucuuguuguggaagaguuaguaaagaaaagagaagagugucuagaugcacuggagucugucaugaccaccaaguccguaaguuucagacgccucagucacuugaggaagcucguccccggguuugggaaagcauauaccauauucaacaaaaccuugauggaggcugaugcucacuacaaaucaguccguacauggaaugagaucauccccucuaaaggauguuuaagaguuggggggagaugucacccccaugugaacgggguguuuuucaaugguaucauccuggguccugauggacauguucuaaucccagagaugcagucaucucuccuucaacagcauauggaguuguuggaauccucgguaaucccgcuaaugcauccuuuggcagaucccucaacgguuuuuaaggacggugacgaggcggaagauuuugucgagguucaccuuccggauguccacaagcaggucucgggaguugaucucggucucccaagcugggggaaguaugugcugaugaguguaggcgcuaugauugcacugauguugaugauuuuccugaugacauguugcagaaaagcuaacggagcagaaacaauacaacaccgucucggagagacgggaaggaaagugucugucaccucccaaagcgggagggucauaucuuccugggagucguauaaaagcgggggugagaccaagcuguaa

SEQ ID NO: 63945 - RNA, 1575 nt, Artificial Sequence
  derived and/or modified CDS sequence (wt) from glycoprotein__RABV__LC071976.1
augauuccucaggcucuuuuguuuguaccccuuuugguuuucucaucgugcuucgggaaauuccccaucuacacgauaccagacaaacucggcccuuggaguccuauugacauacaucaccucaguugcccuaacaauuuaguuguggaggaugaggggugcaccaaccugucaggauucuccuacauggaacucaaagugggguacauuucagccauaaaagugaacggguucacuugcacggguguggugacagaagcagagaccuacacaaacuuugucggcuacgucaccaccacauuuaagagaaagcacuuccgcccgacaccugacgccugcagagcagcauauaacuggaagauggcaggugaccccagauaugaggaaucucugcauaauccguaucccgauuaucacuggcuccggacuguaaaaaccaccaaggagucucuuguuaucauaucuccgagugugucggacuuagacccguacgacaaaucucuucauuccagaguuuuucccagcgguaaaugcucaggaauaacaguaucuucuaccuauugucccacuaaccaugacuauacuaucuggaugccggaaaauccgagacuagggaccucuugugacauuuucaccaauagcagagggaagagagcauccaaagggggcaagaccuguggauuuguggaugaaagaggcuuguacaagucucuaaaaggggcaugcaaauugaaacuauguggaguucuuggacuuagacuuauggacggaacauggguugcgauucaaacaucugaugaggccaaauggugcccuccugaucaguuagugaauauacaugauuuucgcucggaugagauugaacaucuuguuguggaagaguuaguaaagaaaagagaagagugucuagaugcacuggagucuaucaugaccaccaaguccguaaguuucagacgccucagucacuugaggaagcucguccccggguuugggaaagcauauaccauauucaacaaaaccuugauggaggcugaugcucacuacaaaucaguccguacauggaaugagaucauccccucuaaaggauguuuaagaguugggggaagaugucacccccaugugaacgggguguuuuucaaugguaucauccuggguccugauggacauguucuaaucccagagaugcagucaucucuccuucaacagcauauggaguuguuggaauccucgguaaucccgcuaaugcauccuuuggcagaucccucaacgguuuuuaaggacggugacgaggcggaagauuuugucgagguucaccuuccggauguccacaagcaggucucgggaguugaucucggucucccaaguugggggaaguaugugcugaugaguguaggcgcuaugauugcacugauguugaugauuuuccugaugacguguugcagaaaagcuaacggagcagaaacaauacaacaccgucucggagagacgggaaggaaagugucugucaccucccaaagcgggagggucauaucuuccugggagucguauaaaagcgggggugagaccaagcuguaa

SEQ ID NO: 63946 - RNA, 1575 nt, Artificial Sequence
  derived and/or modified CDS sequence (wt) from glycoprotein__RABV__LC071977.1
augauuccucaggcucuuuuguuuguaccccuuuugguuuucucaucgugcuucgggaaauuccccaucuacacgauaccagacaaacucggcccuuggaguccuauugacauacaucaccucaguugcccuaacaauuuaguuguggaggaugaggggugcaccaaccugucaggauucuccuacauggaacucaaagugggguacauuucagccauaaaagugaacggguucacuugcacggguguggugacagaagcagagaccuacacaaacuuugucggcuacgucaccaccacauuuaagagaaagcacuuccgcccgacaccugacgccugcagagcagcauauaacuggaagauggcaggugaccccagauaugaggaaucucugcauaauccguaucccgauuaucacuggcuccgggcuguaaaaaccaccaaggagucucuuguuaucauaucuccgagugugucggacuuagacccguacgacaaaucucuucauuccagaguuuuucccagcgguaaaugcucaggaauaacaguaucuucuaccuauugucccacuaaccaugacuauacuaucuggaugccggaaaauccgagacuagggaccucuugugacauuuucaccaauagcagagggaagagagcauccaaagggggcaagaccuguggauuuguggaugaaagaggcuuguacaagucucuaaaaggggcaugcaaauugaaacuauguggaguucuuggacuuagacuuauggacggaacauggguugcgauucaaacaucugaugaggccaaauggugcccuccugaucaguuagugaauauacaugauuuucgcucggaugagauugaacaucuuguuguggaagaguuaguaaagaaaagagaagagugucuagaugcacuggagucuaucaugaccaccaaguccguaaguuucagacgccucagucacuugaggaagcucguucccggguuugggaaagcauauaccauauucaacaaaaccuugauggaggcugaugcucacuacaaaucaguccguacauggaaugagaucauccccucuaaaggauguuuaagaguuggggggagaugucacccccaugugaacgggguguuuuucaaugguaucauccuggguccugauggacauguucuaaucccagagaugcagucaucucuccuucaacagcauauggaguuguuggaauccucgguaaucccgcuaaugcauccuuuggcagaucccucaacgguuuuuaaggacggugacgaggcggaagauuuugucgagguucaccuuccggauguccacaagcaggucucgggaguugaucucggucucccaagcugggggaaguaugugcugaugaguguaggcgcuaugauugcacugauguugaugauuuuccugaugacguguugcagaaaagcuaacggagcagaaacaauacaacaccgucucggagagacgggaaggaaagugucugucaccucccaaagcgggagggucauaucuuccugggagucguauaaaagcgggggugagaccaagcuguag

SEQ ID NO: 63947 - RNA, 1575 nt, Artificial Sequence
  derived and/or modified CDS sequence (wt) from glycoprotein__RABV__LC071978.1
augauuccucaggcucuuuuguuuguaccccuuuugguuuucucaucgugcuucgggaaauuccccaucuacacgauaccagacaaacucggcccuuggaguccuauugacauacaucaccucaguugcccuaacaauuuaguuguggaggaugaggggugcaccaaccugucaggauucuccuacauggaacucaaagugggguacauuucagccauaaaagugaacggguucacuugcacggguguggugacagaagcagagaccuacacaaacuuugucggcuacgucaccaccacauuuaagagaaagcacuuccgcccgacaccugacgccugcagagcagcauauaacuggaagauggcaggugaccccagauaugaggaaucucugcauaauccguaucccgauuaucacuggcuccggacuguaaaaaccaccaaggagucucuuguuaucauaucuccgagugugucggacuuagacccguacgacaaaucucuucauuccagaguuuuucccagcgguaaaugcucaggaauaacaguaucuucuaccuauugucccacuaaccaugacuacacuaucuggaugccggaaaauccgagacuagggaccucuugugacauuuucaccaauagcagagggaagagagcauccaaagggggcaagaccuguggauuuguggaugaaagaggcuuguacaagucucuaaaaggggcaugcaaauugaaacuauguggaguucuuggacuuagacuuauggacggaacauggguugcgauucaaacaucugaugaggccaaauggugcccuccugaucaguuagugaauauacaugauuuucgcucggaugagauugaacaucuuguuguggaagaguuaguaaagaaaagagaagagugucuagaugcacuggagucuaucaugaccaccaaguccguaaguuucagacgccucagucacuugaggaagcucguccccggguuugggaaagcauauaccauauucaacaaaaccuugauggaggcugaugcucacuacaaaucaguccguacauggaaugagaucauccccucuaaaggauguuuaagaguuggggggagaugucacccccaugugaacgggguguuuuucaaugguaucauccuggguccugauggacauguucuaaucccagagaugcagucaucucuccuucaacagcauauggaguuguuggaauccucgguaaucccgcuaaugcauccuuuggcagaucccucaacgguuuuuaaggacggugacgaggcggaagauuuugucgagguucaccuuccggauguccacaagcaggucucgggaguugaucucggucucccaagcugggggaaguaugugcugaugaguguaggcgcuaugauugcacugauguugaugauuuuccugaugacgugcugcagaaaagcuaacggagcagaaacaauacaacaccgucucggagagacgggaaggaaagugucugucaccucccaaagcgggagggucauaucuuccugggagucguauaaaagcgggggugagaccaagcuguaa

SEQ ID NO: 63948 - RNA, 1575 nt, Artificial Sequence
  derived and/or modified CDS sequence (wt) from glycoprotein__RABV__LC071979.1
augauuccucaggcucuuuuguuuguaccccuuuugguuuucucaucgugcuucgggaaauuccccaucuacacgauaccagacaaacucggcccuuggaguccuauugacauacaucaccucaguugccccaacaauuuaguuguggaggaugaggggugcaccaaccugucaggauucuccuacauggaacucaaagugggguacauuucagccauaaaagugaacggguucacuugcacggguguggugacagaagcagagaccuacacaaacuuugucgguuacgucaccaccacauuuaagagaaagcacuuccgcccgacaccugacgccugcagagcagcauauaacuggaagauggcaggugaccccagauaugaggaaucucugcauaauccguaucccgauuaucacuggcuccggacuguaaaaaccaccaaggagucucuuguuaucauaucuccgagugugucggacuuagacccguacgacaaaucucuucauuccagaguuuuucccagcgguaaaugcucaggaauaacaguaucuucuaccuauugucccacuaaccaugacuauacuaucuggaugccggaaaauccgagacuagggaccucuugugacauuuucaccaauagcagagggaagagagcauccaaagggggcaagaccuguggauuuguggaugaaagaggcuuguacaagucucugaaaggggcaugcaaauugaaacuauguggaguucuuggacuuagacuuauggacggaacauggguugcgauucaaacaucugaugaggccaaauggugcccuccugaucaguuagugaauauacaugauuuucgcucggaugagauugaacaucuuguuguggaagaguuaguaaagaaaagagaagagugucuagaugcacuggagucuaucaugaccaccaaguccguaaguuucagacgccucagucacuugaggaagcucguccccggguuuggggaggcauauaccauauucaacaaaaccuugauggaggcugaugcucacuacaaaucaguccguacauggaaugagaucauccccucuaaaggauguuuaagaguuggggggagaugucacccccaugugaacgggguguuuuucaaugguaucauccuggguccugauggacauguucuaaucccagagaugcagucaucucuccuucaacagcauauggaguuguuggaauccucgguaaucccgcuaaugcauccuuuggcagaucccucaacgguuuuuaaggacggugacgaggcggaagauuuugucgagguucaccuuccggauguccacaagcaggucucgggaguugaucucggucucccaagcugggggaaguaugugcugaugaguguaggcgcuaugauugcacugauguugaugauuuuccugaugacguguugcagaaaagcuaacggagcagaaacaauacaacaccgucucggagagacgggaaggaaagugucugucaccucccaaagcgggagggucauaucuuccugggagucguauaaaagcgggggugagaccaagcuguaa

SEQ ID NO: 63949 - RNA, 1575 nt, Artificial Sequence
  derived and/or modified CDS sequence (wt) from glycoprotein__RABV__LC071980.1
augauuccucaggcucuuuuguuuguaccccuuuugguuuucucaucgugcuucgggaaauuccccaucuacacgauaccagacaaacucggcccuuggaguccuauugacauacaucaccucaguugcccuaacaauuuaguuguggaggaugaggggugcaccaaccugucaggauucuccuacauggaacucaaagugggguacauuucagccauaaaagugaacggguucacuugcacggguguggugacagaagcagagaccuacacaaacuuugucggcuacgucaccaccacauuuaagagaaagcacuuccgcccgacaccugacgccugcagagcagcauauaacuggaagauggcaggugaccccagauaugaggaaucucugcauaauccguaucccgauuaucacuggcuccggacuguaaaaaccaccaaggagucucuuguuaucauaucuccgagugugucggacuuagacccguacgacaaaucucuucauuccagaguuuuucccagcgguaaaugcucaggaauaacaguaucuucuaccuauugucccacuaaccaugacuauacuaucuggaugccggagaauccgagacuagggacuucuugugacauuuucaccaauagcagagggaagagagcauccaaagggggcaagaccuguggauuuguggaugaaagaggcuuguacaagucucuaaaaggggcaugcaaauugaaacuauguggaguucuuggacuuagacuuauggacggaacauggguugcgauucaaacaucugaugaggccaaauggugcccuccugaucaguuagugaauauacaugauuuucgcucggaugagauugaacaucuuguuguggaagaguuaguaaagaaaagagaagagugucuagaugcacuggagucuaucaugaccaccaaguccguaaguuucagacgccucagucacuugaggaagcucguccccggguuugggaaagcauauaccauauucaacaaaaccuugauggaggcugaugcucacuacaaaucaguccguacauggaaugagaucauccccucuaaaggauguuuaagaguuggggggagaugucacccccaugugaacgggguguuuuucaaugguaucauccuggguccugauggacauguucuaaucccagagaugcagucaucucuccuucaacagcauauggaguuguuggaauccucgguaaucccgcuaaugcauccuuuggcagaucccucaacgguuuuuaaggacggugacgaggcggaagauuuugucgagguucaccuuccggauguccacaagcaggucucgggaguugaucucggucucccgagcugggggaaguaugugcugaugaguguaggcgcuaugauugcacugauguugaugauuuuccugaugacguguugcagaaaagcuaacggagcagaaacaauacaacaccgucucggagagacgggaaggaaagugucugucaccucccaaagcgggagggucauaucuuccugggagucguauaaaagcgggggugagaccaagcuguaa

SEQ ID NO: 63950 - RNA, 1575 nt, Artificial Sequence
  derived and/or modified CDS sequence (wt) from glycoprotein__RABV__LC071981.1
augauuccucaggcucuuuuguuuguaccccuuuugguuuucucaucgugcuucgggaaauuccccaucuacacgauaccagacaaacucggcccuuggaguccuauugacauacaucaccucaguugcccuaacaauuuaguuguggaggaugaggggugcaccaaccugucaggauucuccuacauggaacucaaagugggguacauuucagccauaaaagugaacggguucacuugcacggguguggugacagaagcagagaccuacacaaacuuugucggcuacgucaccaccacauuuaagagaaagcacuuccgcccgacaccugacgccugcagagcagcauauaacuggaagauggcaggugaccccagauaugaggaaucucugcauaauccguaucccgauuaucacuggcuccggacuguaaaaaccaccaaggagucucuuguuaucauaucuccgagugugucggacuuagacccguacgacaaaucucuucauuccagaguuuuucccagcgguaaacgcucaggaauaacaguaucuucuaccuauugucccacuaaccaugacuauacuaucuggaugccggaaaauccgagacuagggaccucuugugacauuuucaccaauagcagagggaagagagcauccaaagggggcaagaccuguggauuuguggaugaaagaggcuuguacaagucucuaaaaggggcaugcaaauugaaacuauguggaguucuuggacuuagacuuauggacggaacauggguugcgauucaaacaucugaugaggccaaauggugcccuccugaucaguuagugaauauacaugauuuucgcucggaugagauugaacaucuuguuguggaagaguuaguaaagaaaagagaagagugucuagaugcacuggagucuaucaugaccaccaaguccguaaguuucagacgccucagucacuugaggaagcucguccccggguuugggaaagcauauaccauauucaacaaaaccuugauggaggcugaugcucacuacaaaucaguccguacauggaaugagaucauccccucuaaaggauguuuaagaguuggggggagaugucacccccaugugaacgggguguuuuucaaugguaucguccuggguccugauggacauguucuaaucccagagaugcagucaucucuccuucaacagcauauggaguuguuggaauccucgguaaucccgcuaaugcauccuuuggcagaucccucaacgguuuuuaaggacggugacgaggcggaagauuuugucgagguucaccuuccggauguccacaagcaggucucgggaguugaucucggucucccaagcugggggaaguaugcgcugaugaguguaggcgcuaugaucgcacugauguugaugauuuuccugaugacguguugcagaaaagcuaacggagcagaaacaaaacaacaccgucucggagagacgggaaggaaagugucugucaccucccaaagcgggagggucauaucuuccugggagucguauaaaagcgggggugagaccaagcuguag

SEQ ID NO: 63951 - RNA, 1575 nt, Artificial Sequence
  derived and/or modified CDS sequence (wt) from glycoprotein__RABV__LC071983.1
augauuccucaggcucuuuuguuuauaccccuuucgguuuucucauugugcuucgggaaauuccccaucuacacgauaccagacaaacucggcccuuggaguccuauugauauacaucaucucaguugcccuaacaauuuaguuguggaggaugaggggugcaccaaccugucaggauucuccuacauggaacucaaagugggguacauuucagccauaaaagugaacggguucacuugcacggguguggugacagaagcagaaaccuacacaaacuuugucggcuacgucaccaccacguuuaagagaaagcacuuccgcccgacaccagaugccugcagagcagcauauaacuggaagauggcaggugaccccagauaugaggaaucucugcauaauccguaucccgauuaucacuggcuccggacuguaaagaccaccaaggagucucuuguuaucauaucuccgagugugucggacuuagacccguacgauaaaucucuucauuccagaguuuuucccagcgguaaauguucaggaauaacaguaucuucuaccuauugucccacuaaccaugacuauacuaucuggaugccggaaaguccgagacuagggaccucuugugacauuuucaccaauagcagagggaagagagcauccaaagggagcaagaccuguggauuuguggacgaaagaggcuuguacaagucucuaaaaggggcaugcaaauugaagcuauguggaguucuuggacuuagacuuauggacggaacaugggcugcgauucaaacaccugaugaggucaaauggugcccuccagaucaguuagugaacauacaugauuuucgcucggaugagauugaacaucuuguuguggaagaguuaguaaagaaaagggaagagugucuagaugcacuggagucuaucaugaccaccaaguccguaaguuucagacgccucagucacuugaggaagcucguccccggguuugggaaagcauauaccauauucaacaaaaccuugauggaggcugaugcucacuacaaaucaguccguacauggaaugagaucauccccucuaaaggauguuuaagaguuggggggagaugucacccccaugugaacgggguguuuuucaacgguaucauccuggguccugauggacauguucuaaucccagagaugcagucgucucuccuucaacagcauauggaguuguuggaauccucgguaaucccgcuaaugcaucccuuggcagaucccucaacaguuuuuaaggacggugacgaggcggaagauuuugucgagguucaccuuccggauguccacaagcaggucucuggaguugaucucggucucccaagcugggggaaguaugugcuaaugaguguaggagcuaugauugcacugauguugaugauuuucuugacgacguguugcagaaaagcuaacggggcagaaucaauacaacaccgucgcggagagacaggaaggaaagugucggucaccucccaaagcgggagagucauaucuuccugggagucguauaaaagcgggggugagaccaagcuguaa

SEQ ID NO: 63952 - RNA, 1575 nt, Artificial Sequence
  derived and/or modified CDS sequence (wt) from glycoprotein__RABV__LM645015.1
augguuccucaagcucuuuuguuugugccccuucuggcuuuuccaauguguuucgggaaauuccccaucuacacaauaccagacaaacuuggucccuggagcccgauugacauacaucaucucagcuguccaaacaacuugguuguggaagacgaaggaugcaccaacuugucggguuucuccuacauggaacuuaaggugggauacauuucggccauaaaagugaacggguucacgugcacagguguggugacagaggcugagaccuacacuaacuuugucgguuauguuaccaccacguuuaagagaaagcauuuccgcccaacaccagaugcauguagagcugcuuacaacuggaaaauggccggugaucccagauaugaagaaucucuucauaauccguacccugacuaccauuggcuucgaaccgugaaaaccacgaaggagucucucaucaucauauccccaaguguagcagaccuagacccauaugacaaaucccuucacucgagggucuuuccuagcgggaagugcuugggaauaacaauaucaucuaccuacugcucgacuaaccaugauuacaccaucuggaugccugagaaugugagauuagggacaucuugugacaucuuuaccaacaguagagggaagagagcauccaaagggagcaagacuuguggauuuguugacgaaagaggcuuguauaagucuuugaagggggcaugcaagcucaaauuauguggaguucugggacuuagacuuauggacggaacgugggucgcgaugccaacaucggaugagaccaaguggugucccccugaucaguugguaaaucuacacgacuuucgcucggacgagaucgaacaucuugucguggaggaguuggucaggaaaagagaggagugucuggaugcccuagaguccaucaugacuaccaagucggugaguuuuagacgucuaagccacuugagaaaacuugucccuggauucggaaaagcauacaccauauucaacaaaacccugauggaagccgaugcucacuacaagucaguccggaccuggaaugagaucauccccuccaaggggugucugagaguuggagggaggugucauccccauguaaacggaguguuuuuuaacggcauaauacugggcccugacggccauguucuaaucccagagaugcaaucaucccuccuucagcaacauauggaguuguuggaaucaucaguuaucccucugaugcauccuuuagcagacccgucuacaguuuucaaggacggugaugaagcagaggauuuuguugagguucaccuucccgaugugcacaaacaggucucagggguugaccugggucucccuaacuggggaaaguaugucuuaauaauugcagggguauugauugccaugauauugacaaucuucuuaaugacauguuguggaagagguaaucgacccaaguccacacaacacagucuuggagggauagggaggaaggugucauccacuucccaaagcgggaaggucauaucuucgugggagucauauaaaagcgggggugagaccagacuguga

SEQ ID NO: 63953 - RNA, 1575 nt, Artificial Sequence
  derived and/or modified CDS sequence (wt) from glycoprotein__RABV__LM645016.1
augguuccucaagcucuuuuguuugugccccuucuggcuuuuccaauguguuucgggaaauuccccaucuacacaauaccagacaaacuuggucccuggagcccaauugacauacaucaucucagcuguccaaacaacuugguuguggaagacgaaggaugcaccaacuugucggguuucuccuacauggaacuuaaggugggauacauuucggccauaaaagugaacggguucacgugcacagguguggugacagaggcugagaccuacacuaacuuugucgguuauguuaccaccacguuuaagagaaagcauuuccgcccaacaccagaugcauguagagcugcuuacaacuggaaaauggccggugaucccagauaugaagaaucucuucauaauccguacccugacuaccauuggcuucgaaccgugaaaaccacgaaggagucucucaucaucauauccccaaguguagcagaccuagacccauaugacaaaucccuucacucgagggucuuuccuagcgggaagugcuugggaauaacaauaucaucuaccuacugcucgacuaaccaugauuacaccaucuggaugccugagaaugugagauuagggacaucuugugacaucuuuaccaacaguagagggaagagagcauccaaagggagcaagacuuguggauuuguugacgaaagaggcuuguauaagucuuugaggggggcaugcaagcucaaauuauguggaguucugggacuuagacuuauggacggaacgugggucgcgaugccaacaucggaugagaccaaguggugucccccugaucaguugguaaaucuacacgacuuucgcucggacgagaucgaacaucuugucguggaggaguuggucaggaaaagagaggagugucuggaugcccuagaguccaucaugacuaccaagucggugaguuuuagacgucuaagccacuugagaaaacuugucccuggauucggaaaagcauacaccauauucaacaaaacccugauggaagccgaugcucacuacaagucaguccggaccuggaaugagaucauccccuccaaggggugucugagaguuggagggaggugucauccccauguaaacggaguguuuuuuaacggcauaauacugggcccugacggccauguucuaaucccagagaugcaaucaucccuccuucagcaacauauggaguuguuggaaucaucaguuaucccucugaugcauccuuuagcagacccgucuacaguuuucaaggacggugaugaagcagaggauuuuguugagguucaccuucccgaugugcacaaacagaucucagggguugaccugggucucccuaacuggggaaaguaugucuuaauaauugcagggguauugauugccaugauauugacaaucuucuuaaugacauguuguggaagagguaaucgacccaaguccacacaacacagucuuggagggauagggaggaaggugucauccacuucccaaagcgggaaggucauaucuucgugggagucauauaaaagcgggggugagaccagacuguga

SEQ ID NO: 63954 - RNA, 1575 nt, Artificial Sequence
  derived and/or modified CDS sequence (wt) from glycoprotein__RABV__LM645018.1
augguuccucaagcucuuuuguuugugccccuucuggcuuuuccaauguguuucgggaaauuccccaucuacacaauaccagacaaacuuggucccuggagcccgauugacauacaucaucucagcuguccaaauaacuugguuguggaagacgaaggaugcacuaacuugucagguuucuccuacauggaacuuaaggugggauacauuucggccauaaaagugaacggguucacgugcacagguguggugacagaggcugagacuuacacuaacuuugucgguuauguuaccaccacguucaagagaaagcauuuccgcccaacaccagaugcauguagagcugcuuacaacuggaaaauggccggugaucccagauaugaagaaucucuucauaauccguacccugacuaccauuggcuucgaaccgugaaaaccacgaaggagucucucaucaucauauccccaaguguagcagaccuagacccauaugacaagucccuucacucgagagucuuuccuagcgggaagugcuugggaauaacaauaucaucuaccuacugcucgacuaaccaugauuacaccaucuggaugcccgagaaugugagauuagggacaucuugugacaucuuuaccaacaguagagggaagagagcauccaaagggagcaagacuugcggauuuguugacgaaagaggcuuguauaagucuuugaagggggcaugcaagcucaaauuauguggaguucugggacuuagacuuauggacggaacgugggucgcgaugccaacaucggaugagaccaaguggugucccccugaucaguugguaaaucuacacgacuuucgcucggacgagaucgaacaucuugucguggaggaguuggucaggaaaagagaggaaugucuggaugcccuagaguccaucaugacuaccaagucggugaguuuuagacgucucagccacuugagaaaacuugucccuggauucggaaaagcauacaccauauucaacaaaacccugauggaagccgaugcucacuacaagucaguccggaccuggaaugagaucauccccuccaaggggugucugagaguuggagggaggugucauccucauguaaacggaguguuuuucaacggcauaauacugggcccugacgggcauguucugaucccagagaugcaaucaucccuccuucagcaacauauggaguuguuggaaucaucaguuaucccucugaugcauccuuuagcagacccgucuacaguuuucaaggacggugaugaagcagaggauuuuguugagguucaccuucccgaugugcacaaacagaucucagggguugaccugggucucccuaacuggggaaaguaugucuuaauaauuacagggguauugauugccaugauauugacaaucuucuuaaugacauguuguggaagagguaaucgacccaaguccaaacaacacagucuuggagggauagggaggaaggugucauccacuucccaaagcgggaaggucauaucuucgugggagucauauaaaagcgggggugagaccagacuguga

SEQ ID NO: 63955 - RNA, 1575 nt, Artificial Sequence
  derived and/or modified CDS sequence (wt) from glycoprotein__RABV__LM645019.1
augguuccucaagcucuuuuguuugugccccuucuggcuuuuccaauguguuucgggaaauuccccaucuacacaauaccagacaaacuuggucccuggagcccgauugacauacaucaucucagcuguccaaauaacuugguuguggaagacgaaggaugcacuaacuugucagguuucuccuacauggaacuuaaggugggauacauuucggccauaaaagugaacggguucacgugcacagguguggugacagaggcugagacuuacacuaacuuugucgguuauguuaccaccacguucaagagaaagcauuuccgcccaacaccagaugcauguagagcugcuuacaacuggaaaauggccggugaucccagauaugaagaaucucuucauaauccguacccugacuaccauuggcuucgaaccgugaaaaccacgaaggagucucucaucaucauauccccaaguguggcagaccuagacccauaugacaaaucccuucacucgagagucuuuccuagcgggaagugcuugggaauaacaauaucaucuaccuacugcucgacuaaccaugauuacaccaucuggaugcccgagaaugugagauuagggacaucuugugacaucuuuaccaacaguagagggaagagagcauccaaagggagcaagacuugcggauuuguugacgaaagaggcuuguauaagucuuugaagggggcaugcaagcucaaauuauguggaguucugggacuuagacuuauggacggaacgugggucgcgaugccaacaucggaugagaccaaguggugucccccugaucaguugguaaaucuacacgacuuucgcucggacgagaucgaacaucuugucguggaggaguuggucaggaaaagagaggaaugucuggaugcccuagaguccaucaugacuaccaagucggugaguuuuagacgucucagccacuugagaaaacuugucccuggauucggaaaagcauacaccauauucaacaaaacccugauggaagccgaugcucacuacaagucaguccggaccuggaaugagaucauccccuccaaggggugucugagaguuggagggaggugucauccucauguaaacggaguguuuuucaacggcauaauacugggcccugacgggcauguucugaucccagagaugcaaucaucccuccuucagcaacauauggaguuguuggaaucaucaguuaucccucugaugcauccuuuagcagacccgucuacaguuuucaaggacggugaugaagcagaggauuuuguugagguucaccuucccgaugugcacaaacagaucucagggguugaccugggucucccuaacuggggaaaguaugucuuaauaauugcagggguauugauugccaugauauugacaaucuucuuaaugacauguuguggaagagguaaucgacccaaguccaaacaacacagucuuggagggauagggaggaaggugucauccacuucccaaagcgggaaggucauaucuucgugggagucauauaaaagcgggggugagaccagacuguga

SEQ ID NO: 63956 - RNA, 1575 nt, Artificial Sequence
  derived and/or modified CDS sequence (wt) from glycoprotein__RABV__LM645021.1
augguuccucaagcucuuuuguuugugccccuucuggcuuuuccaauguguuucgggaaauuccccaucuacacaauaccagacaaacuuggucccuggagcccgauugacauacaucaucucagcuguccaaauaacuugguuguggaagacgaaggaugcacuaacuugucagguuucuccuacauggaacuuaaggugggauacauuucggccauaaaagugaacggguucacgugcacagguguggugacagaggcugagacuuacacuaacuuugucgguuauguuaccaccacguucaagagaaagcauuuccgcccaacaccagaugcauguagagcugcuuacaacuggaaaauggccggugaucccagauaugaagaaucucuucauaauccguacccugacuaccauuggcuucgaaccgugaaaaccacgaaggagucucucaucaucauauccccaaguguagcagaccuagacccauaugacaaaucccuucacucgagagucuuuccuagcgggaagugcuugggaauaacaauaucaucuaccuacugcucgacuaaccaugauuacaccaucuggaugcccgagaaugugagauuagggacaucuugugacaucuuuaccaacaguagagggaagagagcauccaaagggagcaaaacuugcggauuuguugacgaaagaggcuuguauaagucuuugaagggggcaugcaagcucaaauuauguggaguucugggacuuagacuuauggacggaacgugggucgcgaugccaacaucggaugagaccaagugguguuccccugaucaguugguaaaucuacacgacuuucgcucggacgagaucgaacaucuugucguggaggaguuggucaggaaaagagaggaaugucuggaugcccuagaguccaucaugacuaccaagucggugaguuuuagacgucucagccacuugagaaaacuugucccuggauucggaaaagcauacaccauauucaacaaaacccugauggaagccgaugcucacuacaagucaguccggaccuggaaugagaucauccccuccaaggggugucugagaguuggagggaggugucauccucauguaaacggaguguuuuucaacggcauaauacugggcccugacgggcauguucugaucccagagaugcaaucaucccuccuucagcaacauauggaguuguuggaaucaucaguuaucccucugaugcauccuuuagcagacccgucuacaguuuucaaggacggugaugaagcagaggauuuuguugagguucaccuucccgaugugcacaaacagaucucagggguugaccugggucucccuaacuggggaaaguaugucuuaauaauugcagggguauugauugccaugauauugacaaucuucuuaaugacauguuguggaagagguaaucgacccaaguccaaacaacacagucuuggagggauagggaggaaggugucauccacuucccaaagcgggaaggucauaucuucgugggagucauauaaaagcgggggugagaccagacuguga

SEQ ID NO: 63957 - RNA, 1575 nt, Artificial Sequence
  derived and/or modified CDS sequence (wt) from glycoprotein__RABV__LM645022.1
augguuccucaagcucuuuuguuugugccccuucuggcuuuuccaauguguuucgggaaauuccccaucuacacaauaccagacaaacuuggucccuggagcccgauugacauacaucaucucagcuguccaaauaacuugguuguggaagacgaaggaugcacuaacuugucagguuucuccuacauggaacuuaaggugggauacauuucggccauaaaagugaacggguucacgugcacagguguggugacagaggcugagacuuacacuaacuuugucgguuauguuaccaccacguucaagagaaagcauuuccgcccaacaccagaugcauguagagcugcuuacaacuggaaaauggccggugaucccagauaugaagaaucucuucauaauccguacccugacuaccauuggcuucgaaccgugaaaaccacgaaggagucucucaucaucauauccccaaguguagcagaccuagacccauaugacaagucccuucacucgagagucuuuccuagcgggaagugcuugggaauaacaauaucaucuaccuacugcucgacuaaccaugauuacaccaucuggaugcccgagaaugugagauuaaggacaucuugugacaucuuuaccaacaguagagggaagagagcauccaaagggagcaagacuugcggauuuguugacgaaagaggcuuguauaagucuuugaagggggcaugcaagcucaaauuauguggaguucugggacuuagacuuauggacggaacgugggucgcgaugccaacaucggaugagaccaaguggugucccccugaucaguugguaaaucuacacgacuuucgcucggacgagaucgaacaucuugucguggaggaguuggucaggaaaagagaggaaugucuggaugcccuagaguccaucaugacuaccaagucggugaguuuuagacgucucagccacuugagaaaacuugucccuggauucggaaaagcauacaccauauucaacaaaacccugauggaagccgaugcucacuacaagucaguccggaccuggaaugagaucauccccuccaaggggugucugagaguuggagggaggugucauccucauguaaacggaguguuuuucaacggcauaauacugggcccugacgggcauguucugaucccagagaugcaaucaucccuccuucagcaacauauggaguuguuggaaucaucaguuaucccucugaugcauccuuuagcagacccgucuacaguuuucaaggacggugaugaagcagaggauuuuguugagguucaccuucccgaugugcacaaacagaucucagggguugaccugggucucccuaacuggggaaaguaugucuuaauaauugcagggguauugauugccaugauauugacaaucuucuuaaugacauguuguggaagagguaaucgacccaaguccaaacaacacagucuuggagggauagggaggaaggugucauccacuucccaaagcgggaaggucauaucuucgugggagucauauaaaagcgggggugagaccagacuguga

SEQ ID NO: 63958 - RNA, 1575 nt, Artificial Sequence
  derived and/or modified CDS sequence (wt) from glycoprotein__RABV__LM645024.1
augguuccucaagcucuuuuguuugugccccuucuggcuuuuccaauguguuucgggaaauuccccaucuacacaauaccagacaaacuuggucccuggagcccgauugacauacaucaucucagcuguccaaauaacuugguuguggaagacgaaggaugcacuaacuugucagguuucuccuacauggaacuuaaggugggauacauuucggccauaaaagugaacggguucacgugcacagguguggugacagaggcugagacuuacacuaacuuugucgguuauguuaccaccacguucaagagaaagcauuuccgcccaacaccagaugcauguagagcugcuuacaacuggaaaauggccggugaucccagauaugaagaaucucuucauaauccguacccugacuaccauuggcuucgaaccgugaaaaccacgaaggagucucucaucaucauauccccaaguguagcagaccuagacccauaugacaagucccuucacucgagagucuuuccuagcgggaagugcuugggaauaacaauaucaucuaccuacugcucgacuaaccaugauuacaccaucuggaugcccgagaaugugagauuagggacaucuugugacaucuuuaccaacaguagagggaagagagcauccaaagggagcaagacuugcggauuuguugacgaaagaggcuuguauaagucuuugaagggggcaugcaagcucaaauuauguggaguucugggacuuagacuuauggacggaacgugggucgcgaugccaacaucggaugagaccaaguggugucccccugaucaguugguaaaucuacacgacuuucgcucggacgagaucgaacaucuugucguggaggaguuggucaggaaaagagaggaaugucuggaugcccuagaguccaucaugacuaccaagucggugaguuuuagacgucucagccacuugagaaaacuugucccuggauucggaaaagcauacaccauauucaacaaaacccugauggaagccgaugcucacuacaagucaguccggaccuggaaugagaucauccccuccaaggggugucugagaguuggagggaggugucauccucauguaaacggaguguuuuucaacggcauaauacugggcccugacgggcauguucugaucccagagaugcaaucaucccuccuucagcaacauauggaguuguuggaaucaucaguuaucccucugaugcauccuuuagcagacccgucuacaguuuucaaggacggugaugaagcagaggauuuuguugagguucaccuucccgaugugcacaaacagaucucagggguugaccugggucucccuaacuggggaaaguaugucuuaauaauugcagggguauugauugccaugauauugacaaucuucuuaaugacauguuguggaagagguaaucgacccaaguccaaacaacacagucuuggagggauagggaggaaggugucauccacuucccaaagcgggaaggucauaucuucgugggagucauauaaaagcgggggugagaccagacuguga

SEQ ID NO: 63959 - RNA, 1575 nt, Artificial Sequence
  derived and/or modified CDS sequence (wt) from glycoprotein__RABV__LM645026.1
augguuccucaagcucuuuuguuugugccccuucuggcuuuuccaauguguuucgggaaauuccccaucuacacaauaccagacaaacuuggucccuggagcccgauugacauacaucaucucagcuguccaaauaacuugguuguggaagacgaaggaugcacuaacuugucagguuucuccuacauggaacuuaaggugggauacauuucggccauaaaagugaacggguucacgugcacagguguggugacagaagcugagacuuacacuaacuuugucgguuauguuaccaccacguucaagagaaagcauuuccgcccaacaccagaugcauguagagcugcuuacaacuggaaaauggccggugaucccagauaugaagaaucucuucauaauccguacccugacuaccauuggcuucgaaccgugaaaaccacgaaggagucucucaucaucauauccccaaguguagcagaccuagacccauaugacaaaucccuucacucgagagucuuuccuagcgggaagugcuugggaauaacaauaucaucuaccuacugcucgacuaaccaugauuacaccaucuggaugcccgagaaugugagauuagggacaucuugugacaucuuuaccaacaguagagggaagagagcauccaaagggagcaagacuugcggauuuguugacgaaagaggcuuguauaagucuuugaagggggcaugcaagcucaaauuauguggaguucugggacuuagacuuauggacggaacgugggucgcgaugccaacaucggaugagaccaaguggugucccccugaucaguugguaaaucuacacgacuuucgcucggacgagaucgaacaucuugucguggaggaguuggucaggaaaagagaggaaugucuggaugcccuagaguccaucaugacuaccaagucggugaguuuuagacgucucagccacuugagaaaacuugucccuggauucggaaaagcauacaccauauucaacaagacccugauggaagccgaugcucacuacaagucaguccggaccuggaaugagaucauccccuccaaggggugucugagaguuggagggaggugucauccucauguaaacggaguguuuuucaacggcauaauacugggcccugacgggcauguucugaucccagagaugcaaucaucccuccuucagcaacauauggaguuguuggaaucaucaguuaucccucugaugcauccuuuagcagacccgucuacaguuuucaaggacggugaugaagcagaggauuuuguugagguucaccuucccgaugugcacaaacagaucucagggguugaccugggucucccuaacuggggaaaguaugucuuaauaauugcagggguguugauugccaugauauugacaaucuucuuaaugacauguuguggaagagguaaucgacccaaguccaaacaacacagucuuggagggauagggaggaaggugucauccacuucccaaagcgggaaggucauaucuucgugggagucauauaaaagcgggggugagaccagacuguga

SEQ ID NO: 63960 - RNA, 1575 nt, Artificial Sequence
  derived and/or modified CDS sequence (wt) from glycoprotein__RABV__LM645027.1
augguuccucaagcucuuuuguuugugccccuucuggcuuuuccaauguguuucggaaaauuccccaucuacacaauaccagacaaacuuggucccuggagcccgauugacauacaucaucucagcuguccaaauaacuugguuguggaagacgaaggaugcaccaacuugucggguuucuccuacauggaacuuaaggugggauacauuucggccauaaaagugaacggguucacgugcacagguguggugacagaggcugagaccuacacuaacuuugucgguuauguuaccaccacguuuaagagaaagcauuuccgcccaacaccagaugcauguagagcugcuuacaacuggaaaauggccggugaucccagauaugaagaaucucuucauaauccguacccugacuaccauuggcuucgaaccgugaaaaccacgaaggagucucucaucaucauauccccaaguguagcagaccuagacccauaugacaaaucccuucacucgagggucuuuccuagcgggaagugcuugggaauaacaauaucaucuaccuacugcucgacuaaccaugauuacaccaucuggaugcccgagaaugugagauuagggacaucuugugacaucuuuaccaacaguagagggaagagagcauccaaagggagcaagacuuguggauuuguugacgaaagaggcuuguauaagucuuugaagggggcaugcaagcucaaauuauguggaguucugggacuuagacuuauggacggaacgugggucgcgaugccaacaucggaugagaccaaguggugucccccugaucaguugguaaaucuacacgacuuucgcucggacgagaucgaacaucuugucguggaggaguuggucaggaaaagagaggagugucuggaugcccuagaguccaucaugacuaccaagucggugaguuuuagacgucuaagccacuugagaaaacuugucccuggauucggaaaagcauacaccauauucaacaaaacccugauggaagccgaugcucacuacaagucaguccggaccuggaaugagaucauccccuccaaggggugucugagaguuggagggaggugucauccccauguaaacggaguguuuuuuaacggcauaauacugggcccugacggccauguucuaaucccagagaugcaaucaucccuccuucagcaacauauggaguuguuggaaucaucaguuaucccucugaugcauccuuuagcagacccgucuacaguuuucaaggacggugaugaagcagaggauuuuguugagguucaccuucccgaugugcacaaacagaucucagggguugaccugggucucccuaacuggggaaaguaugucuuaauaauugcaggguuauugauugccaugauauugacaaucuucuuaaugacauguuguggaagagguaaucgacccaaguccacacaacacagucuuggagggauagggaggaaggugucauccacuucccaaagcgggaaggucauaucuucgugggagucauauaaaagcgggggugagaccagacuguga

SEQ ID NO: 63961 - RNA, 1575 nt, Artificial Sequence
  derived and/or modified CDS sequence (wt) from glycoprotein__RABV__LM645029.1
augguuccucaagcucuuuuguuugugccccuucuggcuuuuccaauguguuucgggaaauuccccaucuacacaauaccagacaaacuuggucccuggagcccgauugacauacaucaucucagcuguccaaauaacuugguuguggaagacgaaggaugcacuaacuugucagguuucuccuacauggaacuuaaggugggauacauuucggccauaaaagugaacggguucacgugcacagguguggugacagaggcugagacuuacacuaacuuugucgguuauguuaccaccacguucaagagaaagcauuuccgcccaacaccagaugcauguagagcugcuuacaacuggaaaauggccggugaucccagauaugaagaaucucuucauaauccguacccugacuaccauuggcuucgaaccgugaaaaccacgaaggagucucucaucaucauauccccaaguguagcagaccuagacccauaugacaagucccuucacucgagagucuuuccuagcgggaagugcuugggaauaacaauaucaucuaccuacugcucgacuaaccaugauuacaccaucuggaugcccgagaaugugagauuagggacaucuugugacaucuuuaccaacaguagagggaagagagcauccaaagggagcaagacuugcggauuuguugacgaaagaggcuuguauaagucuuugaagggggcaugcaagcucaaauuauguggaguucugggacuuagacuuauggacggaacgugggucgcgaugccaacaucggaugagaccaaguggugucccccugaucaguugguaaaucuacacgacuuucgcucggacgagaucgaacaucuugucguggaggaguuggucaggaaaagagaggaaugucuggaugcccuagaguccaucauuacuaccaagucggugaguuuuagacgucucagccacuugagaaaacuugucccuggauucggaaaagcauacaccauauucaacaaaacccugauggaagccgaugcucacuacaagucaguccggaccuggaaugagaucauccccuccaaggggugucugagaguuggagggaggugucauccucauguaaacggaguguuuuucaacggcauaauacugggcccugacgggcauguucugaucccagagaugcaaucaucccuccuucagcaacauauggaguuguuggaaucaucaguuaucccucugaugcauccuuuagcagacccgucuacaguuuucaaggacggugaugaagcagaggauuuuguugagguucaccuucccgaugugcacaaacagaucucagggguugaccugggucucccuaacuggggaaaguaugucuuaauaauugcagggguauugauugccaugauauugacaaucuucuuaaugacauguuguggaagagguaaucgacccaaguccaaacaacacagucuuggagggauagggaggaaggugucauccacuucccaaagcgggaaggucauaucuucgugggagucauauaaaagcgggggugagaccagacuguga

SEQ ID NO: 63962 - RNA, 1575 nt, Artificial Sequence
  derived and/or modified CDS sequence (wt) from glycoprotein__RABV__LM645031.1
augguuccucaagcucuuuuguuugugccccuucuggcuuuuccaauguguuucgggaaauuccccaucuacacaauaccagacaaacuuggucccuggagcccgauugacauacaucaucucagcuguccaaauaacuugguuguggaagacgaaggaugcacuaacuugucagguuucuccuacauggaacuuaaggugggauacauuucggccauaaaagugaacggguucacgugcacagguguggugacagaggcugagacuuacacuaacuuugucgguuauguuaccaccacguucaagagaaagcauuuccgcccaacaccagaugcauguagagcugcuuacaacuggaaaauggccggugaucccagauaugaagaaucucuucauaauccguacccugacuaccauuggcuucgaaccgugaaaaccacgaaggagucucucaucaucauauccccaaguguagcagaccuagacccauaugacaagucccuucacucgagagucuuuccuagcgggaagugcuugggaauaacaauaucaucuaccuacugcucgacuaaccaugauuacaccaucuggaugcccgagaaugugagauuagggacaucuugugacaucuuuaccaacaguagagggaagagagcauccagagggagcaagacuugcggauuuguugacgaaagaggcuuguauaagucuuugaagggggcaugcaagcucaaauuauguggaguucugggacuuagacuuauggacggaacgugggucgcuaugccaacaucggaugagaccaaguggugucccccugaucaguugguaaaucuacacgacuuucgcucggacgagaucgaacaucuugucguggaggaguuggucaggaaaagagaggaaugucuggaugcccuagaguccaucaugacuaccaagucggugaguuuuagacgucucagccacuugagaaaacuugucccuggauucggaaaagcauacaccauauucaacaaaacccugauggaagccgaugcucacuacaagucaguccggaccuggaaugagaucauccccuccaaggggugucugagaguuggagggaggugucauccucauguaaacggaguguuuuucaacggcauaauacugggcccugacgggcauguucugaucccagagaugcaaucaucccuccuucagcaacauauggaguuguuggaaucaucaguuaucccucugaugcauccuuuagcagacccgucuacaguuuucaaggacggugaugaagcagaggauuuuguugagguucaccuucccgaugugcacaaacagaucucagggguugaccugggucucccuaacuggggaaaguaugucuuaauaauugcagggguauugauugccaugauauugacaaucuucuuaaugacauguuguggaagagguaaucgacccaaguccaaacaacacagucuuggagggauagggaggaaggugucauccacuucccaaagcgggaaggucauaucuucgugggagucauauaaaagcgggggugagaccagacuguga

SEQ ID NO: 63963 - RNA, 1575 nt, Artificial Sequence
  derived and/or modified CDS sequence (wt) from glycoprotein__RABV__LM645034.1
augguuccucaagcucuuuuguuugugccccuucuggcuuuuccaauguguuucgggaaauuccccaucuacacaauaccagacaaacuuggucccuggagcccgauugacauacaucaucucagcuguccaaauaacuugguuguggaagacgaaggaugcacuaacuugucagguuucuccuacauggaacuuaaggugggauacauuucggccauaaaagugaacggguucacgugcacagguguggugacagaggcugagacuuacacuaacuuugucgguuauguuaccaccacguucaagagaaagcauuuccgcccaacaccagaugcauguagagcugcuuacaacuggaaaauggccggugaucccagauaugaagaaucucuucauaauccguacccugacuaccauuggcuucgaaccgugaaaaccacgaaggagucucucaucaucauauccccaaguguagcagaccuagacccauaugacaaaucccuucacucgagagucuuuccuagcgggaagugcuugggaauaacaauaucaucuaccuacugcucgacuaaccaugauuacaccaucuggaugcccgagaaugugagauuagggacaucuugugacaucuuuaccaacaguagagggaagagagcauccaaagggagcaagacuugcggauuuguugacgaaagaggcuuguauaagucuuugaagggggcaugcaagcucaaauuauguggaguucugggacuuagacuuauggacggaacgugggucgcgaugccaacaucggaugagaccaaguggugucccccugaucaguugguaaaucuacacgacuuucgcucggacgagaucgaacaucuugucguggaggaguuggucaggaaaagagaggaaugucuggaugcccuagaguccaucaugacuaccaagucggugaguuuuagacgucucagccacuugagaaaacuugucccuggauucggaaaagcauacaccauauucaacaaaacccugauggaagccgaugcucacuacaagucaguccggaccuggaaugagaucauccccuccaaggggugucugagaguuggagggaggugucauccucauguaaacggaguguuuuucaacggcauaauacugggcccugacgggcauguucugaucccagagaugcaaucaucccuccuucagcaacauauggaguuguuggaaucaucaguuaucccucugaugcauccuuuagcagacccgucuacaguuuucaaggacggugaugaagcagaggauuuuguugagguucaccuucccgaugugcacaaacagaucucagggguugaccugggucucccuaacuggggaaaguaugucuuaauaauugcagggguauugauugccaugauauugacaaucuucuuaaugacauguuguggaagagguaaucgacccaaguccaaacaacacagucuuggagggauagggaggaaggugucauccacuucccaaagcgggaaggucauaucuucgugggagucauauaaaagcgggggugagaccagacuguga

SEQ ID NO: 63964 - RNA, 1575 nt, Artificial Sequence
  derived and/or modified CDS sequence (wt) from glycoprotein__RABV__LM645035.1
augguuccucaagcucuuuuguuugugccccuucuggcuuuuccaauguguuucgggaaauuccccaucuacacaauaccagacaaacuuggucccuggagcccgauugacauacaucaucucagcuguccaaauaacuugguuguggaagacgaaggaugcacuaacuugucagguuucuccuacauggaacuuaaggugggauacauuucggccauaaaagugaacggguucacgugcacagguguggugacagaggcugagacuuacacuaacuuugucgguuauguuaccaccacguucaagagaaagcauuuccgcccaacaccagaugcauguagagcugcuuacaacuggaaaauggccggugaucccagauaugaagaaucucuucauaauccguacccugacuaccauuggcuucgaaccgugaaaaccacgaaggagucucucaucaucauauccccaaguguagcagaccuagacccauaugacaaaucccuucacucgagagucuuuccuagcgggaagugcuugggaauaacaauaucaucuaccuacugcucgacuaaccaugauuacaccaucuggaugcccgagaaugugagauuagggacaucuugugacaucuuuaccaacaguagagggaagagagcauccaaagggagcaagacuugcggauuuguugacgaaagaggcuuguauaagucuuugaagggggcaugcaagcucaaauuauguggaguucugggacuuagacuuauggacggaacgugggucgcgaugccaacaucggaugagaccaaguggugucccccugaucaguugguaaaucuacacgacuuucgcucggacgagaucgaacaucuugucguggaggaguuggucaggaaaagagaggaaugucuggaugcccuagaguccaucaugacuaccaagucgguaaguuuuagacgucucagccacuugagaaaacuugucccuggauucggaaaagcauacaccauauucaacaaaacccugauggaagccgaugcucacuacaagucaguccggaccuggaaugagaucauccccuccaaggggugucugagaguuggagggaggugucauccucauguaaacggaguguuuuucaacggcauaauacugggcccugacgggcauguucugaucccagagaugcaaucaucccuccuucagcaacauauggaguuguuggaaucaucgguuaucccucugaugcauccuuuagcagacccgucuacaguuuucaaggacggugaugaagcagaggauuuuguugagguucaccuucccgaugugcacaaacagaucucagggguugaccugggucucccuaacuggggaaaguaugucuuaauaauugcagggguauugauugccaugauauugacaaucuucuuaaugacauguuguggaagagguaaucgacccaaguccaaacaacacagucuuggagggauagggaggaaggugucauccacuucccaaagcgggaaggucauaucuucgugggagucauauaaaagcgggggugagaccagacuguga

SEQ ID NO: 63965 - RNA, 1575 nt, Artificial Sequence
  derived and/or modified CDS sequence (wt) from glycoprotein__RABV__LM645036.1
augguuccucaagcucuuuuguuugugccccuucuggcuuuuccaauguguuucgggaaauuccccaucuacacaauaccagacaaacuuggucccuggagcccgauugacauacaucaucucagcuguccaaauaacuugguuguggaagacgaaggaugcacuaacuugucagguuucuccuacauggaacuuaaggugggauacauuucggccauaaaagugaacggguucacgugcacagguguggugacagaggcugagacuuacacuaacuuugucgguuauguuaccaccacguucaagagaaagcauuuccgcccaacaccagaugcauguagagcugcuuacaacuggaaaauggccggugaucccagauaugaagaaucucuucauaauccguacccugacuaccauuggcuucgaaccgugaaaaccacgaaggagucucucaucaucauauccccaaguguagcagaccuagacccauaugacaaaucccuucacucgagagucuuuccuagcgggaagugcuugggaauaacaauaucaucuaccuacugcuugacuaaccaugauuacaccaucuggaugcccgagaaugugagauuagggacaucuugugacaucuuuaccaacaguagagggaagagagcauccaaagggagcaagacuugcggauuuguugacgaaagaggcuuguauaagucuuugaagggggcaugcaagcucaaauuauguggaguucugggacuuagacuuauggacggaacgugggucgcgaugccaacaucggaugagaccaaguggugucccccugaucaguugguaaaucuacacgacuuucgcucggacgagaucgaacaucuugucguggaggaguuggucaggaaaagagaggaaugucuggaugcccuagaguccaucaugacuaccaagucggugaguuuuagacgucucagccacuugagaaaacuugucccuggauucggaaaagcauacaccauauucaacaaaacccugauggaagccgaugcucacuacaagucaguccggaccuggaaugagaucauccccuccaaggggugucugagaguuggagggaggugucauccucauguaaacggaguguuuuucaacggcauaauacugggcccugacgggcauguucugaucccagagaugcaaucaucccuccuucagcaacauauggaguuguuggaaucaucaguuaucccucugaugcauccuuuagcagacccgucuacaguuuucaaggacggugaugaagcagaggauuuuguugagguucaccuucccgaugugcacaaacagaucucagggguugaccugggucucccuaacuggggaaaguaugucuuaauaauugcagggguauugauugccaugauauugacaaucuucuuaaugacauguuguggaagagguaaucgacccaaguccaaacaacacagucuuggagggauagggaggaaggugucauccacuccccaaagcgggaaggucauaucuucgugggagucauauaaaagcgggggugagaccagacuguga

SEQ ID NO: 63966 - RNA, 1575 nt, Artificial Sequence
  derived and/or modified CDS sequence (wt) from glycoprotein__RABV__LM645037.1
augguuccucaagcucuuuuguuugugccccuucuggcuuuuccaauguguuucgggaaauuccccaucuacacaauaccagacaaacucggucccuggagcccgauugacauacaucaucucagcuguccaaauaacuugguuguggaagacgaaggaugcaccaacuugucggguuucuccuacauggaacuuaaggugggauacauuucggccauaaaagugaacggguucacgugcacagguguggugacagaggcugagacuuacacuaacuuugucgguuauguuaccaccacguucaagagaaagcauuuccgcccaacaccagaugcauguagagcugcuuacaacuggaaaauggccggugaucccagauaugaagaaucucuucauaauccguacccugacuaccauuggcuucgaaccgugaaaaccacgaaggagucucucaucaucauauccccaaguguagcagaccuagacccauaugacaaaucccuucacucgagggucuuuccuagcgggaagugcuugggaauaacaauaucaucuaccuacugcucgacuaaccaugauuacaccaucuggaugcccgagaauguaagauuagggacaucuugugacaucuuuaccaacaguagagggaagagagcauccaaagggagcaagacuugcggauuuguugacgaaagaggcuuguauaagucuuugaagggggcaugcaagcucaaauuauguggaguucugggacuuagacuuauggacggaacgugggucgcgaugccaacaucggaugagaccaaguggugucccccugaucaguugguaaaucuacacgacuuucgcucggacgagaucgaacaucuugucguggaggaguuggucaggaaaagagaggagugucuggaugcccuagaguccaucaugacuaccaagucggugaguuuuagacgucucagccacuugagaaaacuugucccuggauucggaaaagcauacaccauauucaacaaaacccugauggaagccgaugcucacuacaagucaguccggaccuggaaugagaucauccccuccaaggggugucugagaguuggagggaggugucauccucauguaaacggaguguuuuuuaacggcauaauacugggcccugacggccauguucugaucccagagaugcaaucaucccuccuucagcaacauauggaguuguuggaaucaucaguuaucccucugaugcacccuuuagcagacccgucuacaguuuucaaggacggugaugaagcagaggauuuuguugagguucaccuucccgaugugcacaaacagaucucagggguugaccugggucucccuaacuggggaaaguaugucuuaauaauugcagggguauugauugcuaugauauugacaaucuucuuaaugacauguuguggaagagguaaucgacccaaguccacacaacacagucuuggagggauagggaggaaggugucauccacuucccaaagcgggaaggucauaucuucaugggagucauauaaaagcgggggugagaccagacuguga

SEQ ID NO: 63967 - RNA, 1575 nt, Artificial Sequence
  derived and/or modified CDS sequence (wt) from glycoprotein__RABV__LM645039.1
augguuccucaagcucuuuuguuugugccccuucuggcuuuuccaauguguuucgggaaauuccccaucuacacaauaccagacaaacucggucccuggagcccgauugacauacaucaucucagcuguccaaauaacuugguuguggaagacgaaggaugcaccaacuugucggguuucuccuacauggaacuuaaggugggauacauuucggccauaaaagugaacggguucacgugcacagguguggugacagaggcugagacuuacacuaacuuugucgguuauguuaccaccacguucaagagaaagcauuuccucccaacaccagaugcauguagagcugcuuacaacuggaaaauggccggugaucccagauaugaagaaucucuucauaauccguacccugacuaccauuggcuucgaacugugaaaaccacgaaggagucucucaucaucauauccccaaguguagcagaccuagacccauaugacaaaucccuucacucgagggucuuuccuagcgggaagugcuugggaauaacaauaucaucuaccuacugcucgacuaaccaugauuacaccaucuggaugcccgagaauguaagauuagggacaucuugugacaucuuuaccaacaguagagggaagagagcauccaaagggagcaagacuugcggauuuguugacgaaagaggcuuguauaagucuuugaagggggcaugcaagcucaaauuauguggaguucugggacuuagacuuauggacggaacgugggucgcgaugccaacaucggaugagaccaaguggugucccccugaucaguugguaaaucuacacgacuuucgcucggacgagaucgaacaucuugucguggaggaguuggucaggaaaagagaggagugucuggaugcccuagaguccaucaugacuaccaagucggugaguuuuagacgucucagccacuugagaaaacuugucccuggauucggaaaagcauacaccauauucaacaaaacccugauggaagccgaugcucacuacaagucaguccggaccuggaaugagaucauccccuccaaggggugucugagaguuggagggaggugucauccucauguaaacggaguguuuuuuaacggcauaauacugggcccugacggccauguucugaucccagagaugcaaucaucccuccuucagcaacauauggaguuguuggaaucaucaguuaucccucugaugcacccuuuagcagacccgucuacaguuuucaaggacggugaugaagcagaggauuuuguugagguucaccuucccgaugugcacaaacagaucucagggguugaccugggucucccuaacuggggaaaguaugucuuaauaauugcagggguauugauugcuaugauauugacaaucuucuuaaugacauguuguggaagagguaaucgacccaaguccacacaacacagucuuggagggauagggaggaaggugucauccacuucccaaagcgggaaggucauaucuucaugggagucauauaaaagcgggggugagaccagacuguga

SEQ ID NO: 63968 - RNA, 1575 nt, Artificial Sequence
  derived and/or modified CDS sequence (wt) from glycoprotein__RABV__LM645041.1
augguuccucaagcucuuuuguuugugccccuucuggcuuuuccaauguguuucgggaaauuccccaucuacacaauaccagacaaacucggucccuggagcccgauugacauacaucaucucagcuguccaaauaacuugguuguggaagacgaaggaugcaccaacuugucggguuucuccuacauggaacuuaaggugggauacauuucggccauaaaagugaacggguucacgugcacagguguggugacagaggcugagacuuacacuaacuuugucgguuauguuaccaccacguucaagagaaagcauuuccgcccaacaccagaugcauguagagcugcuuacaacuggaaaauggccggugaucccagauaugaagaaucucuucauaauccguacccugacuaccauuggcuucgaacugugaaaaccacgaaggagucucucaucaucauauccccaaguguagcagaccuagacccauaugacaaaucccuucacucgagggucuuuccuagcgggaagugcuugggaauaacaauaucaucuaccuacugcucgacuaaccaugauuacaccaucuggaugcccgagaauguaagauuagggacaucuugugacaucuuuaccaacaguagagggaagagagcauccaaagggagcaagacuugcggauuuguugacgaaagaggcuuguauaagucuuugaagggggcaugcaagcucaaauuauguggaguucugggacuuagacuuauggacggaacgugggucgcgaugccaacaucggaugagaccaaguggugucccccugaucaguugguaaaucuacacgacuuucgcucggacgagaucgaacaucuugucguggaggaguuggucaggaaaagagaggagugucuggaugcccuagaguccaucaugacuaccaagucggugaguuuuagacgucucagccacuugagaaaacuugucccuggauucggaaaagcauacaccauauucaacaaaacccugauggaagccgaugcucacuacaagucaguccggaccuggaaugagaucauccccuccaaggggugucugagaguuggagggaggugucauccucauguaaacggaguguuuuuuaacggcauaauacugggcccugacggccauguucugaucccagagaugcaaucaucccuccuucagcaacauauggaguuguuggaaucaucaguuaucccucugaugcacccuuuagcagacccgucuacaguuuucaaggacggugaugaagcagaggauuuuguugagguucaccuucccgaugugcacaaacagaucucagggguugaccugggucucccuaacuggggaaaguaugucuuaauaauugcagggguauugauugcuaugauauugacaaucuucuuaaugacauguuguggaagagguaaucgacccaaguccacacaacacagucuuggagggauagggaggaaggugucauccacuucccaaagcgggaaggucauaucuucaugggagucauauaaaagcgggggugagaccagacuguga

SEQ ID NO: 63969 - RNA, 1575 nt, Artificial Sequence
  derived and/or modified CDS sequence (wt) from glycoprotein__RABV__LM645042.1
augguuccucaagcucuuuuguuugugccccuucuggcuuuuccaauguguuucgggaaauuccccaucuacacaauaccagacaaacucggucccuggagcccgauugacauacaucaucucagcuguccaaauaacuugguuguggaagacgaaggaugcaccaacuugucggguuucuccuacauggaacuuaaggugggauacauuucggccauaaaagugaacggguucacgugcacagguguggugacagaggcugagacuuacacuaacuuugucgguuauguuaccaccacguucaagagaaagcauuuccucccaacaccagaugcauguagagcugcuuacaacuggaaaauggccggugaucccagauaugaagaaucucuucauaauccguacccugacuaccauuggcuucgaacugugaaaaccacgaaggagucucucaucaucauauccccaaguguagcagaccuagacccauaugacaaaucccuucacucgagggucuuuccuagcgggaagugcuugggaauaacaauaucaucuaccuacugcucgacuaaccaugauuacaccaucuggaugcccgagaauguaagauuagggacaucuugugacaucuuuaccaacaguagagggaagagagcauccaaagggagcaagacuugcggauuuguugacaaaaggggcuuguauaagucuuugaagggggcaugcaagcucaaauuauguggaguucugggacuuagacuuauggacggaacgugggucgcgaugccaacaucggaugagaccaaguggugucccccugaucaguugguaaaucuacacgacuuucgcucggacgagaucgaacaucuugucguggaggaguuggucaggaaaagagaggagugucuggaugcccuagaguccaucaugacuaccaagucggugaguuuuagacgucucagccacuugagaaaacuugucccuggauucggaaaagcauacaccauauucaacaaaacccugauggaagccgaugcucacuacaagucaguccggaccuggaaugagaucauccccuccaaggggugucugagaguuggagggaggugucauccucauguaaacggaguguuuuuuaacggcauaauacugggcccugacggccauguucugaucccagagaugcaaucaucccuccuucagcaacauauggaguuguuggaaucaucaguuaucccucugaugcacccuuuagcagacccgucuacaguuuucaaggacggugaugaagcagaggauuuuguugagguucaccuucccgaugugcacaaacagaucucagggguugaccugggucucccuaacuggggaaaguaugucuuaauaauugcagggguauugauugcuaugauauugacaaucuucuuaaugacauguuguggaagagguaaucgacccaaguccacacaacacagucuuggagggauagggaggaaggugucauccacuucccaaagcgggaaggucauaucuucaugggagucauauaaaagcgggggugagaccagacuguga

SEQ ID NO: 63970 - RNA, 1575 nt, Artificial Sequence
  derived and/or modified CDS sequence (wt) from glycoprotein__RABV__LM645043.1
augguuccucaagcucuuuuguuugugccccuucuggcuuuuccaauguguuucgggaaauuccccaucuacacaauaccagacaaacucggucccuggagcccgauugacauacaucaucucagcuguccaaauaacuugguuguggaagacgaaggaugcaccaacuugucggguuucuccuacauggaacuuaaggugggauacauuucggccauaaaagugaacggguucacgugcacagguguggugacagaggcugagacuuacacuaacuuugucgguuauguuaccaccacguucaagagaaagcauuuccgcccaacaccagaugcauguagagcugcuuacaacuggaaaauggccggugaucccagauaugaagaaucucuucauaauccguacccugacuaccauuggcuucgaaccgugaaaaccacgaaggagucucucaucaucauauccccaaguguagcagaccuagacccauaugacaaaucccuucacucgagggucuuuccuagcgggaagugcuugggaauaacaauaucaucuaccuacugcucgacuaaccaugauuacaccaucuggaugcccgagaauguaagauuagggacaucuugugacaucuuuaccaacaguagagggaagagagcauccaaagggagcaagacuugcggauuuguugacgaaagaggcuuguauaagucuuugaagggggcaugcaagcucaaauuauguggaguucugggacuuagacuuauggacggaacgugggucgcgaugccaacaucggaugagaccaaguggugucccccugaucaguugguaaaucugcacgacuuucgcucggacgagaucgaacaucuugucguggaggaguuggucaggaaaagagaggagugucuggaugcccuagaguccaucaugacuaccaagucggugaguuuuagacgucucagccacuugagaaaacuugucccuggauucggaaaagcauacaccauauucaacaaaacccugauggaagccgaugcucacuacaagucaguccggaccuggaaugagaucauccccuccaaggggugucugagaguuggagggaggugucauccucauguaaacggaguguuuuuuaacggcauaauacugggcccugacggucauguucuaaucccagagaugcaaucaucccuccuucagcaacauauggaguuguuggaaucaucaguuaucccucugaugcacccuuuagcagacccgucuacaguuuucaaggacggugaugaagcagaggauuuuguugagguucaccuucccgaugugcacaaacagaucucagggguugaccugggucucccuaacuggggaaaguaugucuuaauaauugcagggguauugauugcuaugauauugacaaucuucuuaaugacauguuguggaagagguaaucgacccaaguccacacaacacagucuuggagggauagggaggaaggugucauccacuucccaaagcgggaaggucauaucuucaugggagucauauaaaagcgggggugagaccagacuguga

SEQ ID NO: 63971 - RNA, 1575 nt, Artificial Sequence
  derived and/or modified CDS sequence (wt) from glycoprotein__RABV__LM645045.1
augguuccucaagcucuuuuguuugugccccuucuggcuuuuccaauguguuucgggaaauuccccaucuacacaauaccagacaaacucggucccuggagcccgauugacauacaucaucucagcuguccaaauaacuugguuguggaagacgaaggaugcaccaacuugucggguuucuccuacauggaacuuaaggugggauacauuucggccauaaaagugaacggguucacgugcacagguguggugacagaggcugagacuuacacuaacuuugucgguuauguuaccaccacguucaagagaaagcauuuccgcccaacaccagaugcauguagagcugcuuacaacuggaaaauggccggugaucccagauaugaagaaucucuucauaauccguacccugacuaccauuggcuucgaaccgugaaaaccacgaaggagucucucaucaucauauccccaaguguagcagaccuagacccauaugacaaaucccuucacucuagggucuuuccuagcgggaagugcuugggaauaacaauaucaucuacuuacugcucgacuaaccaugauuacaccaucuggaugcccgagaauguaagauuagggacaucuugugacaucuuuaccaacaguagagggaagagagcauccaaagggagcaagacuugcggauuuguugacgaaagaggcuuguauaagucuuugaagggggcaugcaagcucaaauuauguggaguucugggacuuagacuuauggacggaacgugggucgcgaugccaacaucggaugagaccaaguggugucccccugaucaguugguaaaucuacacgacuuucgcucggacgagaucgaacaucuugucguggaggaguuggucaggaaaagagaggagugucuggaugcccuagaguccaucaugacuaccaagucggugaguuuuagacgucucagccacuugagaaaacuugucccuggauucggaaaagcauacaccauauucaacaaaacccugauggaagccgaugcucacuacaagucaguccggaccuggaaugagaucauccccuccaaggggugucugagaguuggagggaggugucauccucauguaaacggaguguuuuuuaacggcauaauacugggcccugacggccauguucugaucccagagaugcaaucaucccuccuucagcaacauauggaguuguuggaaucaucaguuaucccucugaugcacccuuuagcagacccgucuacaguuuucaaggacggugaugaagcagaggauuuuguugagguucacuuucccgaugugcacaaacagaucucagggguugaccugggucucccuaacuggggaaaguaugucuuaauaauugcagggguauugauugcuaugauauugacaaucuucuuaaugacauguuguggaagagguaaucgacccaaguccacacaacacagucucggagggauagggaggaaggugucauccacuucccaaagcgggaaggucauaucuucaugggagucauauaaaagcgggggugagaccagacuguga

SEQ ID NO: 63972 - RNA, 1575 nt, Artificial Sequence
  derived and/or modified CDS sequence (wt) from glycoprotein__RABV__LM645049.1
augguuccucaagcucuuuuguuugugccccuucuggcuuuuccaauguguuucgggaaauuccccaucuacacaauaccagacaaacucggucccuggagcccgauugacauacaucaucucagcuguccaaauaacuugguuguggaagacgaaggaugcaccaacuugucggguuucuccuacauggaacuuaaggugggauacauuucggccauaaaagugaacggguucacgugcacagguguggugacagaggcugagacuuacacuaacuuugucgguuauguuaccaccacguucaagagaaagcauuuccgcccaacaccagaugcauguagagcugcuuacaacuggaaaauggccggugaucccagauaugaagaaucucuucauaauccguacccugacuaccauuggcuucgaaccgugaaaaccacgaaggagucucucaucaucauauccccaaguguagcagaccuagacccauaugacaaaucccuucacucuagggucuuuccuagcgggaagugcuugggaauaacaauaucaucuacuuacugcucgacuaaccaugauuacaccaucuggaugcccgagaaugugagauuagggacaucuugugacaucuuuaccaacaguagagggaagagagcauccaaagggagcaagacuugcggauuuguugacgaaagaggcuuguauaagucuuugaagggggcaugcaagcucaaauuauguggaguucugggacuuagacuuauggacggaacgugggucgcgaugccaacaucggaugagaccaaguggugucccccugaucaguugguaaaucuacacgacuuucgcucggacgagaucgaacaucuugucguggaggaguuggucaggaaaagagaggagugucuggaugcccuagaguccaucaugacuaccaagucggugaguuuuagacgucucagccacuugagaaaacuugucccuggauucggaaaagcauacaccauauucaacaaaacccugauggaagccgaugcucacuacaagucaguccggaccuggaaugagaucauccccuccaaggggugucugagaguuggagggaggugucauccucauguaaacggaguguuuuuuaacggcauaauacugggcccugacggccauguucugaucccagagaugcaaucaucccuccuucagcaacauauggaguuguuggaaucaucaguuaucccucugaugcacccuuuagcagacccgucuacaguuuucaaggacggugaugaagcagaggauuuuguugagguucacuuucccgaugugcacaaacagaucucagggguugaccugggucucccuaacuggggaaaguaugucuuaauaauugcagggguauugauugcuaugauauugacaaucuucuuaaugacauguuguggaagagguaaucgacccaaguccacacaacacagucucggagggauagggaggaaggugucauccacuucccaaagcgggaaggucauaucuucaugggagucauauaaaagcgggggugagaccagacuguga

SEQ ID NO: 63973 - RNA, 1575 nt, Artificial Sequence
  derived and/or modified CDS sequence (wt) from glycoprotein__RABV__LM645052.1
augguuccucaagcucuuuuguuugugccccuucuggcuuuuccaauguguuucgggaaauuccccaucuacacaauaccagacaaacucggucccuggagcccgauugacauacaucaucucagcuguccaaauaacuugguuguggaagacgaaggaugcaccaacuugucagguuucuccuacauggaacuuaaggugggauacauuucggccauaaaagugaacggguucacgugcacagguguggugacagaggcugagacuuacacuaacuuugucgguuauguuaccaccacguucaagagaaagcauuuccgcccaacaccagaugcauguagagcugcuuacaacuggaaaauggccggugaucccagauaugaagaaucucuucauaauccguacccugacuaccauuggcuucgaaccgugaaaaccacgaaggagucucucaucaucauauccccaaguguagcagaccuagacccauaugacaaaucccuucacucgagggucuuuccuagcgggaagugcuugggaauaacaauaucaucuaccuacugcucgacuaaccaugauuacaccaucuggaugcccgagaauguaagauuagggacaucuugugacaucuuuaccaacaguagagggaagagagcauccaaagggagcaagacuugcggauuuguugacgaaagaggcuuguauaagucuuugaagggggcaugcaagcucaaauuauguggaguucugggacuuagacuuauggacggaacgugggucgcgaugccaacaucggaugagaccaaguggugucccccugaucaguugguaaaucuacacgacuuucgcucggacgagaucgaacaucuugucguggaggaguuggucaggaaaagagaggagugucuggaugcccuagaguccaucaugacuaccaagucggugaguuuuagacgucucagccacuugagaaaacuugucccuggauucggaaaagcauacaccauauucaacaaaacccugauggaagccgaugcucacuacaagucaguccggaccuggaaugagaucauccccuccaaggggugucugagaguuggagggaggugucauccucauguaaacggaguguuuuuuaacggcauaauacugggcccugacggccauguucugaucccagagaugcaaucaucccuccuucagcaacauauggaguuguuggaaucaucaguuaucccucugaugcacccuuuagcagacccgucuacaguuuucaaggacggugaugaagcagaggauuuuguugagguucaccuucccgaugugcacaaacagaucucagggguugaccugggucucccuaacuggggaaaguaugucuuaauaauugcagggguauugauugcuaugauauugacaaucuucuuaaugacauguuguggaagagguaaucgacccaaguccacacaacacagucuuggagggauagggaggaaggugucauccacuucccaaagcgggaaggucauaucuucaugggagucauauaaaagcgggggugagaccagacuguga

SEQ ID NO: 63974 - RNA, 1575 nt, Artificial Sequence
  derived and/or modified CDS sequence (wt) from glycoprotein__RABV__LM645053.1
augguuccucaagcucuuuuguuugugccccuucuggcuuuuccaauguguuucgggaaauuccccaucuacacaauaccagacaaacucggucccuggagcccgauugacauacaucaucucagcuguccaaauaacuugguuguggaagacgaaggaugcaccaacuugucggguuucuccuacauggaacuuaaggugggauacauuucggccauaaaagugaacggguucacgugcacagguguggugacagaggcugagacuuacacuaacuuugucgguuauguuaccaccacguucaagagaaagcauuuccgcccaacaccagaugcauguagagcugcuuacaacuggaaaauggccggugaucccagauaugaagaaucucuucauaauccguacccugacuaccauuggcuucgaaccgugaaaaccacgaaggagucucucaucaucauauccccaaguguagcagaccuagacccauaugacaaaucccuucacucgagggucuuuccuagcgggaagugcuugggaauaacaauaucaucuacuuacugcucgacuaaccaugauuacaccaucuggaugcccgagaauguaagauuagggacaucuugugacaucuuuaccaacaguagagggaagagagcauccaaagggagcaagacuugcggauuuguugacgaaagaggcuuguauaagucuuugaagggggcaugcaagcucaaauuauguggaguucugggacuuagacuuauggacggaacgugggucgcgaugccaacaucggaugagaccaaguggugucccccugaucaguugguaaaucuacacgacuuucgcucggacgagaucgaacaucuugucguggaggaguuggucaggaaaagagaggagugucuggaugcccuagaguccaucaugacuaccaagucggugaguuuuagacgucucagccacuugagaaaacuugucccuggauucggaaaagcauacaccauauucaacaaaacccugauggaagccgaugcucacuacaagucaguccggaccuggaaugagaucauccccuccaaggggugucugagaguuggagggaggugucauccucauguaaacggaguguuuuuuaacggcauaauacugggcccugacggccauguucugaucccagagaugcaaucaucccuccuucagcaacauauggaguuguuggaaucaucaguuaucccucugaugcacccuuuagcagacccgucuacaguuuucaaggacggugaugaagcagaggauuuuguugagguucaccuucccgaugugcacaaacagaucucagggguugaccugggucucccuaacuggggaaaguaugucuuaauaauugcagggguauugauugcuaugauauugacaaucuucuuaaugacauguuguggaagagguaaucgacccaaguccacacaacacagucucggagggauagggaggaaggugucauccacuucccaaagcgggaaggucauaucuucaugggagucauauaaaagcgggggugagaccagacuguga

SEQ ID NO: 63975 - RNA, 1575 nt, Artificial Sequence
  derived and/or modified CDS sequence (wt) from glycoprotein__RABV__LM645056.1
augguuccucaagcucuuuuguuugugccccuucuggcuuuuccaauguguuucgggaaauuccccaucuacacaauaccagacaaacucggucccuggagcccgauugacauacaucaucucagcuguccaaauaacuugguuguggaagacgaaggaugcaccaacuugucggguuucuccuacauggaacuuaaggugggauacauuucggccauaaaagugaacggguucacgugcacagguguggugacagaggcugagacuuacacuaacuuugucgguuauguuaccaccacguucaagagaaagcauuuccgcccaacaccagaugcauguagagcugcuuacaacuggaaaauggccggugaucccagauaugaagaaucucuucauaauccguacccugacuaccauuggcuucgaaccgugaaaaccacgaaggagucucucaucaucauauccccaaguguagcagaccuagacccauaugacaaaucccuucacucgagggucuuuccuagcgggaagugcuugggaauaacaauaucaucuaccuacugcucgacuaaccaugauuacaccaucuggaugcccgagaauguaagauuagggacaucuugugacaucuuuaccaacaguagagggaagagagcauccaaagggagcaagacuugcggauuuguugacgaaagaggcuuguauaagucuuugaagggggcaugcaagcucaaauuauguggaguucugggacuuagacuuauggacggaacgugggucgcgaugccaacaucggaugagaccaaguggugucccccugaucaguugguaaaucuacacgacuuucgcucggacgagaucgaacaucuugucguggaggaguuggucaggaaaagagaggagugucuggaugcccuagaguccaucaugacuaccaagucggugaguuuuagacgucucagccacuugagaaaacuugucccuggauucggaaaagcauacaccauauucaacaaaacccugauggaagccgaugcucacuacaagucaguccggaccuggaaugagaucauccccuccaaggggugucugagaguuggagggaggugucauccucauguaaacggaguguuuuuuaacggcauaauacugggcccugacggucauguucuaaucccagagaugcaaucaucccuccuucagcaacauauggaguuguuggaaucaucaguuaucccucugaugcacccuuuagcagacccgucuacaguuuucaaggacggugaugaagcagaggauuuuguugagguucaccuucccgaugugcacaaacagaucucagggguugaccugggucucccuaacuggggaaaguaugucuuaauaauugcagggguauugauugcuaugauauugacaaucuucuuaaugacauguuguggaagagguaaucgacccaaguccacacaacacagucuuggagggauagggaggaaggugucauccacuucccaaagcgggaaggucauaucuucaugggagucauauaaaagcgggggugagaccagacuguga

SEQ ID NO: 63976 - RNA, 1575 nt, Artificial Sequence
  derived and/or modified CDS sequence (wt) from glycoprotein__RABV__LN713547.1
augguuccucaggcucuccuguuuguaccccuucugguuuuuccauuguguuuugggaaauucccuauuuacacgauaccagacaagcuuggucccuggagcccgauugacauacaucaccucagcugcccaaacaauuugguaguggaggacgaaggaugcaccaaccugucaggguucuccuacauggaacuuaaaguuggaaacaucuuagccauaaaaaugaacggguucacuugcacaggcguugugacggaggcugaaaccuacacuaacuucguugguuaugucacaaccacguucaaaagaaagcauuuccgcccaacaccagaugcauguagagccgcguacaacuggaagauggccggugaccccagauaugaagagucucuacacaauccguacccugacuaccgcuggcuucgaacuguaaaaaccaccaaggagucucucguuaucauaucuccaaguguggcagauuuggacccauaugacagaucccuucacucgagggucuucccuagcgggaagugcucaggaguagcggugucuucuaccuacugcuccacuaaccacgauuacaccauuuggaugcccgagaguccgagacuagggaugucuugugacauuuuuaccaauaguagagggaagagagcauccaaagggagugagacuugcggcuuuguagaugaaagaggccuauauaagucuuuaaaaggagcaugcaaacucaaguuauguggaguucuaggacuuagacuuauggauggaacaugggucucgaugcaaacaucaaaugaaaccaaauggugcccucccgaucaguuggugaaccugcacgacuuucgcucagacgaaauugagcaccuuguuguagaggaguuggucaggaagagagaggagugucuggaugcacuagaguccaucaugacaaccaagucagugaguuucagacgucucagucauuuaagaaaacuugucccuggguuuggaaaagcauauaccauacucaacaagaccuugauggaagccgaugcucacuacaagucagucagaacuuggaaugagauccucccuucaaaaggguguuuaagaguuggggggaggugucauccucaugugaacgggguguuuuucaaugguauaauauuaggaccugacggcaaugucuuaaucccagagaugcaaucaucccuccuccagcaacauauggaguuguuggaauccucgguuaucccccuugugcacccccuggcagacccgucuaccguuuucaaggacggugacgaggcugaggauuuuguugaaguucaccuucccgaugugcacaaucaggucucaggaguugacuugggucucccgaacugggggaaguauguauuacugagugcaggggcccugacugccuugauguugauaauuuuccugaugacauguuguagaagaguuaaucgaucagaaccuacgcaacacaaucucagagggacagggagggaggugucagucacuccccaaagcgggaagaucauaucuucaugggaaucacacaagagugggggugagaccagacuguga

SEQ ID NO: 63977 - RNA, 1575 nt, Artificial Sequence
  derived and/or modified CDS sequence (wt) from glycoprotein__RABV__LN713552.1
augguuccucaggcucuccuguuuguaccccuucugguuuuuccauuguguuuugggaaauucccuauuuacacgauaccagacaagcuuggucccuggagcccgauugacauacaucaccucagcugcccaaacaauuugguaguggaggacgaaggaugcaccaaccugucaggguucuccuacauggaacuuaaaguuggaaacaucuuagccauaaaaaugaacggguucacuugcacaggcguugugacggaggcugaaaccuacacuaacuucguugguuaugucacaaccacguucaaaagaaagcauuuccgcccaacaccagaugcauguagagccgcguacaacuggaagauggccggugaccccagauaugaagagucucuacacaauccguacccugacuaccgcuggcuucgaacuguaaaaaccaccaaggagucucucguuaucauaucuccaaguguggcagauuuggacccauaugacagaucccuucacucgagggucuucccuagcgggaagugcucaggaguagcggugucuucuaccuacugcuccacuaaccacgauuacaccauuuggaugcccgagaguccgagacuagggaugucuugugacauuuuuaccaauaguagagggaagagagcauccaaagggagugagacuugcggcuuuguagaugaaagaggccuauauaagucuuuaaaaggagcaugcaaacucaaguuauguggaguucuaggacuuagacuuauggauggaacaugggucucgaugcaaacaucaaaugaaaccaaauggugcccucccgaucaguuggugaaccugcacgacuuucgcucagacgaaauugagcaccuuguuguagaggaguuggucaggaagagagaggagugucuggaugcacuagaguccaucaugacaaccaagucagugaguuucagacgucucagucauuuaagaaaacuugucccuggguuuggaaaagcauauaccauacucaacaagaccuugauggaagccgaugcucacuacaagucagucagaacuuggaaugagauccucccuucaaaaggguguuuaagaguuggggggaggugucauccucaugugaacgggguguuuuucaaugguauaauauuaggaccugacggcaaugucuuaaucccagagaugcaaucaucccuccuccagcaacauauggaguuguuggaauccucgguuaucccccuugugcacccccuggcagacccgucuaccguuuucaaggacggugacgaggcugaggauuuuguugaaguucaccuucccgaugugcacaaucaggucucaggaguugacuugggucucccgaacugggggaaguauguauuacugagugcaggggcccugacugccuugauguugauaauuuuccugaugacauguuguagaagaguuaaucgaucagaaccuacgcaacacaaucucagagggacagggagggaggugucagucacuccccaaagcgggaagaucauaucuucaugggaaucacacaagagugggggugagaccagacuguaa

SEQ ID NO: 63978 - RNA, 1575 nt, Artificial Sequence
  derived and/or modified CDS sequence (wt) from glycoprotein__RABV__LN713556.1
augguuccucaggcucuccuguuuguaccccuucugguuuuuccauuguguuuugggaaauucccuauuuacacgauaccagacaagcuuggucccuggagcccgauugacauacaucaccucagcugcccaaacaauuugguaguggaggacgaaggaugcaccaaccugucaggguucuccuacauggaacuuaaaguuggaaacaucuuagccauaaaaaugaacggguucacuugcacaggcguugugacggaggcugaaaccuacacuaacuucguugguuaugucacaaccacguucaaaagaaagcauuuccgcccaacaccagaugcauguagagccgcguacaacuggaagauggccggugaccccagauaugaagagucucuacacaauccguacccugacuaccgcuggcuucgaacuguaaaaaccaccaaggagucucucguuaucauaucuccaaguguggcagauuuggacccauaugacagaucccuucacucgagggucuucccuagcgggaagugcucaggaguagcggugucuucuaccuacugcuccacuaaccacgauuacaccauuuggaugcccgagaauccgagacuagggaugucuugugacauuuuuaccaauaguagagggaagagagcauccaaagggagugagacuugcggcuuuguagaugaaagaggccuauauaagucuuuaaaaggagcaugcaaacucaaguuauguggaguucuaggacuuagacuuauggauggaacaugggucucgaugcaaacaucaaaugaaaccaaauggugcccucccgauaaguuggugaaccugcacgacuuucgcucagacgaaauugagcaccuuguuguagaggaguuggucaggaagagagaggagugucuggaugcacuagaguccaucaugacaaccaagucagugaguuucagacgucucagucauuuaagaaaacuugucccuggguuuggaaaagcauauaccauacucaacaagaccuugauggaagccgaugcucacuacaagucagucagaacuuggaaugagauccucccuucaaaaggguguuuaagaguuggggggaggugucauccucaugugaacgggguguuuuucaaugguauaauauuaggaccugacggcaaugucuuaaucccagagaugcaaucaucccuccuccagcaacauauggaguuguuggaauccucgguuaucccccuugugcacccccuggcagacccgucuaccguuuucaaggacggugacgaggcugaggauuuuguugaaguucaccuucccgaugugcacaaucaggucucaggaguugacuugggucucccgaacugggggaaguauguauuacugagugcaggggcccugacugccuugauguugauaauuuuccugaugacauguuguagaagaguuaaucgaucagaaccuacgcaacacaaucucagagggacagggagggaggugucagucacuccccaaagcgggaagaucauaucuucaugggaaucacacaagagugggggugagaccagacuguga

SEQ ID NO: 63979 - RNA, 1575 nt, Artificial Sequence
  derived and/or modified CDS sequence (wt) from glycoprotein__RABV__LN713559.1
augguuccucaggcucuccuguuuguaccccuucugguuuuuccauuguguuuugggaaauucccuauuuacacgauaccagacaagcuuggucccuggagcccgauugacauacaucaccucagcugcccaaacaauuugguaguggaggacgaaggaugcaccaaccugucaggguucuccuacauggaacuuaaaguuggaaacaucuuagccauaaaaaugaacggguucacuugcacaggcguugugacggaggcugaaaccuacacuaacuucguugguuaugucacaaccacguucaaaagaaagcauuuccgcccaacaccagaugcauguagagccgcguacaacuggaagauggccggugaccccagauaugaagagucucuacacaauccguacccugacuaccgcuggcuucgaacuguaaaaaccaccaaggagucucucguuaucauaucuccaaguguggcagauuuggacccauaugacagaucccuucacucgagggucuucccuagcgggaagugcucaggaguagcggugucuucuaccuacugcuccacuaaccacgauuacaccauuuggaugcccgagaguccgagacuagggaugucuugugacauuuuuaccaauaguagagggaagagagcauccaaagggagugagacuugcggcuuuguagaugaaagaggccuauauaagucuuuaaaaggagcaugcaaacucaaguuauguggaguucuaggacuuagacuuauggauggaacaugggucucgaugcaaacaucaaaugaaaccaaauggugcccucccgaucaguuggugaaccugcacgacuuucgcucagacgaaauugagcaccuuguuguagaggaguuggucaggaagagagaggagugucuggaugcacuagaguccaucaugacaaccaagucagugaguuucagacgucucagucauuuaagaaaacuugucccuggguuuggaaaagcauauaccauacucaacaagaccuugauggaagccgaugcucacuacaagucagucagaacuuggaaugagauccucccuucaaaaggguguuuaagaguuggggggaggugucauccucaugugaacgggguguuuuucaaugguauaauauuaggaccugacggcaaugucuuaaucccagagaugcaaucaucccuccuccagcaacauauggaguuguuggaauccucgguuaucccccuugugcacccccuggcagacccgucuaccguuuucaaggacggugacgaggcugaggauuuuguugaaguucaccuucccgaugugcacaaucaggucucaggaguugacuugggucucccgaacugggggaaguauguauuacugagugcaggggcccugacugccuugauguugauaauuuuccugaugacauguuguagaagagucaaucgaucagaaccuacgcaacacaaucucagagggacagggagggaggugucagucacuccccaaagcgggaagaucauaucuucaugggaaucacacaagagugggggugagaccagacuguaa

SEQ ID NO: 63980 - RNA, 1575 nt, Artificial Sequence
  derived and/or modified CDS sequence (wt) from glycoprotein__RABV__LN713560.1
augguuccucaggcucuccuguuuguaccccuucugguuuuuccauuguguuuugggaaauucccuauuuacacgauaccagacaagcuuggucccuggagcccgauugacauacaucaccucagcugcccaaacaauuugguaguggaggacgaaggaugcaccaaccugucaggguucuccuacauggaacuuaaaguuggaaacaucuuagccauaaaagugaacggguucacuugcacaggcguugugacggaggcugaaaccuacacuaacuucguugguuaugucacaaccacguucaaaagaaagcauuuccgcccaacaccagaugcauguagagccgcguacaacuggaagauggccggugaccccagauaugaagagucucuacacaauccguacccugacuaccgcuggcuucgaacuguaaaaaccaccaaggagucucucguuaucauaucuccaaguguggcagauuuggacccauaugacagaucccuucacucgagggucuucccuagcgggaagugcucaggaguagcggugucuucuaccuacugcuccacuaaccacgauuacaccauuuggaugcccgagaguccgagacuagggaugucuugugacauuuuuaccaauaguagagggaagagagcauccaaagggagugagacuugcggcuuuguagaugaaagaggccuauauaagucuuuaaaaggagcaugcaaacucaaguuauguggaguucuaggacuuagacuuauggauggaacaugggucucgaugcaaacaucaaaugaaaccaaauggugcccucccgaucaguuggugaaccugcacgacuuucgcucagacgaaauugagcaccuuguuguagaggaguuggucaggaagagagaggagugucuggaugcacuagaguccaucaugacaaccaagucagugaguuucagacgucucagucauuuaagaaaacuugucccuggguuuggaaaagcauauaccauacucaacaagaccuugauggaagccgaugcucacuacaagucagucagaacuuggaaugagauccucccuucaaaaggguguuuaagaguuggggggaggugucauccucaugugaacgggguguuuuucaaugguauaauauuaggaccugacggcaaugucuuaaucccagagaugcaaucaucccuccuccagcaacauauggaguuguuggaauccucgguuaucccccuugugcacccccuggcagacccgucuaccguuuucaaggacggugacgaggcugaggauuuuguugaaguucaccuucccgaugugcacaaucaggucucaggaguugacuugggucucccgaacugggggaaguauguauuacugagugcaggggcccugacugccuugauguugauaauuuuccugaugacauguuguagaagagucaaucgaucagaaccuacgcaacacaaucucagagggacagggagggaggugucagucacuccccaaagcgggaagaucauaucuucaugggaaucacacaagagugggggugagaccagacuguaa

SEQ ID NO: 63981 - RNA, 1575 nt, Artificial Sequence
  derived and/or modified CDS sequence (wt) from glycoprotein__RABV__LN713572.1
augguuccucaggcucuccuguuuguaccccuucugguuuuuccauuguguuuugggaaauucccuauuuacacgauaccagacaagcuuggucccuggaguccgauugacauacaucaccucagcugcccaaacaauuugguaguggaggacgaaggaugcaccaaccugucaggguucuccuacauggaacuuaaaguuggauacaucuuagccauaaaagugaacggguucacuugcacaggcguugugacggaggcugaaaccuacacuaacuucguugguuaugucacaaccacguucaaaagaaagcauuuccgcccaacaccagaugcauguagagccgcguacaacuggaagauggccggugaccccagauaugaagagucucuacacaauccguacccugacuaccgcuggcuucgaacuguaaaaaccaccaaggagucucucguuaucauaucuccaaguguggcagauuuggacccauaugacagaucccuucacucgagggucuucccuagcgggaagugcucaggaguagcggugucuucuaccuacugcuccacuaaccacgauuacaccauuuggaugcccgagaauccgagacuagggaugucuugugacauuuuuaccaauaguagagggaagagagcauccaaagggagugagacuugcggcuuuguagaugaaagaggccuauauaagucuuuaaaaggagcaugcaaacucaaguuauguggaguucuaggacuuagacuuauggauggaacaugggucucgaugcaaacaucaaaugaaaccaaauggugcccucccgauaaguuggugaaccugcacgacuuucgcucagacgaaauugagcaccuuguuguagaggaguuggucaggaagagagaggagugucuggaugcacuagaguccaucaugacaaccaagucagugaguuucagacgucucagucauuuaagaaaacuugucccuggguuuggaaaagcauauaccauacucaacaagaccuugauggaagccgaugcucacuacaagucagucagaacuuggaaugagauccucccuucaaaaggguguuuaagaguuggggggaggugucauccucaugugaacgggguguuuuucaaugguauaauauuaggaccugacggcaaugucuuaaucccagagaugcaaucaucccuccuccagcaacauauggaguuguuggaauccucgguuaucccccuugugcacccccuggcagacccgucuaccguuuucaaggacggugacgaggcugaggauuuuguugaaguucaccuucccgaugugcacaaucaggucucaggaguugacuugggucucccgaacugggggaaguauguauuacugagugcaggggcccugacugccuugauguugauaauuuuccugaugacauguuguagaagagucaaucgaucagaaccuacgcaacacaaucucagagggacagggagggaggugucagucacuccccaaagcgggaagaucauaucuucaugggaaucacacaagagugggggugagaccagacuguaa

SEQ ID NO: 63982 - RNA, 1575 nt, Artificial Sequence
  derived and/or modified CDS sequence (wt) from glycoprotein__RABV__LN713578.1
augguuccucaggcucuccuguuuguaccccuucugguuuuuccauuguguuuugggaaauucccuauuuacacgauaccagacaagcuuggucccuggaguccgauugacauacaucaccucagcugcccaaacaauuugguaguggaggacgaaggaugcaccaaccugucaggguucuccuacauggaacuuaaaguuggauacaucuuagccauaaaaaugaacggguucacuugcacaggcguugugacggaggcugaaaccuacacuaacuucguugguuaugucacaaccacguucaaaagaaagcauuuccgcccaacaccagaugcauguagagccgcguacaacuggaagauggccggugaccccagauaugaagagucucuacacaauccguacccugacuaccgcuggcuucgaacuguaaaaaccaccaaggagucucucguuaucauaucuccaaguguggcagauuuggacccauaugacagaucccuucacucgagggucuucccuagcgggaagugcucaggaguagcggugucuucuaccuacugcuccacuaaccacgauuacaccauuuggaugcccgagaauccgagacuagggaugucuugugacauuuuuaccaauaguagagggaagagagcauccaaagggagugagacuugcggcuuuguagaugaaagaggccuauauaagucuuuaaaaggagcaugcaaacucaaguuauguggaguucuaggacuuagacuuauggauggaacaugggucucgaugcaaacaucaaaugaaaccaaauggugcccucccgauaaguuggugaaccugcacgacuuucgcucagacgaaauugagcaccuuguuguagaggaguuggucaggaagagagaggagugucuggaugcacuagaguccaucaugacaaccaagucagugaguuucagacgucucagucauuuaagaaaacuugucccuggguuuggaaaagcauauaccauauucaacaagaccuugauggaagccgaugcucacuacaagucagucagaacuuggaaugagauccucccuucaaaaggguguuuaagaguuggggggaggugucauccucaugugaacgggguguuuuucaaugguauaauauuaggaccugacggcaaugucuuaaucccagagaugcaaucaucccuccuccagcaacauauggaguuguuggaauccucgguuaucccccuugugcacccccuggcagacccgucuaccguuuucaaggacggugacgaggcugaggauuuuguugaaguucaccuucccgaugugcacaaucaggucucaggaguugacuugggucucccgaacugggggaaguauguauuacugagugcaggggcccugacugccuugauguugauaauuuuccugaugacauguuguagaagagucaaucgaucagaaccuacgcaacacaaucucagagggacagggagggaggugucagucacuccccaaagcgggaagaucauaucuucaugggaaucacacaagagugggggugagaccagacuguaa

SEQ ID NO: 63983 - RNA, 1575 nt, Artificial Sequence
  derived and/or modified CDS sequence (wt) from glycoprotein__RABV__LN713589.1
augguuccucaggcucuccuguuuguaccccuucugguuuuuccauuguguuuugggaaauucccuauuuacacgauaccagacaagcuuggucccuggagcccgauugacauacaucaccucagcugcccaaacaauuugguaguggaggacgaaggaugcaccaaccugucaggguucuccuacauggaacuuaaaguuggaaacaucuuagccauaaaagugaacggguucacuugcacaggcguugugacggaggcugaaaccuacacuaacuucguugguuaugucacaaccacguucaaaagaaagcauuuccgcccaacaccagaugcauguagagccgcguacaacuggaagauggccggugaccccagauaugaagagucucuacacaauccguacccugacuaccgcuggcuucgaacuguaaaaaccaccaaggagucucucguuaucauaucuccaaguguggcagauuuggacccauaugacagaucccuucacucgagggucuucccuagcgggaagugcucaggaguagcggugucuucuaccuacugcuccacuaaccacgauuacaccauuuggaugcccgagaguccgagacuagggaugucuugugacauuuuuaccaauaguagagggaagagagcauccaaagggagugagacuugcggcuuuguagaugaaagaggccuauauaagucuuuaaaaggagcaugcaaacucaaguuauguggaguucuaggacuuagacuuauggauggaacaugggucucgaugcaaacaucaaaugaaaccaaauggugcccucccgaucaguuggugaaccugcacgacuuucgcucagacgaaauugagcaccuuguuguagaggaguuggucaggaagagagaggagugucuggaugcacuagaguccaucaugacaaccaagucagugaguuucagacgucucagucauuuaagaaaacuugucccuggguuuggaaaagcauauaccauacucaacaagaccuugauggaagccgaugcucacuacaagucagucagaacuuggaaugagauccucccuucaaaaggguguuuaagaguuggggggaggugucauccucaugugaacgggguguuuuucaaugguauaauauuaggaccugacggcaaugucuuaaucccagagaugcaaucaucccuccuccagcaacauauggaguuguuggaauccucgguuaucccccuugugcacccccuggcagacccgucuaccguuuucaaggacggugacgaggcugaggauuuuguugaaguucaccuucccgaugugcacaaucaggucucaggaguugacuugggucucccgaacugggggaaguauguauuacugagugcaggggcccugacugccuugauguugauaauuuuccugaugacauguuguagaagaguuaaucgaucagaaccuacgcaacacaaucucagagggacagggagggaggugucagucacuccccaaagcgggaagaucauaucuucaugggaaucacacaagagugggggugagaccagacuguga

SEQ ID NO: 63984 - RNA, 1575 nt, Artificial Sequence
  derived and/or modified CDS sequence (wt) from glycoprotein__RABV__LN713600.1
augguuccucaggcucuccuguuuguaccccuucugguuuuuccauuguguuuugggaaauucccuauuuacacgauaccagacaagcuuggucccuggagcccgauugacauacaucaccucagcugcccaaacaauuugguaguggaggacgaaggaugcaccaaccugucaggguucuccuacauggaacuuaaaguuggaaacaucuuagccauaaaaaugaacggguucacuugcacaggcguugugacggaggcugaaaccuacacuaacuucguugguuaugucacaaccacguucaaaagaaagcauuuccgcccaacaccagaugcauguagagccgcguacaacuggaagauggccggugaccccagauaugaagagucucuacacaauccguacccugacuaccgcuggcuucgaacuguaaaaaccaccaaggagucucucguuaucauaucuccaaguguggcagauuuggacccauaugacagaucccuucacucgagggucuucccuagcgggaagugcucaggaguagcggugucuucuaccuacugcuccacuaaccacgauuacaccauuuggaugcccgagaguccgagacuagggaugucuugugacauuuuuaccaauaguagagggaagagagcauccaaagggagugagacuugcggcuuuguagaugaaagaggccuauauaagucuuuaaaaggagcaugcaaacucaaguuauguggaguucuaggacuuagacuuauggauggaacaugggucucgaugcaaacaucaaaugaaaccaaauggugcccucccgaucaguuggugaaccugcacgacuuucgcucagacgaaauugagcaccuuguuguagaggaguuggucaggaagagagaggagugucuggaugcacuagaguccaucaugacaaccaagucagugaguuucagacgucucagucauuuaagaaaacuugucccuggguuuggaaaagcauauaccauacucaacaagaccuugauggaagccgaugcucacuacaagucagucagaacuuggaaugagauccucccuucaaaaggguguuuaagaguuggggggaggugucauccucaugugaacgggguguuuuucaaugguauaauauuaggaccugacggcaaugucuuaaucccagagaugcaaucaucccuccuccagcaacauauggaguuguuggaauccucgguuaucccccuugugcacccccuggcagacccgucuaccguuuucaaggacggugacgaggcugaggauuuuguugaaguucaccuucccgaugugcacaaucaggucucaggaguugacuugggucucccgaacugggggaaguauguauuacugagugcaggggcccugacugccuugauguugauaauuuuccugaugacauguuguagaagagucaaucgaucagaaccuacgcaacacaaucucagagggacagggagggaggugucagucacuccccaaagcgggaagaucauaucuucaugggaaucacacaagagugggggugagaccagacuguag

SEQ ID NO: 63985 - RNA, 1575 nt, Artificial Sequence
  derived and/or modified CDS sequence (wt) from glycoprotein__RABV__LN713602.1
augguuccucaggcucuccuguuuguaccccuucugguuuuuccauuguguuuugggaaauucccuauuuacacgauaccagacaagcuuggucccuggagcccgauugacauacaucaccucagcugcccaaacaauuugguaguggaggacgaaggaugcaccaaccugucaggguucuccuacauggaacuuaaaguuggaaacaucuuagccauaaaaaugaacggguucacuugcacaggcguugugacggaggcugaaaccuacacuaacuucguugguuaugucacaaccacguucaaaagaaagcauuuccgcccaacaccagaugcauguagagccgcguacaacuggaagauggccggugaccccagauaugaagagucucuacacaauccguacccugacuaccgcuggcuucgaacuguaaaaaccaccaaggagucucucguuaucauaucuccaaguguggcagauuuggacccauaugacagaucccuucacucgagggucuucccuagcgggaagugcucaggaguagcggugucuucuaccuacugcuccacuaaccacgauuacaccauuuggaugcccgagaauccgagacuagggaugucuugugacauuuuuaccaauaguagagggaagagagcauccaaagggagugagacuugcggcuuuguagaugaaagaggccuauauaagucuuuaaaaggagcaugcaaacucaaguuauguggaguucuaggacuuagacuuauggauggaacaugggucucgaugcaaacaucaaaugaaaccaaauggugcccucccgaucaguuggugaaccugcacgacuuucgcucagacgaaauugagcaccuuguuguagaggaguuggucaggaagagagaggagugucuggaugcacuagaguccaucaugacaaccaagucagugaguuucagacgucucagucauuuaagaaaacuugucccuggguuuggaaaagcauauaccauacucaacaagaccuugauggaagccgaugcucacuacaagucagucagaacuuggaaugagauccucccuucaaaaggguguuuaagaguuggggggaggugucauccucaugugaacgggguguuuuucaaugguauaauauuaggaccugacggcaaugucuuaaucccagagaugcaaucaucccuccuccagcaacauauggaguuguuggaauccucgguuaucccccuugugcacccccuggcagacccgucuaccguuuucaaggacggugacgaggcugaggauuuuguugaaguucaccuucccgaugugcacaaucaggucucaggaguugacuugggucucccgaacugggggaaguauguauuacugagugcaggggcccugacugccuugauguugauaauuuuccugaugacauguuguagaagaguuaaucgaucagaaccuacgcaacacaaucucagagggacagggagggaggugucagucacuccccaaagcgggaagaucauaucuucaugggaaucacacaagagugggggugagaccagacuguga

SEQ ID NO: 63986 - RNA, 1575 nt, Artificial Sequence
  derived and/or modified CDS sequence (wt) from glycoprotein__RABV__LN713608.1
augguuccucaggcucuccuguuuguaccccuucugguuuuuccauuguguuuugggaaauucccuauuuacacgauaccagacaagcuuggucccuggaguccgauugacauacaucaccucagcugcccaaacaauuugguaguggaggacgaaggaugcaccaaccugucaggguucuccuacauggaacuuaaaguuggauacaucuuagccauaaaagugaacggguucacuugcacaggcguugugacggaggcugaaaccuacacuaacuucguugguuaugucacaaccacguucaaaagaaagcauuuccgcccaacaccagaugcauguagagccgcguacaacuggaagauggccggugaccccagauaugaagagucucuacacaauccguacccugacuaccgcuggcuucgaacuguaaaaaccaccaaggagucucucguuaucauaucuccaaguguggcagauuuggacccauaugacagaucccuucacucgagggucuucccuagcgggaagugcucaggaguagcggugucuucuaccuacugcuccacuaaccacgauuacaccauuuggaugcccgagaauccgagacuagggaugucuugugacauuuuuaccaauaguagagggaagagagcauccaaagggagugagacuugcggcuuuguagaugaaagaggccuauauaagucuuuaaaaggagcaugcaaacucaaguuauguggaguucuaggacuuagacuuauggauggaacaugggucucgaugcaaacaucaaaugaaaccaaauggugcccucccgaucaguuggugaaccugcacgacuuucgcucagacgaaauugagcaccuuguuguagaggaguuggucaggaagagagaggagugucuggaugcacuagaguccaucaugacaaccaagucagugaguuucagacgucucagucauuuaagaaaacuugucccuggguuuggaaaagcauauaccauauucaacaagaccuugauggaagccgaugcucacuacaagucagucagaacuuggaaugagauccucccuucaaaaggguguuuaagaguuggggggaggugucauccucaugugaacgggguguuuuucaaugguauaauauuaggaccugacggcaaugucuuaaucccagagaugcaaucaucccuccuccagcaacauauggaguuguuggaauccucgguuaucccccuugugcacccccuggcagacccgucuaccguuuucaaggacggugacgaggcugaggauuuuguugaaguucaccuucccgaugugcacaaucaggucucaggaguugacuugggucucccgaacugggggaaguauguauuacugagugcaggggcccugacugccuugauguugauaauuuuccugaugacauguuguagaagagucaaucgaucagaaccuacgcaacacaaucucagagggacagggagggaggugucagucacuccccaaagcgggaagaucauaucuucaugggaaucacacaagagugggggugagaccagacuguaa

SEQ ID NO: 63987 - RNA, 1575 nt, Artificial Sequence
  derived and/or modified CDS sequence (wt) from glycoprotein__RABV__LN713628.1
augguuccucaggcucuccuguuuguaccccuucugguuuuuccauuguguuuugggaaauucccuauuuacacgauaccagacaagcuuggucccuggaguccgauugacauacaucaccucagcugcccaaacaauuugguaguggaggacgaaggaugcaccaaccugucaggguucuccuacauggaacuuaaaguuggauacaucuuagccauaaaaaugaacggguucacuugcacaggcguugugacggaggcugaaaccuacacuaacuucguugguuaugucacaaccacguucaaaagaaagcauuuccgcccaacaccagaugcauguagagccgcguacaacuggaagauggccggugaccccagauaugaagagucucuacacaauccguacccugacuaccgcuggcuucgaacuguaaaaaccaccaaggagucucucguuaucauaucuccaaguguggcagauuuggacccauaugacagaucccuucacucgagggucuucccuagcgggaagugcucaggaguagcggugucuucuaccuacugcuccacuaaccacgauuacaccauuuggaugcccgagaauccgagacuagggaugucuugugacauuuuuaccaauaguagagggaagagagcauccaaagggagugagacuugcggcuuuguagaugaaagaggccuauauaagucuuuaaaaggagcaugcaaacucaaguuauguggaguucuaggacuuagacuuauggauggaacaugggucucgaugcaaacaucaaaugaaaccaaauggugcccucccgaucaguuggugaaccugcacgacuuucgcucagacgaaauugagcaccuuguuguagaggaguuggucaggaagagagaggagugucuggaugcacuagaguccaucaugacaaccaagucagugaguuucagacgucucagucauuuaagaaaacuugucccuggguuuggaaaagcauauaccauauucaacaagaccuugauggaagccgaugcucacuacaagucagucagaacuuggaaugagauccucccuucaaaaggguguuuaagaguuggggggaggugucauccucaugugaacgggguguuuuucaaugguauaauauuaggaccugacggcaaugucuuaaucccagagaugcaaucaucccuccuccagcaacauauggaguuguuggaauccucgguuaucccccuugugcacccccuggcagacccgucuaccguuuucaaggacggugacgaggcugaggauuuuguugaaguucaccuucccgaugugcacaaucaggucucaggaguugacuugggucucccgaacugggggaaguauguauuacugagugcaggggcccugacugccuugauguugauaauuuuccugaugacauguuguagaagagucaaucgaucagaaccuacgcaacacaaucucagagggacagggagggaggugucagucacuccccaaagcgggaagaucauaucuucaugggaaucacacaagagugggggugagaccagacuguaa

SEQ ID NO: 63988 - RNA, 1575 nt, Artificial Sequence
  derived and/or modified CDS sequence (wt) from glycoprotein__RABV__LN713639.1
augguuccucaggcucuccuguuuguaccccuucugguuuuuccauuguguuuugggaaauucccuauuuacacgauaccagacaagcuuggucccuggaguccgauugacauacaucaccucagcugcccaaacaauuugguaguggaggacgaaggaugcaccaaccugucaggguucuccuacauggaacuuaaaguuggauacaucuuagccauaaaagugaacggguucacuugcacaggcguugugacggaggcugaaaccuacacuaacuucguugguuaugucacaaccacguucaaaagaaagcauuuccgcccaacaccagaugcauguagagccgcguacaacuggaagauggccggugaccccagauaugaagagucucuacacaauccguacccugacuaccgcuggcuucgaacuguaaaaaccaccaaggagucucucguuaucauaucuccaaguguggcagauuuggacccauaugacagaucccuucacucgagggucuucccuagcgggaagugcucaggaguagcggugucuucuaccuacugcuccacuaaccacgauuacaccauuuggaugcccgagaauccgagacuagggaugucuugugacauuuuuaccaauaguagagggaagagagcauccaaagggagugagacuugcggcuuuguagaugaaagaggccuauauaagucuuuaaaaggagcaugcaaacucaaguuauguggaguucuaggacuuagacuuauggauggaacaugggucucgaugcaaacaucaaaugaaaccaaauggugcccucccgaucaguuggugaaccugcacgacuuucgcucagacgaaauggagcaccuuguuguagaggaguuggucaggaagagagaggagugucuggaugcacuagaguccaucaugacaaccaagucagugaguuucagacgucucagucauuuaagaaaacuugucccuggguuuggaaaagcauauaccauacucaacaagaccuugauggaagccgaugcucacuacaagucagucagaacuuggaaugagauccucccuucaaaaggguguuuaagaguuggggggaggugucauccucaugugaacgggguguuuuucaaugguauaauauuaggaccugacggcaaugucuuaaucccagagaugcaaucaucccuccuccagcaacauauggaguuguuggaauccucgguuaucccccuugugcacccccuggcagacccgucuaccguuuucaaggacggugacgaggcugaggauuuuguugaaguucaccuucccgaugugcacaaucaggucucaggaguugacuugggucucccgaacugggggaaguauguauuacugagugcaggggcccugacugccuugauguugauaauuuuccugaugacauguuguagaagagucaaucgaucagaaccuacgcaacacaaucucagagggacagggagggaggugucagucacuccccaaagcgggaagaucauaucuucaugggaaucacacaagagugggggugagaccagacuguaa

SEQ ID NO: 63989 - RNA, 1575 nt, Artificial Sequence
  derived and/or modified CDS sequence (wt) from glycoprotein__RABV__LN713660.1
augguuccucaggcucuccuguuuguaccccuucugguuuuuccauuguguuuugggaaauucccuauuuacacgauaccagacaagcuuggucccuggagcccgauugacauacaucaccucagcugcccaaacaauuugguaguggaggacgaaggaugcaccaaccugucaggguucuccuacauggaacuuaaaguuggauacaucucagccauaaaaaugaacggguucacuugcacaggcguugugacggaggcugaaaccuacacuaacuucguugguuaugucacaaccacguucaaaagaaagcauuuccgcccaacaccagaugcauguagagccgcguacaacuggaagauggccggugaccccagauaugaagagucucuacacaauccguacccugacuaccgcuggcuucgaacuguaaaaaccaccaaggagucucucguuaucauaucuccaaguguggcagauuuggacccauaugacagaucccuucacucgagggucuucccuagcgggaagugcucaggaguagcagugucuucuaccuacugcuccacuaaccacgauuacaccauuuggaugcccgagaauccgagacuagggaugucuugugacauuuuuaccaauaguagagggaagagagcauccaaagggagugagacuugcggcuuuguagaugaaagaggccuauauaagucuuuaaaaggagcaugcaaacucaaguuauguggaguucucggacuuagacuuauggauggaacaugggucgcgaugcaaacaucaaaugaaaccaaauggugcccucccgaucaguuggugaaccugcacgacuuucgcucagacgaaauugagcaccuuguuguagaggaguuggucaggaagagagaggagugucuggaugcacuagaguccaucaugacaaccaagucagugaguuucagacgucucagucauuuaagaaaacuugucccuggguuuggaaaagcauauaccauauucaacaagaccuugauggaagccgaugcucacuacaagucagucagaacuuggaaugagauccucccuucaaaaggguguuuaagaguuggggggaggugucauccucaugugaacgggguguuuuucaaugguauaauauuaggaccugacggcaaugucuuaaucccagagaugcaaucaucccuccuccagcaacauauggaguuguuggaauccucgguuaucccccuuaugcacccccuggcagacccgucuaccguuuucaaggacggugacgaggcugaggauuuuguugaaguucaccuucccgaugugcacgaacaggucucaggaguugacuugggucucccgaacugggggaaguauguauuacugagugcaggggcccugacugccuugauguugauaauuuuccugaugacauguuguagaagagucaaucgaucagaaccuacgcaacacaaucucagagggacagggagggaggugucagucacuccccaaagcgggaagaucauaucuucaugggaaucauacaagagugggggugagaccagacuguga

SEQ ID NO: 63990 - RNA, 1575 nt, Artificial Sequence
  derived and/or modified CDS sequence (wt) from glycoprotein__RABV__LN713663.1
augguuccucaggcucuccuguuuguaccccuucugguuuuuccauuguguuuugggaaauucccuauuuacacgauaccagacaagcuuggucccuggaguccgauugacauacaucaccucagcugcccaaacaauuugguaguggaggacgaaggaugcaccaaccugucaggguucuccuacauggaacuuaaaguuggauacaucuuagccauaaaagugaacggguucacuugcacaggcguugugacggaggcugaaaccuacacuaacuucguugguuaugucacaaccacguucaaaagaaagcauuuccgcccaacaccagaugcauguagagccgcguacaacuggaagauggccggugaccccagauaugaagagucucuacacaauccguacccugacuaccgcuggcuucgaacuguaaaaaccaccaaggagucucucguuaucauaucuccaaguguggcagauuuggacccauaugacagaucccuucacucgagggucuucccuagcgggaagugcucaggaguagcggugucuucuaccuacugcuccacuaaccacgauuacaccauuuggaugcccgagaauccgagacuagggaugucuugugacauuuuuaccaauaguagagggaagagagcauccaaagggagugagacuugcggcuuuguagaugaaagaggccuauauaagucuuuaaaaggagcaugcaaacucacguuauguggaguucuaggacuuagacuuauggauggaacaugggucucgaugcaaacaucaaaugaaaccaaauggugcccucccgauaaguuggugaaccugcacgacuuucgcucagacgaaauugagcaccuuguuguagaggaguuggucaggaagagagaggagugucuggaugcacuagaguccaucaugacaaccaagucagugaguuucagacgucucagucauuuaagaaaacuugucccuggguuuggaaaagcauauaccauauucaacaagaccuugauggaagccgaugcucacuacaagucagucgaaacuuggaaugagauccucccuucaaaaggguguuuaagaguuggggggaggugucauccucaugugaacgggguguuuuucaaugguauaauauuaggaccugacggcaaugucuuaaucccagagaugcaaucaucccuccuccagcaacauauggaguuguuggaauccucgguuaucccccuugugcacccccuggcagacccgucuaccguuuucaaggacggugacgaggcugaggauuuuguugaaguucaccuucccgaugugcacaaucaggucucaggaguugacuugggucucccgaacugggggaaguauguauuacugagugcaggggcccugacugccuugauguugauaauuuuccugaugacauguuguagaagagucaaucgaucagaaccuacgcaacacaaucucagagggacagggagggaggugucagucacuccccaaagcgggaagaucauaucuucaugggaaucacacaagagugggggugagaccauacuguaa

SEQ ID NO: 63991 - RNA, 1575 nt, Artificial Sequence
  derived and/or modified CDS sequence (wt) from glycoprotein__RABV__LN713666.1
augguuccucaggcucuccuguuuguaccccuucugguuuuuccauuguguuuugggaaauucccuauuuacacgauaccagacaagcuuggucccuggaguccgauugacauacaucaccucagcugcccaaacaauuugguaguggaggacgaaggaugcaccaaccugucaggguucuccuacauggaacuuaaaguuggauacaucuuagccauaaaagugaacggguucacuugcacaggcguugugacggaggcugaaaccuacacuaacuucguugguuaugucacaaccacguucaaaagaaagcauuuccgcccaacaccagaugcauguagagccgcguacaacuggaagauggccggugaccccagauaugaagagucucuacacaauccguacccugacuaccgcuggcuucgaacuguaaaaaccaccaaggagucucucguuaucauaucuccaaguguggcagauuuggacccauaugacagaucccuucacucgagggucuucccuagcgggaagugcucaggaguagcggugucuucuaccuacugcuccacuaaccacgauuacaccauuuggaugcccgagaauccgagacuagggaugucuugugacauuuuuaccaauaguagagggaagagagcauccaaagggagugagacuugcggcuuuguagaugaaagaggccuauauaagucuuuaaaaggagcaugcaaacucauguuauguggaguucuaggacuuagacuuauggauggaacaugggucucgaugcaaacaucaaaugaaaccaaauggugcccucccgauaaguuggugaaccugcacgacuuucgcucagacgaaauugagcaccuuguuguagaggaguuggucaggaagagagaggagugucuggaugcacuagaguccaucaugacaaccaagucagugaguuucagacgucucagucauuuaagaaaacuugucccuggguuuggaaaagcauauaccauauucaacaagaccuugauggaagccgaugcucacuacaagucagucgaaacuuggaaugagauccucccuucaaaaggguguuuaagaguuggggggaggugucauccucaugugaacgggguguuuuucaaugguauaauauuaggaccugacggcaaugucuuaaucccagagaugcaaucaucccuccuccagcaacauauggaguuguuggaauccucgguuaucccccuugugcacccccuggcagacccgucuaccguuuucaaggacggugacgaggcugaggauuuuguugaaguucaccuucccgaugugcacaaucaggucucaggaguugacuugggucucccgaacugggggaaguauguauuacugagugcaggggcccugacugccuugauguugauaauuuuccugaugacauguuguagaagagucaaucgaucagaaccuacgcaacacaaucucagagggacagggagggaggugucagucacuccccaaagcgggaagaucauaucuucaugggaaucacacaagagugggggugagaccauacuguaa

SEQ ID NO: 63992 - RNA, 1575 nt, Artificial Sequence
  derived and/or modified CDS sequence (wt) from glycoprotein__RABV__LN879481.2
augguuccucaggcucuuuuguuuguaccccuucuggguuuuucauugugugucgggaaauucccuauuuacacgauaccagacaaacuugguccuuggagcccgaucgacauacaucaucucagcugcccaaacaaucugguuguggaggacgaaggaugcaccaaccugucaggguucuccuacauggaacuuaaaguuggauacaucucagccauaaaagugaacggguuuacuugcacgggcguugugacagaggcggaaaccuauacuaacuuuguugguuaugucaccaccacguucaaaagaaagcauuuccguccaaccccagaugcauguagagcugcguacaacuggaagauggcuggugacccccgauaugaggagucucuacauaauccguacccugacuaccauuggcuucgaacuguaaaaaccaccaaggagucucucguuaucauauccccaaguguagcagauuuagacccauaugacaaaucucuucacucgagggucuucccugguggaaagugcucaggaauaacggugucuucuaccuacugcucaacuaaccacgauuacaccauuuggcugcccgagaauccgagacuagggacaucuugugacauuuuuaccaauaguagagggaagagagccuccaaagggaguaagaccugcggcuuuguagaugagagaggccuguauaagucacuaaaaggagcaugcaaacucaaguuaugugggguucuuggacuuagacuuauagauggaacaugggucgcgaugcaaacaucaaaugagaccaaauggugcccuccugaucaguuggugaaucugcacgacuuucgcucggaugagauugagcaucuuguuguagaggaguuggucaagaaaagagaggagugucuggaugcacuagaguccaucaugaccaccaagucagugaguuucagacgccucagucauuuaagaaaacuugucccuggguuuggaaaagcauauaccauauucaacaagaccuugauggaggcugaugcucacuacaaaucaguccggacauggaaugagaucauccccucaaaaggguguuuaagaguuggagggaggugucaucaucaugugaacgggguguuuuucaaugguauaauauuagggccugacggccauguucuaaucccagaaaugcaaucaucccuccuccagcaacauauggaguuguuggaauccucagucauuccccugaugcacccccuggcagacccguccacaguuuucaaggacggugaugaggcugaggauuuuguugaaguucaccuucccgaugugcacaaacaggucucagggguugaccugggucucccaaacugggguaaguauguauuauugagugcaggggcccugauugccuugauguugauaaucuuuuuaaugacauguuguagaagagucaauagaccagaguccacgcagcccaguuucagagggacagagaggaaggugucgaucacuccccaaagcgggaaggucauaucuucaugggagucauauaagagugggggugagacuagacuguga

SEQ ID NO: 63993 - RNA, 1575 nt, Artificial Sequence
  derived and/or modified CDS sequence (wt) from glycoprotein__RABV__LT598537.1
augguuccucaagcucuuuuguuugugccccuucuggcuuuuccaauguguuucgggaaauuccccaucuacacaauaccagacaaacuuggucccuggagcccgauugacauacaucaucucagcuguccaaauaacuugguuguggaagacgaaggaugcaccaacuugucggguuucuccuacauggaacuuaaggugggauacauuucggccauaaaagugaacggguucacgugcacagguguggugacagaggcugagacuuacacuaacuuugucgguuauguuaccaccacguucaagagaaagcauuuccgcccaacaccagaugcauguagagcugcuuacaacuggaaaauggccggugaucccagauaugaagaaucucuucauaauccguacccugacuaccauuggcuucgaaccgugaaaaccacgaaggagucucucaucaucauauccccaaguguagcagaccuagacccauaugacaaaucccuucacucgagggucuuuccuagcgggaagugcuugggaauaacaauaucaucuaccuacugcucgacuaaccaugauuacaccaucuggaugcccgagaaugugagauuagggacaucuugugacaucuuuaccaacaguagagggaagagagcauccaaagggagcaagacuugcggauuuguugacgaaagaggcuuguauaagucuuugaagggggcaugcaagcucaaauuauguggaguucugggacuuagacucauggacggaacgugggucgcgaugccaacaucggaugagaccaaguggugucccccugaucaguugguaaaucuacacgacuuucgcucggacgagaucgaacaucuugucguggaggaguuggucaggaaaagagaggagugucuggaugcccuagaguccaucaugacuaccaagucggugaguuuuagacgucucagccacuugagaaaacuugucccuggguucggaaaagcauacaccauauucaacaaaacccugauggaagccgaugcucacuacaagucaguccggaccuggaaugagaucauccccuccaaggggugucugagaguuggagggaggugucauccccauguaaacggaguguuuuuuaacggcauaauacugggcccugacggccauguucugaucccagagaugcaaucaucccuccuucagcaacauauggaguuguuggaaucaucaguuaucccucugaugcauccuuuagcagacccgucuacaguuuucaaggacggugaugaagcagaggauuuuguugagguucaccuucccgaugugcacaaacagaucucagggguugaccugggucucccuaacuggggaaaguaugucuuaauaauugcagggguauugauugccaugauauugacaaucuucuuaaugacauguuguggaagagguaaucgacccaaguccacacaacacagucuuggagggauagggaggaaggugucauccacuucccaaagcgggaaggucauaucuucgugggagucauauaaaagcgggggugagaccagacuguga

SEQ ID NO: 63994 - RNA, 1575 nt, Artificial Sequence
  derived and/or modified CDS sequence (wt) from glycoprotein__RABV__LT598538.1
augguuccucaagcucuuuuguuugugccccuucuggcuuuuccaauguguuucgggaaauuccccaucuacacaauaccagacaaacuuggucccuggagcccgauugacauacaucaucucagcuguccaaacaacuugguuguggaagacgaaggaugcaccaacuugucggguuucuccuacauggaacucaaggugggauacauuucggccauaaaagugaacggguucacgugcacagguguggugacagaggcugagaccuacacuaacuuugucgguuauguuaccaccacguuuaagagaaagcauuuccgcccaacaccagaugcauguagagcugcuuacaacuggaaaauggccggugaucccagauaugaagaaucucuucauaauccguacccugacuaccauuggcuucgaaccgugaaaaccacgaaggagucucucaucaucauauccccaaguguagcagaccuagacccauaugacaaaucccuucacucgagggucuuuccuagcgggaagugcuugggaauaacaauaucaucuaccuacugcucgacuaaccaugauuacaccaucuggaugcccgagaaugugagauuagggacaucuugugacaucuuuaccaacaguagagggaagagagcauccaaagggagcaagacuuguggauuuguugacgaaagaggcuuguauaagucuuugaagggggcaugcaagcucaaauuauguggaguucugggacuuagacuuauggacggaacgugggucucgaugccaacaucggaugagaccaaguggugucccccugaucaguugguaaaucuacacgacuuucgcucggacgagaucgaacaucuugucguggaggaguuggucaggaaaagagaggagugucuggaugcccuagaguccaucaugacuaccaagucggugaguuuuagacgucuaagccacuugagaaaacuugucccuggauucggaaaagcauacaccauauucaacaaaacccugauggaagccgaugcucacuacaagucaguccggaccuggaaugagaucauccccuccaaggggugucugagaguuggagggaggugucauccccacguaaacggaguguuuuuuaacggcauaauacugggcccugacggccauguucuaaucccagagaugcaaucaucccuccuucagcaacauauggaguuguuggaaucaucaguuaucccucugaugcauccuuuagcagacccgucuacaguuuucaaggacggugaugaagcagaggauuuuguugagguucaccuucccgaugugcacaaacagaucucagggguugaccugggucucccuaacuggggaaaguaugucuuaauaauugcagggguauugauugccaugauauugacaaucuucuuaaugacauguuguggaagagguaaucgacccaaguccacacaacacagucuuggagggauagggaggaaggugucauccacuucccaaagcgggaaggucauaucuucgugggagucauauaaaagcgggggugagaccagacuguga

SEQ ID NO: 63995 - RNA, 1575 nt, Artificial Sequence
  derived and/or modified CDS sequence (wt) from glycoprotein__RABV__LT598540.1
augguuccucaagcucuuuuguuugugccccuucuggcuuuuccaauguguuucgggaaauuccccaucuacacaauaccagacaaacuuggucccuggagcccgauugacauacaucaucucagcuguccaaauaacuugguuguggaagacgaaggaugcaccaacuugucggguuucuccuacauggaacuuaaggugggauacauuucggccauaaaagugaacggguucacgugcacagguguggugacagaggcugagaccuacacuaacuuugucgguuauguuaccaccacguuuaagagaaagcauuuccgcccaacaccagaugcauguagagcugcuuacaacuggaaaauggccggugaucccagauaugaagaaucucuucauaauccguacccugacuaccauuggcuucgaaccgugaaaaccacgaaggagucucucaucaucauauccccaaguguagcagaccuagacccauaugacaaaucccuucacucgagggucuuuccuagcgggaagugcuugggaauaacaauaucaucuaccuacugcucgacuaaccaugauuacaccaucuggaugcccgagaaugugagauuagggacgucuugugacaucuuuaccaacaguagagggaagagagcauccaaagggagcaagacuuguggauuuguugacgaaagaggcuuguauaagucuuugaagggggcaugcaagcucaaauuauguggaguucugggacuuagacuuauggacggaacgugggucgcgaugccaacaucggaugagaccaaguggugucccccugaucaguugguaaaucuacacgacuuucgcucggacgagaucgaacaucuugucguggaggaguuggucaggaaaagagaggagugucuggaugcccuagaguccaucaugacuaccaagucggugaguuuuagacgucuaagccacuugagaaaacuugucccuggauucggaaaagcauacaccauauucaacaaaacccugauggaagccgaugcucacuacaagucaguccggaccuggaaugagaucauccccuccaaggggugucugagaguuggagggaggugucauccccauguaaacggaguguuuuuuaacggcauaauacugggcccugacggccauguucuaaucccagagaugcaaucaucccuccuucagcaacauauggaguuguuggaaucaucaguuaucccucugaugcauccuuuagcagacccgucuacaguuuucaaggacggugaugaagcagaggauuuuguugagguucaccuucccgaugugcacaaacagaucucagggguugaccugggucucccuaacuggggaaaguaugucuuaaugauugcagggguauugauugccaugauauugacaaucuucuuaaugacauguuguggaagagguaaucgacucaaguccacacaacacagucuuggagggauagggaggaaggugucauccacuucccaaagcgggaaggucauaucuucgugggagucauauaaaagcgggggugagaccagacuguga

SEQ ID NO: 63996 - RNA, 1575 nt, Artificial Sequence
  derived and/or modified CDS sequence (wt) from glycoprotein__RABV__LT598541.1
augguuccucaagcucuuuuguuugugccccuucuggcuuuuccaauguguuuugggaaauuccccaucuacacaauaccagacaaacuuggucccuggagcccgauugacauacaucaucucagcuguccaaacaacuugguuguggaagacgaaggaugcaccaacuugucggguuucuccuacauggaacuuaaggugggauacauuucggccauaaaagugaacggguucacgugcacagguguggugacagaggcugaaaccuacacuaacuuugucgguuauguuaccaccacguuuaagagaaagcauuuccgcccaacaccagaugcauguagagcugcuuacaacuggaaaauggccggugaucccagauaugaagaaucucuucauaauccguacccugacuaccauuggcuucgaaccgugaaaaccacgaaggagucucucaucaucauauccccaaguguagcagaccuagacccauaugacaaaucccuucacucgagggucuuuccuagcgggaagugcuugggaauaacaauaucaucuaccuacugcucgacuaaccaugauuacaccaucuggaugcccgagaaugugagauuagggacaucuugugacaucuuuaccaacaguagagggaagagagcauccaaagggagcaagacuuguggauuuguugacgaaagaggcuuguauaagucuuugaagggggcaugcaagcucaaauuauguggaguucugggacuuagacuuauggacggaacgugggucucgaugccaacaucggaugagaccaaguggugucccccugaucaguugguaaaucuacacgacuuucgcucggacgagaucgaacaucuugucguggaggaguuggucaggaaaagagaggagugucuggaugcccuagaguccaucaugacuaccaagucggugaguuuuagacgucuaagccacuugagaaaacuugucccuggauucggaaaagcauacaccauauucaacaaaacccugauggaagccgaugcucacuacaagucaguccggaccuggaaugagaucauccccuccaaggggugucugagaguuggggggaggugucauccccacguaaacggaguguuuuuuaacggcauaauacugggcccugacggccauguucuaaucccagagaugcaaucaucccuccuucagcaacauauggaguuguuggaaucaucaguuaucccucugaugcauccuuuagcagacccgucuacaguuuucaaggacggugaugaagcagaggauuuuguugagguucaccuucccgaugugcacaaacagaucucagggguugaccugggucucccuaacuggggaaaguaugucuuaauaauugcagggguauugauugccaugauauugacaaucuucuuaacgacauguuguggaagagguaaucgacccaaguccacacaacacagucuuggagggauagggaggaaggugucauccacuucccaaagcgggaaggucauaucuucgugggagucauauaaaagcgggggugagaccagacuguga

SEQ ID NO: 63997 - RNA, 1575 nt, Artificial Sequence
  derived and/or modified CDS sequence (wt) from glycoprotein__RABV__LT598543.1
augguuccucaagcucuuuuguuugugccccuucuggcuuuuccaauguguuucgggaaauuccccaucuacacaauaccagacaaacuuggucccuggagcccgauugacauacaucaucucagcuguccaaauaacuugguuguggaagacgaaggaugcacuaacuugucagguuucuccuacauggaacuuaaggugggauacauuucggccauaaaagugaacggguucacgugcacagguguggugacagaggcugagacuuacacuaacuuugucgguuauguuaccaccacguucaagagaaagcauuuccgcccaacaccagaugcauguagagcugcuuacaacuggaaaauggccggugaccccagauaugaagaaucucuucauaauccguacccugacuaccauuggcuucgaaccgugaaaaccacgaaggagucucucaucaucauauccccaaguguagcagaccuagacccauaugacaaaucccuucacucgagagucuuuccuagcgggaagugcuugggaauaacaauaucaucuaccuacugcucgacuaaccaugauuacaccaucuggaugcccgagaaugugagauuagggacaucuugugacaucuuuaccaacaguagagggaagagagcauccaaagggagcaagacuugcggauuuguugacgaaagaggcuuguauaagucuuugaagggggcaugcaagcucaaauuauguggaguucugggacuuagacuuauggacggaacgugggucgcgaugccaacaucggaugagaccaaguggugucccccugaucaguugguaaaucuacacgacuuucgcucggacgagaucgaacaucuugucguggaggaguuggucaggaaaagagaggaaugucuggaugcccuagaguccaucaugacuaccaagucggugaguuuuagacgucucagccacuugagaaaacuugucccuggauucggaaaagcauacaccauauucaacaaaacccugauggaagccgaugcucacuacaagucaguccggaccuggaaugagaucauccccuccaaggggugucugagaguuggagggaggugucauccucauguaaacggaguguuuuucaacggcauaauacugggcccugacgggcauguucugaucccagagaugcaaucaucccuccuucagcaacauauggaguuguuggaaucaucaguuaucccucugaugcauccuuuagcagacccgucuacaguuuucaaggacggugaugaagcagaggauuuuguugagguucaccuucccgaugugcacaaacagaucucagggguugaccugggucucccuaacugggggaaguaugucuuaauaauugcagggguauugauugccaugauauugacaaucuucuuaaugacauguuguggaagagguaaucgacccaaguccaaacaacacagucuuggagggauagggaggaaggugucauccacuucccaaagcgggaaggucauaucuucgugggagucauauaaaagcgggggugagaccagacuguga

SEQ ID NO: 63998 - RNA, 1575 nt, Artificial Sequence
  derived and/or modified CDS sequence (wt) from glycoprotein__RABV__M13215.1
augguuccucaggcucuccuguuuguaccccuucugguuuuuccauuguguuuugggaaauucccuauuuacacgauaccagacaagcuuggucccuggagcccgauugacauacaucaccucagcugcccaaacaauuugguaguggaggacgaaggaugcaccaaccugucaggguucuccuacauggaacuuaaaguuggauacaucucagccauaaaaaugaacggguucacuugcacaggcguugugacggaggcugaaaccuacacuaacuucguugguuaugucacaaccacguucaaaagaaagcauuuccgcccaacaccagaugcauguagagccgcguacaacuggaagauggccggugaccccagauaugaagagucucuacacaauccguacccugacuaccacuggcuucgaacuguaaaaaccaccaaggagucucucguuaucauaucuccaaguguggcagauuuggacccauaugacagaucccuucacucgagggucuucccuggcgggaauugcucaggaguagcggugucuucuaccuacugcuccacuaaccacgauuacaccauuuggaugcccgagaauccgagacuagggaugucuugugacauuuuuaccaauaguagagggaagagagcauccaaagggagugagacuugcggcuuuguagaugaaagaggccuauauaagucuuuaaaaggagcaugcaaacucaaguuauguggaguucuaggacuuagacuuauggauggaacaugggucgcgaugcaaacaucaaaugaaaccaaauggugcccucccggucaguuggugaauuugcacgacuuucgcucagacgaaauugagcaccuuguuguagaggaguuggucaagaagagagaggagugucuggaugcacuagaguccaucaugaccaccaagucagugaguuucagacgucucagucauuuaagaaaacuugucccuggguuuggaaaagcauauaccauauucaacaagaccuugauggaagccgaugcucacuacaagucagucagaacuuggaaugagaucaucccuucaaaaggguguuuaagaguuggggggaggugucauccucauguaaacgggguauuuuucaaugguauaauauuaggaccugacggcaaugucuuaaucccagagaugcaaucaucccuccuccagcaacauauggaguuguugguauccucgguuaucccccuuaugcacccccuggcagacccgucuaccguuuucaagaacggugacgaggcugaggauuuuguugaaguucaccuucccgaugugcacgaacggaucucaggaguugacuugggucucccgaacugggggaaguauguauuacugagugcaggggcccugacugccuugauguugauaauuuuccugaugacaugcuggagaagagucaaucgaucggaaccuacacaacacaaucucagagggacagggagggaggugucagucacuccccaaagcgggaagaucauaucuucaugggaaucauacaagagcgggggugagaccggacuguga

SEQ ID NO: 63999 - RNA, 1575 nt, Artificial Sequence
  derived and/or modified CDS sequence (wt) from glycoprotein__RABV__M32751.1
augguuccucagguucuuuuguuugcaccccuccugguuuuuccauuguguuucgggaaguuccccauuuacacgauaccagacaaacuuggucccuggagcccuauugacuuacaccaucucagcuguccaaauaaccugguuguggaggacgaaggauguaccaaccuguccggguucucuuacauggaacuuaaagugggauacaucucagccauaaaagugaacggguucacuugcacagguguugugacagaggcagaaaccuacaccaacuuuguugguuaugucacaaccacauucaagagaaagcauuuccgccccaccccagacgcauguagagccgcguauaacuggaagauggccggugaccccagauaugaagagucucuacacaauccguaccccgacuaccauuggcuucgaacuguaaaaaccaccaaagagucucucguuaucauauccccaagugugacagauuuggacccauaugacaaaucccuucacucaagggucuucccuggcggaaauugcucaggaauaacgguguccucgaccuacugcucaacuaaucaugauuacaccaucuggaugccugagaaucugagacuagggacaucuugugacauuuuuacccauagcagagggaagagagcauccaaaggagacaagacuugcggcuuuguggaugaaagaggccuguauaagucuuuaaagggagcaugcaaacucaaguuauguggaguucucggacuuagacuuauggauggaacaugggucgcgaugcaaacaucagaugagaccaaauggugcccuccaggucaguuggugaauuugcacgacuuucgcucagacgagauugagcaucucguugaggaagaguuagucaagaaaagagaggagugucuggaugcacuagaguccaucaugaccaccaagucagugaguuucagacgucucagucaccugagaaaacuugucccuggguuuggaaaagcauauaccauauucaacaaaaccuugauggaggcugaugcucacuacaagucuguccagaccuggaaugagaucauccccucaaaaggguguuugagaguuggggagaggugucauccccaugugaacgggguguuuuucaaugguauaauauuagggucugacggccauguucuaaucccagagaugcagucaucccuccuccagcaacauauggaguuguuggaaucuucaguuaucccccugaugcaccccuuggcagacccuucuacaguuuucaaagacggugaugagguugaggauuuuguugaaguucaccuccccgaugugcauaaacaggucucaggaguugaccugggucucccgaaaugggggaaguauguauugaugauugcaggggccuugauugcccugauguugauaauuuuccugaugacauguugcagaagagucaaucgaccagaaucuacacaaagcaaucuuggagggacagggagaaaugugucagucccuucccaaagcggaaaagucauaucuucaugggagucauauaagaguggaggcgagaccagacuguga

SEQ ID NO: 64000 - RNA, 1575 nt, Artificial Sequence
  derived and/or modified CDS sequence (wt) from glycoprotein__RABV__M81058.1
augguuccucaggcucuuuuguuuguaccccuucugguuuucccauuguguuuugggaaauucccuauuuacacgauaccagacaaacuuggucccuggaguccgauugauauacaucaucucagaugcccaaacaauuugguuguggaggacgaaggaugcaccaaccugucaggauucuccuacauggaacuuaaaguuggauacaucucagccauaaaggugaacggguucacuuguacaggcguugugacagaggcagaaaccuacacuaacuuuguugguuaugucaccaccacguucaaaagaaagcauuuccgcccaacaccagacgcauguagagccgcguacaacuggaagauggccggugaccccagauaugaagagucucuacacaauccguacccugacuaccauuggcuucgaacuguaaaaaccacaaaggagucucucguuaucauauccccaaguguggcagauuuggacccauaugacaaaucccuucacucgagggucuucccuagcggaaauugcucaggaauaacgguaucuucuaccuacugcucaacuaaccacgauuacaccaucuggaugccugagaauccgagacuagagacaucuugugacauuuuuaccaauaguagaggaaagagagcaucuaaagggaguaagaccugcggcuuuguagaugaaagaggccuguauaagucucuaaaaggagcaugcaagcucaaguuauguggaguucuugggcucagacuuauggauggaaccugggucgcuaugcaaacaucagaugagaccaaaugguguccucccgaucaguuggugaaucugcacgacuuucgcucggaugagaucgagcaucuuguuguagaggaguuggucaagaaaagagaggagugucuggaugcacuagaguccaucaugaccaccaagucagugaguuucagacgucucagucaucuaagaaaacuugucccuggguucggaaaagccuauacuauauucaacaagaccuugauggaggcugaugcucacuacaagucaguccggacuuggaaugagaucauccccuccaaaggguguuuaagaguuggagggaggugucauccccaugugaaugggguguuuuucaaugguauaauauuaggaccugacggccauguucuaaucccagagaugcaaucaucccuccuucagcaacauauggaguuauuggaauccucaguuauuccccugaugcacccccuugcagacccgucuacaguuuucaaggacggugacgaggcugaggauuuuguagaaguucaccuucccgaugugcacaaacaggucucagggguugaccugggucucccgaacugggggaaguauguauuacugagugcaggaacccugauugccuugauguugauaauuuuucugaugacauguuguagaagagucaaucgaccaaaaucuacugaacgcagucucggagagacaggaaggaaggugucggucaccucccaaagcggaaaggucauaucuucaugggagucauauaagagugggggugagacuaggcgguga

SEQ ID NO: 64001 - RNA, 1575 nt, Artificial Sequence
  derived and/or modified CDS sequence (wt) from glycoprotein__RABV__M81059.1
augguuccucaggcucuuuuguuuguaccccuucugguuuucccauuguguuuugggaaauucccuauuuacacgauaccagacaaacuuggucccuggaguccgauugauauacaucaucucagaugcccaaacaauuugguuguggaggacgaaggaugcaccaaccugucaggauucuccuacauggaacuuaaaguuggauacaucucagccauaaaggugaacggguucacuuguacaggcguugugacagaggcagaaaccuacacuaacuuuguugguuaugucaccaccacguucaaaagaaagcauuuccgcccaacaccagacgcauguagagccgcguacaacuggaagauggccggugaccccagauaugaagagucucuacacaauccguacccugacuaccauuggcuucgaacuguaaaaaccacaaaggagucucucguuaucauauccccaaguguggcagauuuggacccauaugacaaaucccuucacucgagggucuucccuagcggaaauugcucaggaauaacgguaucuucuaccuacugcucaacuaaccacgauuacaccaucuggaugccugagaauccgagacuagagacaucuugugacauuuuuaccaauaguagaggaaagagagcaucuaaagggaguaagaccugcggcuuuguagaugaaagaggccuguauaagucucuaaaaggagcaugcaagcucaaguuauguggaguucuuggacucagacuuauggauggaaccugggucgcuaugcaaacaucagaugagaccaaaugguguccucccgaucaguuggugaaucugcacgacuuucgcucggaugagaucgagcaucuuguuguagaggaguuggucaagaaaagagaggagugucuggaugcacuagaguccaucaugaccaccaagucagugaguuuaagacgucucagucaucuaagaaaacuugucccuggguucggaaaagccuauacuauauucaacaagaccuugauggaggcugaagcucacuacaagucaguccagacuuggaaugagaucauccccuccaaaggguguuuaagaguuggagggaggugucauccccaugugaaugggguguuuuucaaugguauaauauuaggaccugacggccauguucuaaucccagagaugcaaucaucccuccuucagcaacauauggaguuauuggaauccucaguuauuccccugaugcacccccuugcagacccgucuacaguuuucaaggacggugacgaggcugaggauuuuguagaaguucaccuucccgaugugcacaaacaggucucagggguugaccugggucucccgaacugggggaaguauguauuacugagugcaggaacccugauugccuugauguugauaauuuuucugaugacauguuguagaagagucaaucgaccaaaaucuacugaacgcagucucggagagacaggaaggaaggugucggucaccucccaaagcggaaaggucauaucuucaugggagucauauaagagugggggugagacuaggcgguga

SEQ ID NO: 64002 - RNA, 1575 nt, Artificial Sequence
  derived and/or modified CDS sequence (wt) from glycoprotein__RABV__M81060.1
augguuccucaggcucuuuuguuuguaccccuucugguuuucucauuguguuuugggaaauucccuauuuacacgauaccagacaaacuuggucccuggaguccgauugauauacaucaucucagcugcccaaacaauuugguuguggaggacgaaggaugcaccaaccugucaggauucuccuacauggaacuuaaaguuggauacaucucagccauaaaggugaacggguucacuuguacaggcguugugacagaggcagaaaccuacacuaacuuuguugguuaugucaccaccacguucaaaagaaagcauuuccgcccaacaccagacgcauguagagccgcguacaacuggaagauggccggugaccccagauaugaagagucucuacacaauccguacccugacuaccauuggcuucgaacuguaaaaaccacaaaggagucucucguuaucauauccccaaguguggcagauuuggacccauaugacaaaucccuucacucgagggucuucccuagcggaaauugcucaggaauaacgguaucuucuaccuacugcucaacuaaccacgauuacaccaucuggaugccugagaauccgagacuagagacaucuugugacauuuuuaccaauaguagaggaaagagagcaucuaaagggaguaagaccugcggcuuuguagaugaaagaggccuguauaagucucuaaaaggagcaugcaagcucaaguuauguggaguucuuggacucagacuuauggauggaacaugggucgcuaugcaaacaucagaugagaccaaaugguguccucccgaucaguuggugaaucugcacgacuuucgcucggaugagaucgagcaucuuguuguagaggaguuggucaagaaaagagaggagugucuggaugcacuagaguccaucaugaccaccaagucagugaguuucagacgucucagucauuuaagaaaacuugucccuggguucggaaaagccuauacuauauucaacaagaccuugauggaggcugaugcucacuacaagucaguccggacuuggaaugagaucauccccuccaaaggguguuuaagaguuggagggaggugucauccccaugugaaugggguguuuuucaaugguauaauauuaggaccugacggccauguucuaaucccagagaugcaaucaucccuccuucagcaacauauggaguuauuggaauccucaguuauuccccugaugcacccccuugcagacccgucuacaguuuucaaggacggugacgagggugaggauuuuguagaaguucaccuucccgaugugcacaaacaggucucagggguugaccugggucucccgaacugggggaaguauguauuacugagugcaggaacccugauugccuugauguugauaauuuuucugaugacauguuguagaagagucaaucgaccaaaaucuacugaacgcagucucggagagacaggaagggaagugucggucaccucccaaagcgggaagaucauaucuucaugggagucauauaaaagugggggugagacuaggcgguga

SEQ ID NO: 64003 - RNA, 1575 nt, Artificial Sequence
  derived and/or modified CDS sequence (wt) from glycoprotein__RABV__S72465.1
augguuccgcaagcucuucugcuuguacccauucuggguuuuuccucguguuucgggaaauucccuauuuacacgauaccagacacacuuggucccuggagcccgaucgauauacaucaucucaguugcccaaacaauuugguuguagaggacgaaggaugcaccaaccugucaggguucuccuacauggaacuuaaaguuggacacaucucagccauaaaggugaacggguucacuugcacaggcguuguaacagaggcagaaaccuacacuaacuuuguugguuaugucaccaccacuuucaaaagaaagcauuuccgcccaacaccagaugcuuguagagcugcguacaacuggaagauggccggugaccccagauaugaagagucucuacacaguccguacccugacuaccauuggcuucgaacuguaaaaaccacaaaggagucccucguuaucauaucuccaaguguggcagauuuggacccauaugacaacucccuucacucgagggucuucccuagcggaaagugcucaggaauaacaguaucuucugucuacugcucaacuaaccacgauuacaccguuuggaugccugaaagucugagacuagggacaucuugugacauuuuuaccaauaguagagggaagagaguauccaaggggagcaagaccuguggcuuuguagaugaaagaggccuauauaagucucuaaaaggcgcaugcaaacucaaguuguguggaguucguggacuuagacuuauggacggaacaugggucgcgaugcagacaucaaaugagaccaaaugguguccucccgaucaguugguuaaucugcacgaccuucgcucagaugaaaucgagcaucuuguuauagaggaguuggucaagaaaagagaggagugucuggaugcauuagaguccaucauaaccaccaagucagugaguuucagacgucucaguuauuuaagaaaacuuguccccggguucggaaaagcauauaccauauucaacaagaccuugauggaggcugaagcucacuacaagucagucaggacuuggaaugagaucauccccucaaaaggauguuugagaguuggagggaggugucauccucauguaaacgggguguuuuucaaugguauaauauuagggccugacggucauguuuuaaucccagagaugcaaucaucccuccuccagcaacauauagaguuauuggaauccucaguuauuccccugaugcacccccuugcagacccguucacaguuuucaaggacggcgaugagacugaggauuuuauagaaguucaccuucccgaugugcacgaacaagucucagggguugaccugggucucccgaacuggggggaguauguauuacuaagugcagggaccuugauugccuugauguugauaauuuuccuaaugacauguuguagaaaagucgaucggccagaaucuacacaacgcagucucagagggacaggaaggaaugugucagucaccucccaaagcgggaaauucauaccuucaugggagucguauaaaagugggggugagacuggacuguga

SEQ ID NO: 64004 - RNA, 1575 nt, Artificial Sequence
  derived and/or modified CDS sequence (wt) from glycoprotein__RABV__U03764.1
augguuccucaggcucuuuuguuugugccccuucuggcuuuuccaauguguuucgggaaauuccccaucuacacaauaccagacaaacuuggucccuggagcccgauugacauacaucaucucagcugcccaaauaacuugguuguggaagacgaaggaugcaccaacuugucugguuucuccuacauggaacuuaaagugggauacauuucagccauaaaagugaacggguucacgugcacaggcguggugacagaggcugagacuuacacuaacuuugucgguuaugucaccacuacguucaagagaaagcauuuccgcccaacaccagaugcaugucgugcugcuuacaacuggaaaauggccggugaccccagauaugaagaaucucuucauaauccguacccugacuaccauuggcuucgaaccguaaaaaccacgaaggagucccuaaucaucauauccccuaguguagcggaccuagacccauaugacaaaucccuucauucgagggucuuuccuagcgggaagugcuugggaauaacaauaucaucuaccuacugcucgacuaaccaugauuacaccaucuggaugcccgagaaucugagauuagggacaucuugugacaucuuuaccaauaguagagggaagagagcauccaaaggaagcaagacuugcggauuuguugacgaaagaggcuuguauaagucuuugaagggggcaugcaagcucaaauuaugugggguucugggacuuagacuuauggacggaacgugggucgcgaugcaaacaucggaugagaccaaguggugucccccugaucaguuggugaaucuacacgacuuucgcucggacgaaaucgaacaucuugucguggaggaguuggucaagaaaagagaggaguguuuggaugcccuagaguccaucaugacuaccaagucggugaguuuuagacgucucagccacuugagaaaacuugucccuggguucggaaaagcauacaccauauucaacaaaacccugauggaagcugaugcucacuacaagucaguccggaccuggaaugagaucauccccucaaagggguguuugagaguuggagggaggugucauccccauguaaacggaguuguuuuuaacggcauaauacugggccccgacggccauguucugaucccagagaugcaaucaucccuccuucagcagcauauggaguuguuggaaucaucaguuaucccucugaugcauccuuuagcagacccgucuacagucuucaaggacggugaugaagcagaggauuuuguugagguucaccuucccgaugugcacaaacaaaucucagggguugaccugggucucccuaacuggggaaaguauguccuaauaauugcagggguccugauugccaugauauugacaaucuucuugaugacauguuguggaagagguaaucgacccaaguccacacaacacagucuuggagggauaggaaggaaggugucagccacuucccaaagcgggaaggucauaucuucgugggagucauauaaaagcgggggugagaccagacuguga

SEQ ID NO: 64005 - RNA, 1575 nt, Artificial Sequence
  derived and/or modified CDS sequence (wt) from glycoprotein__RABV__U03765.1
augguuccucaagcucuuuuguuugugccccuucuggcuuuuccaauguguuucgggaaauuccccaucuacacaauaccagacaaacuuggucccuggagcccgauugacauacaucaucucagcuguccaaauaacuugguuguggaagacgaaggaugcaccaacuugucggguuucuccuacauggaacuuaaggugggauacauuucggccauaaaagugaacggguucacgugcacagguguggugacagaggcugagacuuacacuaacuuugucgguuauguuaccaccacguuuaagagaaagcauuuccgcccaacaccagaugcauguagagcugcuuacaacuggaaaauggccggugaucccagauaugaagaaucucuucauaauccguacccugacuaccauuggcuucgaaccgugaaaaccacgaaggagucucucaucaucauauccccaaguguagcagaccuagacccauaugacaaaucccuucacucgagggucuuuccuagcgggaagugcuugggaauaacaauaucaucuaccuacugcucgacuaaccaugauuacaccaucuggaugcccgagaaugugagauuagggacaucuugugacaucuuuaccaacaguagagggaagagagcauccaaagggagcaagacuuguggauuuguugacgaaagaggcuuguauaagucuuugaagggggcaugcaagcucaaauuauguggaguucugggacuuagacuuauggacggaacgugggucgcgaugccaacaucggaugagaccaaguggugucccccugaucaguugguaaaucuacacgacuuucgcucggacgagaucgaacaucuugucguggaggaguuggucaggaaaagagaggagugucuggaugcccuagaguccaucaugacuaccaagucggugaguuuuagacgucucagccacuugagaaaacuugucccuggauucggaaaagcauacaccauauucaacaaaacccugauggaagccgaugcucacuacaagucaguccggaccuggaaugagaucauccccuccaaggggugucugagaguuggagggaggugucauccccauguaaacggaguuguuuuuaacggcauaauacugggcccugacggccauguucuaaucccagagaugcaaucaucccuccuucagcaacauauggaguuguuggaaucaucaguuaucccucugaugcauccuuuagcagacccgucuacaguuuucaaggacggugaugaagcagaggauuuuguugagguucaccuucccgaugugcacaaacagaucucagggguugaccugggucucccuaacuggggaaaguaugucuuaacaauugcagggguauugauugccaugauauugacaaucuucuuaaugacauguuguggaagagguaaucgacccaaguccacacaacacagucuuggagggauagggaggaaggugucauccacuucccaaagcgggaaggucauaucuucgugggagucauauaaaagcgggggugagaccagacuguga

SEQ ID NO: 64006 - RNA, 1575 nt, Artificial Sequence
  derived and/or modified CDS sequence (wt) from glycoprotein__RABV__U03766.1
augguuccucaagcucuuuuguuugugccccuucuggcuuuuccaauguguuucgggaaauuccccaucuacacaauaccagacaaacuuggucccuggagcccgauugacauacaucaucucagcuguccaaauaacuugguuguggaagacgaaggaugcaccaacuugucggguuucuccuacauggaacuuaaggugggauacauuucggccauaaaagugaacggguucacgugcacagguguggugacagaggcugagacuuacacuaacuuugucgguuauguuaccaccacguuuaagagaaagcauuuccgcccaacaccagaugcauguagagcugcuuacaacuggaaaauggccggugaucccagauaugaagaaucucuucauaauccguacccugacuaccauuggcuucgaaccgugaaaaccacgaaggagucucucaucaucauauccccaaguguagcagaccuagacccauaugacaaaucccuucacucgagggucuuuccuagcgggaagugcuugggaauaacaauaucaucuaccuacugcucgacuaaccaugauuacaccaucuggaugcccgagaaugugagauuagggacaucuugugacaucuuuaccaacaguagagggaagagagcauccaaagggagcaagacuuguggauuuguugacgaaagaggcuuguauaagucuuugaagggggcaugcaagcucaaauuauguggaguucugggacuuagacuuauggacggaacgugggucgcgaugccaacaucggaugagaccaaguggugucccccugaucaguugguaaaucuacacgacuuucgcucggacgagaucgaacaucuugucguggaggaguuggucaggaaaagagaggagugucuggaugcccuagaguccaucaugacuaccaagucggugaguuuuagacgucuaagccacuugagaaaacuugucccuggauucggaaaagcauacaccauauucaacaaaacccugauggaagccgaugcucacuacaagucaguccggaccuggaaugagaucauccccuccaaggggugucugagaguuggagggaggugucauccccauguaaacggaguuguuuuuaacggcauaauacugggcccugacggccauguucuaaucccagaaaugcaaucaucccuccuucagcaacauauggaguuguuggaaucaucaguuaucccucugaugcauccuuuagcagacccgucuacaguuuucaaggacggugaugaagcagaggacuuuguugagguucaccuucccgaugugcacaaacagaucucagggguugaccugggucucccuaacuggggaaaguaugucuuaauaauugcagggguauugauugccaugauauugacaaucuucuuaaugacauguuguggaagagguaaucgacccaaguccacacaacacagucuuggagggauagggaggaaggugucauccacuucccaaagcgggaaggucauaucuucgugggagucauauaaaagcgggggugagaccagacuguga

SEQ ID NO: 64007 - RNA, 1575 nt, Artificial Sequence
  derived and/or modified CDS sequence (wt) from glycoprotein__RABV__U03767.1
augguuccucaagcucuuuuguuugugccccuucuggcuuuuccaauguguuucgggaaauuccccaucuacacaauaccagacaaacuuggucccuggagcccgauugacauacaucaucucagcuguccaaauaacuugguuguggaagacgaaggaugcaccaacuugucggguuucuccuacauggaacuuaaggugggauacauuucggccauaaaagugaacggguucacgugcacagguguggugacagaggcugagacuuacacuaacuuugucgguuauguuaccaccacguucaagagaaagcauuuccgcccaacaccagaugcauguagagcugcuuacaacuggaaaauggccggugaucccagauaugaagaaucucuucauaauccguacccugacuaccauuggcuucgaaccgugaaaaccacgaaggagucucucaucaucauauccccaaguguagcagaccuagacccauaugacaaaucccuucacucgagggucuuuccuagcgggaagugcuugggaauaacaauaucaucuaccuacugcucgacuaaccaugauuacaccaucuggaugcccgauaaugugagauuagggacaucuugugacaucuuuaccaacaguagagggaagagagcauccaaagggagcaagacuugcggauuuguugacgaaagaggcuuguauaagucuuugaagggggcaugcaagcucaaauuauguggaguucugggacuuagacuuauggacggaacgugggucgcgaugccaacaucggaugagaccaaguggugucccccuggucaguugguaaaucuacacgacuuucgcucggacgagaucgaacaucuugucguggaggaguuggucaggaaaagagaggagugucuggaugcccuagaguccaucaugacuaccaagucggugaguuuuagacgucucagccacuugagaaaacuugucccuggauucggaaaagcauacaccauauucaacaaaacccugauggaagccgaugcucacuacaagucaguccggaccuggaaugagaucauccccuccaaggggugucugagaguuggagggaggugucauccccauguaaacggaguuguuuuuaacggcauaauacugggcccugacggccauguucuaaucccagagaugcaaucaucccuccuucagcaacauauggaguuguuggaaucaucaguuaucccucugaugcauccuuuagcagacccgucuacaguuuucaaggacggugaugaagcagaggauuuuguugagguucaccuucccgaugugcacaaacagaucucagggguugaccugggucucccuaacuggggaaaguaugucuugauaauugcagggguauugauugccaugauauugacaaucuucuugaugacauguuguggaagagguaaucgacccaaguccacacaacacagucuuggagggauagggaggaaggugucauccacuucccaaagcgggaaggucauaucuucgugggagucauauaaaagcgggggugagaccagacuguga

SEQ ID NO: 64008 - RNA, 1575 nt, Artificial Sequence
  derived and/or modified CDS sequence (wt) from glycoprotein__RABV__U11736.2
augguuccucaggcucuuuugcuggugccccuucuggcuuuuccaauguguuucgggaaauuccccaucuacacaauaccagacaaacuuggccccuggagcccgauugauauacaucaucucagcuguccaaauaacuugguuguggaagacgaaggaugcaccaacuugucugguuucuccuacauggaacuuaaagugggguacauuucagccauaaaagugaacggguucacgugcacagguguggugacagaggcugagacuuacacuaacuuugucgguuacguuaccacuacguucaagagaaagcauuuccgcccaacaccagaugcaugucgagcugcuuacaacuggaaaauggccggugaccccagauaugaagaaucucuucauaauccguacccugacuaccauuggcuucgaacuguaaaaaccaugaaggagucccucaucaucauauccccaaguguagcggaccuagacccauaugacaaaucccuucacucgagggucuuuccuagugggaagugcuugggaauaacaauaucaucuaccuacugcucgacuaaccaugauuacaccaucuggaugcccgagaaucugagauuagggacaucuugugacaucuuuaccaauaguagagggaagagagcauccaaagggagcaagacuugcggauuuguugacgaaagaggcuuguauaagucuuugaagggggcaugcaagcucaaauuaugugggguucugggacuuagacuuauggacggaacaugggucgcgaugcaaacaucggaugagaccaaguggugucccccugaucaguugguaaaucuacacgacuuucgcucggacgagaucgaacaucuugucguagaggaguuggucaagaaaagagaggagugucuggaugcccuagaguccaucaugacuaccaagucugugaguuuuagacgucucagccacuugagaaaacuugucccuggguucggaaaagcauacaccauauucaacaaaacccugauggaagcugaugcucacuacaagucaguccgaaccuggaaugagaucauccccucaaagggguguuugagaguuggagggaggugucauccucauguaaacggaguuguuuuuaacggcauaauacugggcccugacggccauguucugaucccagagaugcaaucaucccuccuucagcagcauauggaguuguuggaaucaucaguuaucccucugaugcauccuuuagcagauccgucuacagucuucaaggacggugaugaagcagaggauuuuguugagguucaccuucccgaugugcacaaacaaaucucagggguugaccugggucucccuaacuggggaaaguacgucuuaauaauugcagggguccugauugccaugauauugacaaucuucuugaugacauguugugggagagguaaucgauccaaguccacacaacacagucuuggggggauaggaaggaaggugucagccacuucccaaagcgggaaggucauaucuucgugggagucauauaaaagcgggagugagacuagacuguga

SEQ ID NO: 64009 - RNA, 1575 nt, Artificial Sequence
  derived and/or modified CDS sequence (wt) from glycoprotein__RABV__U11743.2
augguuccucaggcucuuuuguuugugccccuucuggcuuuuccaauguguuucgggaaauuccccaucuacacaauaccagacaaacuuggucccuggagcccgauugacauacaucaucucagcugcccaaauaacuugguuguggaagacgaaggaugcaccaacuugucugguuucuccuacauggaacuuaaagugggauacauuucagccauaaaagugaacggguucacgugcacagguguggugacagaggcugagacuuacacuaacuuugucgguuaugucaccacuacauucaagagaaagcauuuccgcccaacaccagaugcaugucgugcugcuuacaacuggaaaauggccggugaccccagauaugaagaaucucuucauaauccguacccugacuaccauuggcuucgaaccguaaaaaccacgaaggagucccucaucaucauauccccuaguguagcggaccuagacccauaugacaaaucccuucauucgagggucuuuccuagcgggaagugcuugggaauaacaauaucaucuaccuacugcucgacuaaccaugauuacaccaucuggaugcccgagaaucugagauuagggacaucuugugacaucuucaccaauaguagagggaagagagcauccaaagggagcaagacuugcggauuuguugacgaaaggggcuuguauaagucuuugaagggggcaugcaagcucaaauuaugugggguucugggacuuagacuuauggacggaacgugggucgcgaugcaaacaucggaugagaccaaguggugucccccugaucaguuggugaaucuacacgacuuucgcucggacgaaaucgaacaucuugucguggaggaguuggucaagaaaagagaggaguguuuggaugcccuagaguccaucaugacuaccaagucggugaguuuuagacgucucagccacuugagaaaacuugucccuggguucggaaaagcauacaccauauucaacaaaacccugauggaagcugaugcucacuacaagucaguccggaccuggaaugagaucauccccucaaaggggugucugagaguuggagggaggugucauccccauguaaacggaguuguuuuuaacggcauaauacugggcccugacggccauguucugaucccagagaugcaaucaucccuccuucagcagcauauggaguuguuggaaucaucaguuaucccucugaugcauccuuuagcagacccgucuacagucuucaaggacggugaugaagcagaggauuuuguugagguucaccuucccgaugugcacaaacaaaucucagggguugaccugggucucccuaacuggggaaaguacgucuuaauaauugcagggguccugauugccaugauauugacaaucuucuugaugacauguuguggaagagguaaucgacccaaguccacacaacacagucuuggagggauaggaaggaaggugucagccacuucccaaagcaggaaggucauaucuucgugggagucauauaaaagcgggggugagaccagacuguga

SEQ ID NO: 64010 - RNA, 1575 nt, Artificial Sequence
  derived and/or modified CDS sequence (wt) from glycoprotein__RABV__U11747.2
augguuccucaggcucuuuuguuugugccccuucuggcuuuuccaauguguuucgggaaauuccccaucuacacaauaccagacaaacuuggucccuggagcccgauugacauacaucaucucagcugcccaaauaacuugguuguggaagacgaaggaugcaccaacuugucugguuucuccuacauggaacuuaaagugggauacauuucagccauaaaagugaacggguucacgugcacagguguggugacagaggcugagacuuacacuaacuuugucgguuaugucaccacuacguucaagagaaagcauuuccgcccaacaccagaugcaugucgugcugcuuacaacuggaaaauggccggugaccccagauaugaagaaucucuucauaauccguacccugacuaccauuggcuucgaaccguaaaaaccacgaaggagucccucaucaucauauccccuaguguagcggaccuagacccauaugacaaaucccuucauucgagggucuuuccuagcgggaagugcuugggaauaacaauaucaucuaccuacugcucgacuaaccaugauuacaccaucuggaugcccgagaaucugagauuagggacaucuugugacaucuuuaccaauaguagagggaagagagcauccaaagggagcaagacuugcggauuuguugacgaaaggggcuuguauaagucuuugaagggggcaugcaagcucaaauuaugugggguucugggacuuagacuuauggacggaacgugggucgcgaugcaaacaucggaugagaccaaguggugucccccugaucaguuggugaaucuacacgacuuucgcucggacgaaaucgaacaucuugucguggaggaguuggucaagaaaagagaggaguguuuggaugcccuagaguccaucaugacuaccaagucggugaguuuuagacgucucagccacuugagaaaacuugucccuggguucggaaaagcauacaccauauucaacaaaacccugauggaagcugaugcucacuacaagucaguccggaccuggaaugagaucauccccucaaaggggugucugagaguuggagggaggugucauccccauguaaacggaguuguuuuuaacggcauaauacugggcccugacggccauguucugaucccagagaugcaaucaucccuccuucagcagcauauggaguuguuggaaucaucaguuaucccucugaugcauccuuuagcagacccgucuacagucuucaaggacggugaugaagcagaggauuuuguugagguucaccuucccgaugugcacaaacaaaucucagggguugaccugggucucccuaacuggggaaaguacgucuuaauaauugcagggguccugauugccaugauauugacaaucuucuugaugacauguuguggaagagguaaucgacccaaguccacacaacacagucuuggagggauaggaaggaaggugucagccacuucccaaagcaggaaggucauaucuucgugggagucauauaaaagcgggggugagaccagacuguga

SEQ ID NO: 64011 - RNA, 1575 nt, Artificial Sequence
  derived and/or modified CDS sequence (wt) from glycoprotein__RABV__U11748.2
augguuccucaggcucuuuuguuugugccccuucuggcuuuuccaauguguuucgggaaauuccccaucuacacaauaccagacaaacuuggucccuggagcccgauugacauacaucaucucagcugcccaaauaacuugguuguggaagacgaaggaugcaccaacuugucugguuucuccuacauggaacuuaaagugggauacauuucagccauaaaagugaacggguucacgugcacagguguggugacagaggcugagacuuacacuaacuuugucgguuaugucaccacuacguucaagagaaagcauuuccgcccaacaccagaugcaugucgugcugcuuacaacuggaaaauggccggcgaccccagauaugaagaaucucuucauaauccguacccugacuaccauuggcuucgaaccguaaaaaccacgaaggagucccucaucaucauauccccuaguguagcggaccuagacccauaugacaaaucccuucauucgagggucuuuccuagcgggaagugcuugggaauaacaauaucaucuaccuacugcucgacuaaccaugauuacaccaucuggaugcccgagaaucugagauuagggacaucuugugacaucuuuaccaauaguagagggaagagagcauccaaagggagcaagacuugcggauuuguugacgaaaggggcuuguauaagucuuugaagggggcaugcaagcucaaauuaugugggguucugggacuuagacuuauggacggaacgugggucgcgaugcaaacaucggaugagaccaaguggugucccccugaucaguuggugaaucuacacgacuuucgcucggacgaaaucgaacaucuugucguggaggaguuggucaagaaaagagaggaguguuuggaugcccuagaguccaucaugacuaccaagucugugaguuuuagacgucucagccacuugagaaaacuugucccuggguucggaaaagcauacaccauauucaacaaaacccugauggaagcugaugcucacuacaagucaguccggaccuggaaugagaucauccccucaaaggggugucugagaguuggagggaggugucauccccauguaaacggaguuguuuuuaacggcauaauacugggcccugacggccauguucugaucccagagaugcaaucaucccuccuucagcagcauauggaguuguuggaaucaucaguuaucccucugaugcauccuuuagcagacccgucuacagucuucaaggacggugaugaagcagaggauuuuguugagguucaccuucccgaugugcacaaacaaaucucagggguugaccugggucucccuaacuggggaaaguacgucuuaauaauugcagggguccugauugccaugauauugacaaucuucuugaugacauguuguggaagagguaaucgacccaaguccacacaacacagucuuggagggauaggaaggaaggugucagccacuucccaaagcgggaaggucauaucuucgugggagucauauaaaagcgggggugagaccagacuguga

SEQ ID NO: 64012 - RNA, 1575 nt, Artificial Sequence
  derived and/or modified CDS sequence (wt) from glycoprotein__RABV__U11750.2
augguuccucaggcucuuuuguuugugccccuucuggcuuuuccaauguguuucgggaaauuccccaucuacacaauaccagacaaacuuggucccuggagcccgauugacauacaucaucucagcugcccaaauaacuugguuguggaagacgaaggaugcaccaacuugucugguuucuccuacauggaacuuaaagugggauacauuucagccauaaaagugaacggguucacgugcacagguguggugacagaggcugagacuuacacuaacuuugucgguuaugucaccacuacguucaagagaaagcauuuccgcccaacaccagaugcaugucgugcugcuuacaacuggaaaauggccggugaccccagauaugaagaaucucuucauaauccguacccugacuaccauuggcuucgaaccguaaaaaccacgaaggagucccucaucaucauauccccuaguguagcggaccuagacccauaugacaagucccuucauucgagggucuuuccuagcgggaagugcuugggaauaacaauaucaucuaccuacugcucgacuaaccaugauuacaccaucuggaugcccgagaaucugagauuagggacaucuugugacaucuuuaccaauaguagagggaagagagcauccaaagggagcaagacuugcggauuuguugacgaaagaggcuuguauaagucuuugaagggggcaugcaagcucaaauuaugugggguucugggacuuagacuuauggacggaacgugggucgcgaugcaaacaucggaggagaccaaguggugucccccugaucaguuggugaaucuacacgacuuucgcucggacgaaaucgaacaucuugucguggaggaguuggucaagaaaagagaggaguguuuggaugcccuagaguccaucaugacuaccaagucggugaguuuuagacgucucagccacuugagaaaacuugucccuggguucggaaaagcauacaccauauucaacaaaacccugauggaagcugaugcucacuacaagucaguccgaaccuggaaugagaucauccccucaaagggguguuugagaguuggagggaggugucauccccauguaaacggaguuguuuuuaacggcauaauacugggcccugacggccguguucugauuccagagaugcaaucaucccuccuucagcagcauauggaguuguuggaaucaucaguuaucccucugaugcauccuuuagcagacccgucuacagucuucaaggacggugaugaagcagaggauuuuguugagguucaccuucccgaugugcacaaacaaaucucagggguugaccugggucucccuaacuggggaaaguacgucuuaauaauugcagggguccugauugccacgauauugacaaucuucuugauggcauguuguggaagagguaaucgacccaaguccacacaacacagucuuggagggauaggaaggaaggugucagccacuucccaaagcgggaaggucauaucuucgugggagucauacaaaagcgggggugagaccagacuguga

SEQ ID NO: 64013 - RNA, 1575 nt, Artificial Sequence
  derived and/or modified CDS sequence (wt) from glycoprotein__RABV__U11752.2
augguuccucaggcucuuuuguuugugccccuucuggcuuuuccaauguguuucgggaaauuccccaucuacacaauaccagacaaacuuggucccuggagcccgauugacauacaucaucucagcuguccaaauaacuugguuguggaagacgaaggaugcaccaacuugucugguuucuccuacauggaacuuaaagugggauacauuucagccauaaaagugaacggguucacgugcacagguguggugacagaggcugagacuuacacuaacuuugucgguuaugucaccacuacguucaagagaaagcauuuccgcccaacaccagaugcaugucgugcugcuuacaacuggaaaauggccggugaccccagauaugaagaaucucuucauaauccguacccugacuaccauuggcuucgaaccguaaaaaccacgaaggagucccucaucaucauauccccuaguguagcggaccuagacccauaugacaaaucccuucacucgagggucuuuccuagcgggaagugcuugggaauaacaauaucaucuaccuacugcucuacuaaccaugauuacaccaucuggaugcccgagaaucugagauuagggacaucuugugacaucuuuaccaauaguagagggaagagagcauccaaagggagcaagacuugcggauuuguugacgaaagaggcuuguauaagucuuugaagggggcaugcaagcucaaauuaugugggguucugggacuuagacuuauggacggaacgugggucgcgaugcaaacaucggaugagaccaaguggugucccccugaucaguuggugaaucuacacgacuuucgcucggacgaaaucgaacaucuugucguggaggaguuggucaagaaaagagaggaguguuuggaugcccuagaguccaucaugacuaccaagucggugaguuuuagacgucucagccacuugagaaaacuugucccuggguucggaaaagcauacaccauauucaacaaaacccugauggaagcugaugcucacuacaagucaguccggaccuggaaugagaucauccccucaaagggguguuugagaguuggagggaggugucauccccauguaaacggaguuguuuuuaacggcauaauacugggcccugacggccauguucugaucccagagaugcaaucaucccuccuucagcagcacauggaguuguuggaaucaucaguuaucccucugaugcauccuuuagcagacccgucuacagucuucaaggacggugaugaagcagaggauuuuguugagguucaccuucccgaugugcacaaacaaaucucagggguugaccugggucucccuaacuggggaaaguacgucuuaauaauugcagggguccugauugucaugauauugacaauuuucuugaugacauguuguggaagagguaaucgacccaaguccacacaacacagucuuggagggauaggaaggaaggugucagccacuucccaaagcgggaaggucauaucuucgugggagucauauaaaagcgggggugagaccagacuguga

SEQ ID NO: 64014 - RNA, 1575 nt, Artificial Sequence
  derived and/or modified CDS sequence (wt) from glycoprotein__RABV__U11753.1
augguuccucaggcucuuuuguuugugccccuucuggcuuuuccaauguguuucgggaaauuccccaucuacacaauaccagacaaacuuggucccuggagcccgauugacauacaucaucucagcugcccaaauaacuugguuguggaagacgaaggaugcaccaacuugucugguuucuccuacauggaacuuaaagugggauacauuucagccauaaaagugaacggguucacgugcacagguguggugacagaggcugagacuuacacuaacuuugucgguuaugucaccacuacguucaagagaaagcauuuccgcccaacaccagaugcaugucgugcugcuuacaacuggaaaauggccggcgaccccagauaugaagaaucucuucauaauccguacccugacuaccauuggcuucgaaccguaaaaaccacgaaggagucccucaucaucauauccccuaguguagcggaccuagacccauaugacaaaucccuucauucgagggucuuuccuagcgggaagugcuugggaauaacaauaucaucuaccuacugcucgacuaaccaugauuacaccaucuggaugcccgagaaucugagauuagggacaucuugugacaucuuuaccaauaguagagggaagagagcauccaaagggagcaagacuugcggauuuguugacgaaaggggcuuguauaagucuuugaagggggcaugcaagcucaaauuaugugggguucugggacuuagacuuauggacggaacgugggucgcgaugcaaacaucggaugagaccaaguggugucccccugaucaguuggugaaucuacacgacuuucgcucggacgaaaucgagcaucuugucguggaggaguuggucaagaaaagagaggaguguuuggaugcccuagaguccaucaugacuaccaagucugugaguuuuagacgucucagccacuugagaaaacuugucccuggguucggaaaagcauacaccauauucaacaaaacccugauggaggcugaugcucacuacaagucaguccggaccuggaaugagaucauccccucaaaggggugucugagaguuggagggaagugucauccccauguaaacggaguguuuuuuaacggcauaauacuggggccugacggccauguucugaucccagagaugcaaucaucccuccuucagcagcauauggaguuguuggaaucaucaguuaucccucugaugcauccuuuagcagacccgucuacagucuucaaggacggugaugaagcagaggauuuuguugagguucaccuucccgaugugcacaaacaaaucucagggguugaccugggucucccuaacuggggaaaguaugucuuaauaauugcagggguccugauugccaugauauugacaaucuucuugaugacauguuguggaagagguaaucgacccaaguccacacaacacagucuuggagggauaggaaggaaggugucagccacuucccaaagcgggaaggucauaucuucgugggagucauauaaaagcgggggugagaccagacuguga

SEQ ID NO: 64015 - RNA, 1575 nt, Artificial Sequence
  derived and/or modified CDS sequence (wt) from glycoprotein__RABV__U11754.1
augguuccucaggcucuuuuguuugugccccuccuggcuuuuccaauguguuucgggaaauuccccaucuacacaauaccagacaaacuuggucccuggagcccgauugacauacaucaucucagcugcccaaauaacuugguuguggaagacgaaggaugcaccaacuugucugguuucuccuacuuggaacuuaaagugggauacauuucagccauaaaagugaacggguucacgugcacagguguggugacagaggcugagacuuacacuaacuuugucgguuaugucaccacuacguucaagagaaagcauuuccgcccaacaccagaugcaugucgugcugcuuacaacuggaaaauggccggugaccccagauaugaagaaucucuucauaauccguacccugacuaccauuggcuucgaacaguaaaaaccacgaaggagucccccaucaucauauccccuaguguagcggaccuagacccauaugacaaaucccuucauucgagggucuuuccuagcgggaagugcuugggaauaacaauaucaucuaccuacugcucgacuaaccaugauuacaccaucuggaugcccgagaaucugagauuagggacaucuugugacaucuuuaccaauaguagagggaagagagcauccaaagggagcaaggcuugcggauuuguugacgaaagaggcuuguauaagucuuugaagggggcaugcaagcucaaauuaugugggguucugggacuuagacuuauggacggaacgugggucgcgaugcaaacaucggaugagaccaaguggugucccccugaucaguuggugaaucuacacgacuuucgcucggacgaaaucgaacaucuugucguggaggaguuggucaagaaaagagaggaguguuuggaugcccuagaguccaucaugaccaccaagucggugaguuuuagacgucucagccauuugagaaaacuugucccuggguucggaaaagcauacaccauauucaacaaaacccugauggaagcugaugcucacuacaagucaguccggaccuggaaugagaucauccccucaaagggguguuugagaguuggagggaggugucauccccauguaaacggaguguuuuuuaacggcauaauacuggggccugacggccauguucuaaucccagagaugcaaucaucccuccuucagcagcauauggaguuguuggaaucaucaguuaucccucugaugcauccuuuagcagacccgucuacagucuucaaggacggugaugaagcagaggauuuuguugaaguucaccuucccgaugugcacaaacaaaucucagggguugaccugggucucccuaacuggggaaaguacgucuuaauaauugcagggguccugauugccauguuguugacagucuucuugaugacauguuguggaaaagguaaucgacccaaguccauacaacacagucuuggagggauaggaaggaaggugucagccacuucccaaagcgggaaggucauaucuucgugggagucauauaaaagcgggggugagaccagacuguga

SEQ ID NO: 64016 - RNA, 1575 nt, Artificial Sequence
  derived and/or modified CDS sequence (wt) from glycoprotein__RABV__U11755.1
augguuccucaggcucuuuugcuugugccccuucuggcuuuuccaauguguuucgggaaauuccccaucuacacaauaccagacaaacuuggccccuggagcccgauugacauacaucaucucagcuguccaaauaacuugguuguggaagacgaaggaugcaccaacuugucugguuucuccuacauggaacuuaaagugggguacauuucagccauaaaagugaacggguucacgugcacagguguggugacagaggcugagacuuacacuaacuuugucgguuauguuaccacuacguucaagagaaagcauuuccgcccaacaccagaugcaugucgagcugcuuacaacuggaaaauggccggugaccccagauaugaagaaucucuucauaauccguacccugacuaccauuggcuucgaacuguaaaaaccacgaaggagucccucaucaucauauccccaaguguagcggaccuagacccauaugacaaaucccuucacucgagggucuuuccuagugggaagugcuugggaauaacaauaucaucuaccuacugcucgacuaaccacgauuacaccauuuggaugcccgagaaucugagauuagggacaucuugugacaucuuuaccaauaguagagggaagagagcauccaaagggagcaagacuugcggauuuguugacgaaagaggcuuguauaagucuuugaagggggcaugcaagcucaaauuaugugggguucugggacuuagacuuauggacggaacaugggucgcgaugcaaacaucggaugagaccaaguggugucccccugaucaguugguaaaucuacacgacuuucgcucggacgagaucgaacaucuugucguagaggaguuggucaagaaaagagaggagugucuggaugcccuggaguccaucaugacuaccaagucugugaguuuuagacgucucagccacuugagaaaacuugucccuggguucggaaaagcauacaccauauucaacaaaacccugauggaagcugaugcucacuacaagucaguccgaaccuggaaugagaucauccccucaaagggguguuugagaguuggagggaggugucauccucauguaaacggaguuguuuuuaacggcauaauacugggcccugacggccauguucugaucccagagaugcaaucaucccuccuucagcagcauauggaguuguuggaaucaucaguuaucccucugaugcauccuuuagcagauccgucuacagucuucaaggacggugaugaagcagaggacuuuguugagguucaccuucccgaugugcacaaacaaaucucagggguugaccugggucucccuaacuggggaaaguaugucuuaauaauugcagggguccugauugccaugauauugacaaucuucuugaugacauguuguggaagagguaaucgacccaaguccacacaacacagucuuggggggauaggaaggaaggugucagccacuucccaaagcgggaaggucauaucuucgugggagucauauaaaagcggaagugagacuagacuguga

SEQ ID NO: 64017 - RNA, 1575 nt, Artificial Sequence
  derived and/or modified CDS sequence (wt) from glycoprotein__RABV__U11756.1
augguuccucaggcucuuuuguuugugccccuucuggcuuuuccaauguguuucgggaaauuccccaucuacacaauaccagacaaacuuggucccuggagcccgauugacauacaucaucucagcugcccaaauaacuugguuguggaagacgaaggaugcaccaacuugucugguuucuccuacauggaacuuaaagugggauacauuucagccauaaaagugaacggguucacgugcacagguguggugacagaggcugagacuuacacuaacuuugucgguuaugucaccacuacguucaagagaaagcauuuccgcccaacaccagaugcaugucguguugcuuacaacuggaaaauggccggcgaccccagauaugaagaaucucuucauaauccguacccugacuaccauuggcuucgaaccguaaaaaccacgaaggagucccucaucaucauauccccuaguguagcggaccuagacccauaugacaaaucccuucauucgagggucuuuccuagcgggaagugcuugggaauaacaauaucaucuaccuacugcucgacuaaccaugauuacaccaucuggaugcccgagaaucugagauuagggacaucuugugacaucuuuaccaauaguagagggaagagagcauccaaagggagcaagacuugcggauuuguugacgaaaggggcuuguauaagucuuugaagggggcaugcaagcucaaauuaugugggguucugggacuuagacuuauggacggaacgugggucgcgaugcaaacaucggaugagaccaaguggugucccccugaucaguuggugaaucuacacgacuuucgcucggacgaaaucgagcaucuugucguggaggaguuggucaagaaaagagaggaguguuuggaugcccuagaguccaucaugacuaccaagucugugagcuuuagacgucucagccacuugagaaaacuugucccuggauucggaaaagcauacaccauauucaacaaaacccugauggaagcugaugcucacuacaagucaguccggaccuggaaugagaucauccccucaaaggggugucugagaguuggagggaagugucauccccauguaaacggaguuguuuuuaacggcauaauacugggcccugacggccauguucugaucccagagaugcaaucaucccuccuucagcagcauauggaguuguuggaaucaucaguuaucccucugaugcauccuuuagcagacccgucuacagucuucaaggacggugaugaagcagaggauuuuguugagguucaccuucccgaugugcacaaacaaaucucagggguugaccugggucucccuaacuggggaaaguaugucuuaauaauagcagggguccugauugccaugauauugacaaucuucuugaugacauguuguggaagagguaaucgacccaaguccacacaacacagucuuggagggauaggaaggaaggugucagccacuucccaaagcgggaaggucauaucuucgugggagucauauaaaagcgggggugagaccagacuguga

SEQ ID NO: 64018 - RNA, 1575 nt, Artificial Sequence
  derived and/or modified CDS sequence (wt) from glycoprotein__RABV__U11757.1
augguuccucaggcucuuuuguuugugccccuucuggcuuuuccaauguguuucgggaaauuccccaucuacacaauaccagacaaacuuggucccuggagcccgauugacauacaucaucucagcugcccaaauaacuugguuguggaagacgaaggaugcaccaacuugucugguuucuccuacauggaacuuaaagugggauacauuucagccauaaaagugaacggguucacgugcacagguguggugacagaggcugagacuuacacuaacuuugucgguuaugucaccacuacguucaagagaaagcauuuccgcccaacaccagaugcaugucgugcugcuuacaacuggaaaauggccggugaccccagauaugaagaaucucuucauaauccguacccugacuaccauuggcuucgaaccguaaaaaccacgaaggagucccucaucaucauauccccuaguguagcggaccuagacccauaugacaaaucccuucauucgagggucuuuccuagcgggaagugcuugggaauaacaauaucaucuaccuacugcucgacuaaccaugauuacaccaucuggaugcccgagaaucugagauuagggacaucuugugacaucuuuaccaauaguagagggaagagagcauccaaagggagcaagacuugcggauuuguugacgaaagaggcuuguauaagucuuugaagggggcaugcaagcucaaauuaugugggguucugggacuuagacuuauggacggaacgugggucgcgaugcaaacaucggaugagaccaaguggugucccccugaucaguuggugaaucuacacgacuuucgcucggacgaaaucgaacaucuugucguggaggaguuggucaagaaaagagaggaguguuuggaugcccuagaguccaucaugacuaccaagucggugaguuuuagacgucucagccauuugagaaaacuugucccuggguucggaaaagcauacaccauauucaacaaaacccugauggaagcugaugcucacuacaagucaguccggaccuggaaugagaucauccccucaaagggguguuugagaguuggagggaggugucauccccauguaaacggaguuguuuuuaacggcauaauacugggcccugacggccauguucuaaucccagagaugcaaucaucccuccuucagcagcauauggaguuguuggaaucaucaguuaucccucugaugcauccuuuagcagacccgucuacagucuucaaggacggugaugaagcagaggauuuuguugagguucaccuucccgaugugcacaaacaaaucucagggguugaccugggucucccuaacuggggaaaguaugucuuaauaauugcagggguccugauugccaugauauugacagucuucuugaugacauguuguggaagagguaaucgacccaaguccauacaacacagucuuggagggauaggaaggaaggugucagccacuucccaaagcgggaaggucauaucuucgugggagucauauaaaagcgggggugagaccagacuguga

SEQ ID NO: 64019 - RNA, 1575 nt, Artificial Sequence
  derived and/or modified CDS sequence (wt) from glycoprotein__RABV__U11758.1
augguuccucaggcucuuuuguuugugccccuucuggcuuuuccaauguguuucgggaaauuccccaucuacacaauaccagacaaacuuggucccuggagcccgauugacauacaucaucucagcugcccaaauaacuugguuguggaagacgaaggaugcaccaacuugucugguuucuccuacauggaacuuaaagugggauacauuucagccauaaaagugaacggguucacgugcacagguguggugacagaggcugagacuuacacuaacuuugucgguuaugucaccacuacguucaagagaaagcauuuccgcccaacaccagaugcaugucgugcugcuuacaacuggaaaauggccggugaccccagauaugaagaaucucuucauaauccguacccugacuaccauuggcuucgaaccguaaaaaccacgaaggagucccucaucaucauauccccuaguguagcggaccuagacccauaugacaaaucccuucauucgagggucuuuccuagcgggaagugcuugggaauaacaauaucaucuaccuacugcucgacuaaccaugauuacaccaucuggaugcccgagaaucugagauuagggacaucuugugacaucuuuaccaauaguagagggaagagagcauccaaagggagcaagacuugcggauuuguugacgaaagaggcuuguauaagucuuugaagggggcaugcaagcucaaauuaugugggguucugggacuuagacuuauggacggaacgugggucgcgaugcaaacaucggaugaaaccaaguggugucccccggaucaguuggugaaucuacacgacuuucgcucggacgaaaucgaacaucuugucguggaggaguuggucaagaaaagagaggaguguuuggaugcccuggaguccaucaugacuaccaagucggugaguuuuagacgucucagccacuugagaaaacuugucccuggguucggaaaagcauacaccauauucaacaaaacccugauggaagcugaugcucacuacaagucaguccggaccuggaaugagaucauccccucaaagggguguuugagaguuggagggaggugucauccccauguaaacggaguuguuuuuaacggcauaauacuaggcccugacggccauguucugaucccagagaugcaaucaucccuccuucagcagcauauggaguuguuggaaucaucaguuaucccucugaugcauccuuuagcagacccgucuacagucuucaaggacggugaugaagcagaggauuuuguugagguucaccuucccgaugugcacaaacaaaucucagggguugaccugggucucccuaacuggggaaaguaugucuuaauaauugcagggguccugauugccaugauauugacaaucuucuugaugacauguuguggaagagguaaucgacccaaguccacacaacacagucuuggagggauaggaaggaaggugucagccacuucccaaagcgggaaggucauaucuucgugggagucauauaaaagcgggggugagaccagacuguga

SEQ ID NO: 64020 - RNA, 1575 nt, Artificial Sequence
  derived and/or modified CDS sequence (wt) from glycoprotein__RABV__U27214.1
auggucccuugggcccuucuguuugugccuuuucugaucucuucauuguguuuugggaaguucccuaucuacacaauaccagacaagcuagguccuuggaguccuaucgacauacaucaucucaguugucccaauaaucuuguuguggaagacgagggguguaauagucugucgggguuuucuuacauggaacuaaaagugggauacaucucugccauaaaagugaacggguucacuuguacuggugucgugacggaagccgagaccuacacuaacuucguugguuaugucaccaccacauucaagagaaaacacuuuugcccgaugcccgaugcauguagauccgcauauaauuggaaaauggcaggcgauccuagguaugaagagucccuucacaacccauacccugauuaucauuggcugcggacaguuaaaaccaccaaggagucucuugucaucaucucgccaaguguggcugaccuagacccguaugacaaaucccuucauucaaggauuuucccuggggggaaaugcacgggucuaacagucucuucaaccuacugcucgaccaaccaugacuacaccaucuggaugccugaaaaagcagggcucgggacaucuugugacaucuucaccaauaguaaagggaagagagcgucuaaaggaggcaagacuuguggauuuguggacgagagagguuuguauaaguccuugaaaggagcuuguaagcucaagcugugcggaguuucugggcuuagacuuauggauggaacuuggguugcgauucagacauuggaugaaaccaaauggugcucuccugaucaacuggugaaucugcaugacuuccacucggaugagcuugagcaucuuguuguagaggaguugguuagaaagagggaggaaugucuggaugcauuagaauccaucaugaccaccaaaucaguaagcuucagacgucuaagccaccugagaaaacuaguuccuggguuugggaaggcauacaccauauucaacaaaacccuaauggaggccgaugcccacuacaaguccguucggacuuggagcgagaucauccccucaaaaggguguuugagaguaggggggagaugucauccacauguaaauggaguauuuuucaauggcaucauucuagguccggacgggcauguguugaucccagaaaugcagucaucccuucuccaacaacauguggaacuguuggaguccucugugaucccccucaugcacccccuggcagauccuucagcaguuuucaaagauggugacgaggcagaggauuuuguugagguucaucucccagauguucacaaacagaucucagggguggaccuaggccucccaagcuggggaaaguauaugcugaugauugcaggugcucuaacgacucuaaugcuguucaucuucuugaugacauguugcaaaagagucaacaggacaaaaucaauacgacaaggccccagagagauagaaagaaaaguaucauuuacuccccaaaacaaaaaagucguaucuucaugggagucuuacaagagcggaggcgagaccaagcuguaa

SEQ ID NO: 64021 - RNA, 1575 nt, Artificial Sequence
  derived and/or modified CDS sequence (wt) from glycoprotein__RABV__U27215.1
auggucccuugggcccuucuguuugugccuuuucugaucucuucauuguguuuugggaaguucccuaucuacacaauaccagacaagcuagguccuuggaguccuaucgacauacaucaucucaguugucccaauaaucuuguuguggaagacgagggguguaauagucugucgggguuuucuuacauggaacuaaaagugggauacaucucugccauaaaagugaacggguucacuuguacuggugucgugacggaagccgagaccuacacuaacuucguugguuaugucaccaccacauucaagagaaaacacuuuugcccgaugcccgaugcauguagauccgcauauaauuggaaaauggcaggcgauccuagguaugaagagucccuucacaacccauacccugauuaucauuggcugcggacaguuaaaaccaccaaggagucucuuaucaucaucucgccaaguguggcugaccuagacccguaugacaaaucccuucauucaaggauuuucccuggggggaaaugcacgggucuaacagucucuucaaccuacugcucgaccaaccaugacuacaccaucuggaugccugaaaaagcagggcucgggacaucuugugacaucuucaccaauaguaaagggaagagagcgucuaaaggaggcaagacuuguggauuuguggacgagagagguuuguauaaguccuugaaaggagcuuguaagcucaagcugugcggaguuucugggcuuagacuuauggauggaacuuggguugcgauucagacauuggaugaaaccaaauggugcucuccugaucaacuggugaaucugcaugacuuccacucggaugagcuugagcaucuuguuguagaggaguugguuagaaagagggaggaaugucuggaugcauuagaauccaucaugaccaccaaaucaguaagcuucagacgucuaagccaccugagaaaacuaguuccuggguuugggaaggcauacaccauauucaacaaaacccuaauggaggccgaugcccacuacaaguccguucggacuuggagcgagaucauccccucaaaaggguguuugagaguaggggggagaugucauccacauguaaauggaguauuuuucaauggcaucauucuagguccggacgggcauguguugaucccagaaaugcagucaucccuucuccaacaacauguggaacuguuggaguccucugugaucccccucaugcacccccuggcagauccuucagcaguuuucaaagauggugacgaggcagaggauuuuguugagguucaucucccagauguucacaaacagaucucagggguggaccuaggccucccaagcuggggaaaguauaugcugaugauugcaggugcucuaacgacucuaaugcuguucaucuucuugaugacauguugcaaaagagucaacaggacaaaaucaauacgacaaggccccagagagauagaaagaaaaguaucauuuacuccccaaaacaaaaaagucguaucuucaugggagucuuacaagagcggaggcgagaccaagcuguaa

SEQ ID NO: 64022 - RNA, 1575 nt, Artificial Sequence
  derived and/or modified CDS sequence (wt) from glycoprotein__RABV__U27216.1
auggucccuugggcccuucuguucgugccuuuucugaucucuucauuguguuuugggaaguucccuaucuacacaauaccagauaagcuagguccuuggaguccuaucgacauacaucaucucaguugucccaauaaucuuguuguggaagacgagggguguaauagucugucuggguuuucuuacauggaacuaaaagugggauacaucucugccauaaaagugaacggguucacuuguacuggugucgugacggaagccgagacauacacuaacuuuguugguuaugucaccaccacauucaagagaaaacacuuuugcccgaugcccgaugcauguagauccgcauacaauuggaaaauggcaggcgauccuagguaugaagagucccuucacaacccauacccugauuaucauuggcugcggaccguuaaaaccaccaaggagucucuuauuaucaucucgccaaguguggcugaccuagacccguaugacagaucccuucauucaaggauuuuuccuggggggaaaugcacgggucuaacagucucuuccaccuacugcucgaccaaccaugacuacaccaucuggaugccugaaaaagccgggcucgggacaucuugugacaucuucaccaacaguaaagggaagagagcguccaaaggaggcaagacuuguggauuuguggacgagagaggucuguauaaguccuugaaaggagcauguaagcucaagcugugcggaguuucugggcuuagacuuauggauggaacuuggguugcgauucagacauuggaugaaaccaaauggugcucuccugaucaacuggugaaucugcaugacuuccacucggaugagcuugagcaucuuguuguagaggaguugguuagaaagagggaggaaugucuggaugcauuagaauccaucaugaccacuaaaucgguaagcuucagacgucuaagccaccugagaaaacuaguuccuggguuugggaaggcauacaccauauucaauaaaacccuaauggaggccgaugcccacuacaaguccguucggacuuggagugagaucauccccucaaaaggguguuugagaguaggggggagaugucauccucauguaaauggaguguuuuucaauggcaucauucuagguccggacgggcauguguugaucccagaaaugcagucaucccuucuccaacaacacguggaacuguuggaguccucugugaucccccucaugcacccccuggcagauccuucagcggucuucaaagauggugacgaggcagaggauuuuguugagguucaucucccagauguucacaaacagaucucagggguggaccugggccucccaagcuggggaaaguauaugcugaugauugcaggugcucuaacgacucuaauguuguucaucuucuugaugacauguugcaaaagagucaacagaacggaaucaauacgacaaggccccagagaguuagaaagcaaaguaucaguuacuccccaaaacaaaaaagucauaucuucaugggagucuuacaagagcggaggcgagaccaagcuguga

SEQ ID NO: 64023 - RNA, 1575 nt, Artificial Sequence
  derived and/or modified CDS sequence (wt) from glycoprotein__RABV__U27217.1
auggucccuugggcccuucuguuugugccuuuucugaucucuucauuguguuuugggaaguucccuaucuacacaauaccagacaagcuagguccuuggaguccuaucgacauacaucaucucaguugucccaauaaucuuguuguggaagacgagggguguaauagucugucgggguuuucuuacauggaacuaaaagugggauacaucucugccauaaaagugaacggguucacuuguacuggugucgugacggaagccgagaccuacacuaacuucguugguuaugucaccaccacauucaagagaaaacacuuuugcccgaugcccgaugcauguagauccgcauauaauuggaaaauggcaggcgauccuagguaugaagagucccuucacaacccauacccugauuaucauuggcugcggacaguuaaaaccaccaaggagucucuuaucaucaucucgccaaguguggcugaacuagacccguaugacaaaucccuucauucaaggauuuucccuggggggaaaugcacgggucuaacagucucuuccaccuacugcucgaccaaccaugacuacaccaucuggaugccugaaaaagcagggcucgggacaucuugugacaucuucaccaauaguaaagggaagagagcgucuaaaggaggcaagacuuguggauuuguggacgagagagguuuguauaaguccuugaaaggagcuuguaagcucaagcugugcggaguuucugggcuuagacuuauggauggaacuuggguugcgauucagacauuggaugaaaccaaauggugcucuccugaucaacuggugaaucugcaugacuuccacucggaugagcuugagcaucuuguuguagaggaguugguuagaaagagggaggaaugucuggaugcauuagaauccaucaugaccaccaaaucaguaagcuucagacgucuaagccaccugagaaaacuaguuccuggguuugggaaggcauacaccauauucaacaaaacccuaauggaggccgaugcccacuacaaguccguucggacuuggagcgagaucauccccucaaaaggguguuugagaguaggggggagaugucauccacauguaaauggaguauuuuucaauggcaucauucuagguccggacgggcauguguugaucccagaaaugcagucaucccuucuccaacaacauguggaacuguuggaguccucugugaucccccucaugcacccccuggcagauccuucagcaguuuucaaagauggugacgaggcagaggauuuuguugagguucaucucccagauguucacaaacagaucucagggguggaccuaggccucccaagcuggggaaaguauaugcugaugauugcaggugcucuaacgacucuaaugcuguucaucuucuugaugacauguugcaaaagagucaacaggacaaaaucaauacgacaaggccccagagagauagaaagaaaaguaucauuuacuccccaaaacaaaaaagucguaucuucaugggagucuuacaagagcggaggcgagaccaagcuguaa

SEQ ID NO: 64024 - RNA, 1575 nt, Artificial Sequence
  derived and/or modified CDS sequence (wt) from glycoprotein__RABV__X71879.1
augguuccucaggcucuccuguuuguaccccuucugguuuuuccauuguguuuugggaaauucccuauuuacacgauaccagacaagcuuggucccuggagcccgauugacauacaucaccucagcugcccaaacaauuugguaguggaggacgaaggaugcaccaaccugucaggguucuccuacauggaacuuaaaguuggauacaucuuagccauaaaaaugaacggguucacuugcacaggcguugugacggaggcugaaaacuacacuaacuucguugguuaugucacaaccacguucaaaagaaagcauuugcgcccaacaccagaugcauguagagccgcguacaacuggaagauggccggugaccccagauaugaagagucucuacacaauccguacccugacuacagcuggcuucgaacuguaaaaaccaccaaggagucucucguuaucauaucuccaaguguagcagauuuggacccauaugacagaucccuucacucgagggucuucccuagcgggaagugcucaggaguagcggugucuucuaccuacugcuccacuaaccacgauuacaccauuuggaugcccgagaauccgagacuagggaagucuugugacauuuuuaccaauaguagagggaagagagcauccaaagggagugagacuugcggcuuuguagaugaaagaggccuauauaagucuuuaaaaggagcaugcaaacucaaguuauguggaguucucggacuuagacuuauggauggaacaugggucgcgaugcaaacaucaaaugaaaccaaauggugcccucccgaucaguuggugaaccugcacgacuuucgcucagacgaaauugagcaccuuguuguagaggaguuggucaggaagagagaggagugucuggaugcacuagaguccaucaugacaaccaagucagugaguuucagacgucucagucauuuaagaaaacuugucccuggguuuggaaaagcauauaccauauucaacaagaccuugauggaagccgaugcucacuacaagucagucagaacuuggaaugagauccucccuucaaaaggguguuuaagaguuggggggaggugucauccucaugugaacgggguguuuuucaaugguauaauauuaggaccugacggcaaugucuuaaucccagagaugcaaucaucccuccuccagcaacauauggaguuguuggaauccucgguuaucccccuugugcacccccuggcagacccgucuaccguuuucaaggacggugacgaggcugaggauuuuguugaaguucaccuucccgaugugcacaaucaggucucaggaguugacuugggucucccgaacugggggaaguauguauuacugagugcaggggcccugacugccuugauguugauaauuuuccugaugacauguuguagaagagucaaucgaucagaaccuacgcaacacaaucucagagggacagggagggaggugucagucacuccccaaacguggaagaucauaucuucaugggaaucacacaagagugggggugagaccagacuguga

SEQ ID NO: 64025 - RNA, 1701 nt, Artificial Sequence
  derived and/or modified CDS sequence (opt1) from hemagglutinin__InfluenzaA__AAA16879
auggaggccaagcuguucguccucuucugcaccuucaccgugcugaaggccgacacgaucugcgugggcuaccacgcgaacaacagcaccgacaccguggacaccguccuggagaagaacgugacggugacccacuccgucaaccuccuggaggacagccacaacgggaagcugugcucccucaacggcaucgcgccccugcagcuggggaagugcaacguggccggcuggcuccuggggaacccggagugcgaccugcuccugaccgccaacagcugguccuacaucaucgagaccagcaacuccgagaacggcacgugcuaccccggcgaguucaucgacuacgaggagcugcgcgagcagcucagcuccgugagcuccuucgagaaguucgagaucuuccccaaggccagcuccuggcccaaccacgagaccaccaagggggucaccgccgccugcagcuacuccggcgccagcuccuucuaccggaaccugcuguggaucacgaagaaggggaccagcuacccgaagcucuccaagagcuacaccaacaacaagggcaaggaggugcuggugcuguggggcguccaccacccgcccaccacgagcgagcagcagucccucuaccagaacgccgacgcguacgugagcgugggguccagcaaguacaaccgccgguucacccccgagaucgccgcccgccccaagguccggggccaggccgggcgcaugaacuacuacuggacccugcuggaccagggcgacaccaucacguucgaggccaccgggaaccucaucgcgcccugguacgccuucgcccugaacaagggcuccgacagcggcaucaucaccuccgacgcccccgugcacaacugcgacacccggugccagacgccccacggggcccugaacagcucccucccguuccagaacgugcaccccaucaccaucggcgagugccccaaguacaucaagagcaccaagcugcgcauggcgaccgggcugcggaacguccccuccauccagagccgcggccucuucggggccaucgccggcuucaucgagggcggguggacgggcaugaucgacgggugguacggcuaccaccaccagaacgagcagggguccggcuacgccgccgaccagaaguccacccagaacgcgaucgacggcaucaccaacaaggugaacagcgugaucgagaagaugaacacccaguucacggccgucgggaaggaguucaacaaccuggagcggcgcaucgagaaccugaacaagaagguggacgacggcuuccucgacguguggaccuacaacgccgagcugcugguccuccuggagaacgagcggacccuggacuuccacgacagcaacgugcgcaaccucuacgagaaggucaagucccagcugcggaacaacgccaaggagcuggggaacggcugcuucgaguucuaccacaagugcgacgacgagugcauggagcgcgagaagaacgggaccuacgacuacccgaaguacagcgaggaguccaagcucaaccgggaggagaucgacggcgugaagcuggagagcaugggcguguaccagauccuggccaucuacagcacggucgcguccagccucgugcugcuggugucccucggggccaucagcuucuggaugugcuccaacggcagccugcagugccgcaucugcaucuga

SEQ ID NO: 64026 - RNA, 1701 nt, Artificial Sequence
  derived and/or modified CDS sequence (opt1) from hemagglutinin__InfluenzaA__AAA16880
auggaggccaagcuguucguccucuucugcaccuucaccgugcugaaggccgacacgaucugcgugggcuaccacgcgaacaacagcaccgacaccguggacaccguccuggagaagaacgugacggugacccacuccgucaaccuccuggaggacagccacaacgggaagcugugcucccucaacggcaucgcgccccugcagcuggggaagugcaacguggccggcuggcuccuggggaacccggagugcgaccugcuccugaccgccaacagcugguccuacaucaucgagaccagcaacuccgagaacggcacgugcuaccccggcgaguucaucgacuacgaggagcugcgcgagcagcucagcuccgugagcuccuucgagaaguucgagaucuuccccaaggccagcuccuggcccaaccacgagaccaccaagggggucaccgccgccugcagcuacuccggcgccagcuccuucuaccggaaccugcuguggaucacgaagaaggggaccagcuacccgacccucuccaagagcuacaccaacaacaagggcaaggaggugcuggugcuguggggcguccaccacccgcccacggugaacgagcagcagagccucuaccagaacgccgacgcguacguguccgucgggagcuccaaguacaaccgccgguucacccccgagaucgccgcccgccccaaggugcggggccaggccgggcgcaugaacuaccacuggacccugcuggaccagggcgacaccaucacguucgaggccaccgggaaccucaucgcgcccugguacgccuucgcccugaacaagggcagcgacuccggcaucaucaccagcgacgcccccgugcacaacugcgacacccggugccagacgccccacggggcccugaacuccagccucccguuccagaacguccaccccaucaccaucggcgagugccccaaguacgugaaguccaccaagcugcgcauggcgaccgggcugcggaacgugcccagcauccagucccgcggccucuucggggccaucgccggcuucaucgagggcggguggacgggcaugaucgacgggugguacggcuaccaccaccagaacgagcaggggagcggcuacgccgccgaccagaaguccacccagaacgcgaucgacggcaucaccaacaaggucaacagcgugaucgagaagaugaacaccaaguucacggccguggggaaggaguucaacaaccuggagcggcgcaucgagaaccugaacaagaaggucgacgacggcuuccucgacguguggaccuacaacgccgagcugcugguccuccuggagaacgagcggacccuggacuuccacgacuccaacgugcgcaaccucuacgagaaggucaagagccagcugcggaacaacgccaaggagcuggggaacggcugcuucgaguucuaccacaagugcgacgacgagugcaucgaguccgugaagaacgggaccuacgacuacccgaaguacagcgaggaguccaagcucaaccgcgaggagaucgacggcgugaagcuggagagcaugggcguguaccagauccuggccaucuacagcacggucgcguccagccucgugcugcuggugucccucggggccaucagcuucuggaugugcuccaacggcagccugcagugccggaucugcaucuga

SEQ ID NO: 64027 - RNA, 1689 nt, Artificial Sequence
  derived and/or modified CDS sequence (opt1) from hemagglutinin__InfluenzaA__AAA64362
auggccaucaucuaccugauccuccuguucaccgccgugcgcggcgaccagaucugcaucggguaccacgcgaacaacagcaccgagaaggucgacacgauccuggagcggaacgugaccgugacccacgccaaggacauccucgagaagacccacaacggcaagcugugcaagcugaacgggaucccgccccucgagcugggcgacugcuccaucgccggguggcugcucggcaaccccgagugcgaccgccugcugagcguccccgagugguccuacaucauggagaaggagaacccccgggacggccucugcuacccggggagcuucaacgacuacgaggagcugaaguaccugcucuccagcgugaagcacuucgagaaggugaagauccugcccaaggaccgcuggacgcagcacaccaccaccggcgggucccgggccugcgccgucagcggcaaccccuccuucuuccgcaacaugguguggcugacgaagaaggggagcgacuaccccguggcgaagggcuccuacaacaacaccagcggcgagcagaugcucaucaucuggggcguccaccacccgaacgacgagaccgagcagcggacccuguaccagaacguggggacguacguguccgucgggaccagcacccugaacaagcgcuccacccccgagaucgccacgcggcccaaggugaacggccucggcagccgcauggaguucuccuggacccugcuggacaugugggacaccaucaacuucgagagcaccgggaaccucaucgcccccgaguacggcuucaagaucuccaagcgggggagcagcggcaucaugaagacggaggggacccuggagaacugcgagaccaagugccagaccccgcugggcgccaucaacacgacccuccccuuccacaacgugcacccccugaccaucggcgagugcccccgcuacgucaaguccgagaagcuggugcucgcgaccgggcugcggaacgugccgcagaucgagagccgcggccuguucggggccaucgccggcuucaucgagggcggguggcagggcauggucgacgggugguacggcuaccaccacuccaacgaccaggggagcggcuacgccgccgacaaggaguccacgcagaaggcguucgacgggaucaccaacaaggugaacagcgugaucgagaagaugaacacccaguucgaggccgucggcaaggaguucuccaaccucgagcggcgccuggagaaccugaacaagaagauggaggacggcuuccucgacguguggaccuacaacgccgagcugcuggugcucauggagaacgagcggacgcuggacuuccacgacagcaacgucaagaaccuguacgacaaggugcgcaugcagcuccgggacaacgucaaggagcuggggaacggcugcuucgaguucuaccacaagugcgacgacgagugcaugaacuccgugaagaacgggaccuacgacuaccccaaguacgaggaggagagcaagcugaaccgcaacgagaucaagggcgugaagcucuccagcaugggcgucuaccagauccuggccaucuacgccaccguggcggggucccugagccucgccaucaugauggccggcaucuccuucuggaugugcagcaacgggucccugcagugccggaucugcaucuga

SEQ ID NO: 64028 - RNA, 1689 nt, Artificial Sequence
  derived and/or modified CDS sequence (opt1) from hemagglutinin__InfluenzaA__AAA64363
auggccaucaucuaccugauccuccuguucaccgccgugcgcggcgaccagaucugcaucggguaccacgcgaacaacagcaccgagaaggucgacacgauccuggagcggaacgugaccgugacccacgccaaggacauccucgagaagacccacaacggcaagcugugcaagcugaacgggaucccgccccucgagcugggcgacugcuccaucgccggguggcugcucggcaaccccgagugcgaccgccugcugagcguccccgagugguccuacaucauggagaaggagaacccccgggacggccucugcuacccggggagcuucaacgacuacgaggagcugaagcaccuccuguccagcgugaagcacuucgagaaggugaagauccugcccaaggaccgcuggacgcagcacaccaccaccggcgggucccgggccugcgccgucagcggcaaccccuccuucuuccgcaacaugguguggcugacgaagaaggggagcaacuaccccguggcgaagggcuccuacaacaacaccagcggcgagcagaugcucaucaucuggggcguccaccacccgaacgacgagaccgagcagcggacccuguaccagaacguggggacguacguguccgucgggaccagcacccugaacaagcgcuccacccccgacaucgccacgcggcccaaggugaacggccagggcgggcgcauggaguucagcuggacccuccuggacaugugggacaccaucaacuucgaguccaccggcaaccugaucgcccccgaguacggguucaagaucagcaagcggggcuccagcgggaucaugaagacggagggcacccucggcaacugcgagaccaagugccagaccccgcugggggccaucaacacgacccugcccuuccacaacgugcacccccucaccaucggcgagugccccaaguacgucaagagcgagaagcuggugcuggcgaccgggcuccgcaacgugccgcagaucgagucccggggccuguucggggccaucgccggcuucaucgagggcggguggcagggcauggucgacgggugguacggcuaccaccacagcaacgaccagggguccggcuacgccgccgacaaggagagcacgcagaaggcguucgacggcaucaccaacaaggugaacuccgugaucgagaagaucaacacccaguucgaggccgucgagaaggaguucagcaaccuggagcgccggcucgagaaccugaacaagaagauggaggacggguuccuggacguguggaccuacaacgccgagcuccuggugcugauggagaacgagcgcacgcucgacuuccacgacuccagcgucaagaaccuguacgacaaggugcggaugcagcugcgcgacaacgucaaggagcucggcaacgggugcuucgaguucuaccacaagugcgacgacgagugcaugaacuccgugaagaacggcaccuacgacuaccccaaguacgaggaggagagcaagcugaaccggaacgagaucaagggcgugaagcuguccagcauggggaucuaccagauccucgccaucuacgccaccgucgcgggcucccugagccuggccaucaugauggccgggaucuccuucuggaugugcagcaacggcucccuccagugccgcaucugcaucuga

SEQ ID NO: 64029 - RNA, 1689 nt, Artificial Sequence
  derived and/or modified CDS sequence (opt1) from hemagglutinin__InfluenzaA__AAA64365
auggccaucaucuaccugauccuccuguucaccgccgugcgcggcgaccagaucugcaucggguaccacgcgaacaacagcaccgagaaggucgacacgauccuggagcggaacgugaccgugacccacgccaaggacauccucgagaagacccacaacggcaagcugugcaagcugaacgggaucccgccccucgagcugggcgacugcuccaucgccggguggcugcucggcaaccccgagugcgaccgccugcugagcguccccgagugguccuacaucauggagaaggagaacccccgggacggccucugcuacccggggagcuucaacgacuacgaggagcugaagcaccuccuguccagcgugaagcacuucgagaaggugaagauccugcccaaggaccgcuggacgcagcacaccaccaccggcgggucccgggccugcgccgucagcggcaaccccuccuucuuccgcaacaugguguggcugacgaagaaggggagcaacuaccccguggcgaagggcuccuacaacaacaccagcggcgagcagaugcucaucaucuggggcguccaccacccgaacgacgagaccgagcagcggacccuguaccagaacguggggacguacguguccgucgggaccagcacccugaacaagcgcuccacccccgacaucgccacgcggcccaagguggacggccucggcagccgcauggaguucuccuggacccugcuggacaugugggacaccaucaacuucgagagcaccgggaaccucaucgcccccgaguacggcuucaagaucuccaagcgggggagcagcggcaucaugaagacggaggggacccugggcaacugcgagaccaagugccagaccccgcugggcgccaucaacacgacccuccccuuccacaacgugcacccccugaccaucggggagugccccaaguacgucaaguccgagaagcuggugcucgcgaccggccugcgcaacgugccgcagaucgagagccgggggcuguucggcgccaucgccggguucaucgagggcggcuggcaggggauggucgacggcugguacggguaccaccacuccaacgaccagggcagcggguacgccgccgacaaggaguccacgcagaaggcguucgacggcaucaccaacaaggugaacagcgugaucgagaagaugaacacccaguucgaggccgucgagaaggaguucuccaaccucgagcgccggcuggagaaccugaacaagaagauggaggacggcuuccucgacguguggaccuacaacgccgagcugcuggugcucauggagaacgagcgcacgcuggacuuccacgacagcaacgucaagaaccuguacaacaaggugcggaugcagcuccgcgacaacgucaaggagcuggggaacggcugcuucgaguucuaccacaagugcgacgacgagugcaugaacuccgugaagaacgggaccuacgacuaccccaaguacgaggaggagagcaagcugaaccggaacgagaucaagggcgugaagcucuccagcaugggcaucuaccagauccuggccaucuacgccaccgucgcggggucccugagccucgccaucaugauggccggcaucuccuucuggaugugcagcaacgggucccugcagugccgcaucugcaucuga

SEQ ID NO: 64030 - RNA, 1689 nt, Artificial Sequence
  derived and/or modified CDS sequence (opt1) from hemagglutinin__InfluenzaA__AAA64366
auggccaucaucuaccugauccuccuguucaccgccgugcgcggcgaccagaucugcaucggguaccacgcgaacaacagcaccgagaaggucgacacgauccuggagcggaacgugaccgugacccacgccaaggacauccucgagaagacccacaacggcaagcugugcaagcugaacgggaucccgccccucgagcugggcgacugcuccaucgccggguggcugcucggcaaccccgagugcgaccgccugcugagcguccccgagugguccuacaucauggagaaggagaacccccgggacggccucugcuacccggggagcuucaacgacuacgaggagcugaagcaccuccuguccagcgugaagcacuucgagaaggugaagauccugcccaaggaccgcuggacgcagcacaccaccaccggcgggucccgggccugcgccgucagcggcaaccccuccuucuuccgcaacaugguguggcugacgaagaaggagagcaacuaccccguggcgaagggguccuacaacaacaccagcggcgagcagaugcucaucaucuggggcguccaccacccgaacgacgagaccgagcagcggacccuguaccagaacguggggacguacguguccgucggcaccagcacccugaacaagcgcuccacccccgacaucgccacgcggcccaaggugaacgggcucggcagccgcauggaguucuccuggacccugcuggacaugugggacaccaucaacuucgagagcaccggcaaccucaucgcccccgaguacggguucaagaucuccaagcggggcagcagcgggaucaugaagacggagggcacccuggagaacugcgagaccaagugccagaccccgcugggggccaucaacacgacccuccccuuccacaacgugcacccccugaccaucggcgagugccccaaguacgucaaguccgagaagcuggugcucgcgaccggccugcgcaacgugccgcagaucgagagccgggggcuguucggcgccaucgccggguucaucgagggcggguggcagggcauggucgacggcugguacggguaccaccacuccaacgaccagggcagcggguacgccgccgacaaggaguccacgcagaaggcguucgacggcaucaccaacaaggugaacagcgugaucgagaagaugaacacccaguucgaggccgucgggaaggaguucuccaaccucgagcgccggcuggagaaccugaacaagaagauggaggacggcuuccucgacguguggaccuacaacgccgagcugcuggugcucauggagaacgagcgcacgcuggacuuccacgacagcaacgucaagaaccuguacgacaaggugcggaugcagcuccgcgacaacgucaaggagcugggcaacgggugcuucgaguucuaccacaagugcgacgacgagugcaugaacuccgugaagaacggcaccuacgacuaccccaaguacgaggaggagagcaagcugaaccggaacgagaucaagggggugaagcucuccagcaugggcgucuaccagauccuggccaucuacgccaccguggcgggcucccugagccucgccaucaugauggccgggaucuccuucuggaugugcagcaacggcucccugcagugccgcaucugcaucuga

SEQ ID NO: 64031 - RNA, 1701 nt, Artificial Sequence
  derived and/or modified CDS sequence (opt1) from hemagglutinin__InfluenzaA__AAA85781
augaagaccaucaucgcccugagcuacaucuucugccucguguucgcccaggaccugcccggcaacgacaacuccaccgcgacgcugugccucgggcaccacgccgucccgaacggcacccuggugaagaccaucaccaacgaccagaucgaggugacgaacgccaccgagcugguccagagcuccagcaccgggaagaucugcgacaacccccaccgcauccucgacggcaucaacugcacccugaucgacgcccugcucggggacccccacugcgacggcuuccagaacgagaagugggaccuguucguggagcgguccaaggccuucagcaacugcuaccccuacgacgugccggacuacgcgucccugcgcagccucgucgccuccagcggcacgcuggaguucaucaacgagggguucaacuggaccggcgugacccagaacgggggcuccagcgccugcaagcgggggcccgacaacggcuucuucucccgccugaacuggcucuacaagagcggcuccaccuaccccgugcagaacgucacgaugcccaacaacgacaacagcgacaagcuguacaucuggggcgugcaccacccguccaccgacaaggagcagaccaaccuguacgugcaggccagcgggaaggucaccguguccacgaagcggagccagcagaccgugauccccaacgucgggagccgccccugggugcggggccucuccagccgcguguccaucuacuggaccaucgucaagcccggcgacauccuggugaucaacagcaacgggaaccugaucgcgccgcggggcuacuacaagaugcgcaccgggaaguccagcaucaugcgguccgacgcccccaucggcacgugcagcuccgagugcaucacccccaacgggagcauccccaacgacaagccguuccagaacgugaacaagaucaccuacggcgccugccccaaguacgucaagcagaacacccucaagcuggccacgggcaugcgcaacgugcccgagaagcagauccgggggaucuucggcgccaucgcgggguucaucgagaacggcugggaggggaugaucgacggcugguacggcuuccgccaccagaacuccgaggggaccggccaggccgccgaccucaagagcacccaggccgccaucgaccagaucaacgggaagcugaaccgggugaucgagaagaccaacgagaaguuccaccagaucgagaaggaguucuccgaggucgagggccgcauccaggaccuggagaaguacguggaggacacgaagaucgaccuguggagcuacaacgcggagcuccuggucgcccuggagaaccagcacaccaucgaccucaccgacuccgagaugaacaagcuguucgagaagacccggcgccagcugcgggagaacgccgaggacauggggaacggcugcuucaagaucuaccacaagugcgacaaccccugcaucggcagcauccgcaacgggacguacgaccacgacguguaccgggacgaggcccucaacaaccgcuuccagaucaagggcguggagcugaaguccggguacaaggacuggauccuguggaucagcuucgccaucuccugcuuccuccugugcgucgugcugcucggcuucaucaugugggcgugccagaagggcaacauccgcugcaacaucugcaucuga

SEQ ID NO: 64032 - RNA, 1707 nt, Artificial Sequence
  derived and/or modified CDS sequence (opt1) from hemagglutinin__InfluenzaA__AAC14418
auggagcgcaucgugcugcuccuggccaccgucagccuggugaaguccgaccagaucugcaucggcuaccacgccaacaacagcaccgagcaggucgacacgaucauggagaagaacgugaccgugacccacgcgcaggacauccucgagcggacccacaacgggaagcugugcgaccugaacggcgugaagccccucauccugcgcgacugcuccgucgccggguggcugcucggcaacccgaugugcgacgaguucaucaacgugcccgaguggagcuacaucguggagaaggccucccccgccaacgaccugugcuaccccgggaacuucaacgacuacgaggagcugaagcaccuccugagccggaucaaccacuucgagaagauccagaucaucccgaaguccagcugguccaaccacgacgccagcuccggcgucagcuccgcgugccccuaccugggccgcagcuccuucuuccggaacgugguguggcucaucaagaagaacagcacguaccccaccaucaagcgcuccuacaacaacaccaaccaggaggaccugcugguccucugggggauccaccaccccaacgacgccgccgagcagaccaagcuguaccagaacccgacgaccuacaucagcgugggcaccuccacccugaaccagcggcucgugcccgagaucgccacgcgccccaaggucaacgggcagagcggccggauggaguucuucuggaccauccugaagcccaacgacgcgaucaacuucgagagcaacgggaacuucaucgccccggaguacgccuacaagaucgugaagaagggcgacuccaccaucaugaaguccgagcuggaguacggcaacugcaacaccaagugccagacgcccaugggggccaucaacagcagcaugcccuuccacaacauccacccccucaccaucggcgagugcccgaaguacgugaaguccaaccgccugguccuggccaccgggcuccggaacgcgccccagcgcgagcggcgccggaagaagcgcggccuguucggcgccaucgccggguucaucgagggcggguggcagggcaugguggacgggugguacggcuaccaccacagcaacgagcagggcuccggguacgccgccgaccaggagagcacccagaaggcgaucgacggcgugacgaacaaggucaacuccaucaucaacaagaugaacacccaguucgaggccguggggcgggaguucaacaaccuggagcgccggaucgagaaccucaacaagaagauggaggacggcuuccuggacguguggaccuacaacgccgagcugcucguccugauggagaacgagcgcacccuggacuuccacgacagcaacgugaagaaccucuacgacaagguccggcugcagcugcgcgacaacgccaaggagcucgggaacggcugcuucgaguucuaccacaagugcgacaacgagugcauggaguccgugaagaacggcacguacgacuacccccaguacagcgaggaggcccgccugaaccgggaggagaucuccggggugaagcuggagagcaugggcaccuaccagauccucuccaucuacagcaccgucgcguccagccuggcccuggccaucaugguggccgggcucucccuguggaugugcagcaacggcagccugcagugccgcaucugcaucuga

SEQ ID NO: 64033 - RNA, 1707 nt, Artificial Sequence
  derived and/or modified CDS sequence (opt1) from hemagglutinin__InfluenzaA__AAC40508
auggagcgcaccgugcugcuccuggccaccgucagccuggugaaguccgaccagaucugcaucggcuaccacgccaacaacagcacggagcaggucgacaccaucauggagaagaacgugaccgugacccacgcgcaggacauccucgagcggacgcacaacgggaagcugugcgaccugaacggcgugaagccccucauccugcgcgacugcuccgucgccggguggcugcucggcaacccgaugugcgacgaguucaucaacgugcccgaguggagcuacaucguggagaaggccucccccgccaacgaccugugcuaccccgggaacuucaacgacuacgaggagcugaagcaccuccugagccggaucaaccacuucgagaagauccagaucaucccgaaguccagcugguccaaccacgacgccagcuccggcgucagcuccgcgugccccuaccugggccgcagcuccuucuuccggaacgugguguggcucaucaagaagaacagcgccuaccccaccaucaagcgcuccuacaacaacaccaaccaggaggaccugcugguccucuggggcgugcaccaccccaacgacgccgccgagcagaccaagcuguaccagaacccgacgaccuacaucagcguggggaccuccacccugaaccagcggcucguccccgagaucgcgacgcgccccaaggugaacgggcagagcggccggauggaguucuucuggaccauccugaagcccaacgacgccaucaacuucgagagcaacgggaacuucaucgccccggaguacgccuacaagaucgugaagaagggcgacuccaccaucaugaaguccgagcuggaguacggcaacugcaacaccaagugccagacgcccaugggggccaucaacagcagcaugcccuuccacaacauccacccccucaccaucggcgagugcccgaaguacgucaaguccaaccgccuggugcuggcgaccgggcuccggaacacgccccagcgcgagcggcgccggaagaagcgcggccuguucggcgccaucgccggguucaucgagggcggguggcagggcaugguggacgggugguacggcuaccaccacagcaacgagcagggcuccugcuacagcgccgacaaggaguccacccagaaggccaucgacggggucaccaacaaggugaacagcaucaucaacaagaugaacacccaguucgaggcggugggccgggaguucaacaaccuggagcgccggaucgagaaccucaacaagaagauggaggacggguuccuggacgucuggaccuacaacgccgagcugcucgugcugauggagaacgagcgcacgcuggacuuccacgacuccaacgucaagaaccucuacgacaaggugcggcugcagcugcgcgacaacgccaaggagcucggcaacgggugcuucgaguucuaccacaagugcgacaacgagugcauggagagcgugaagaacggcaccuacgacuacccccaguacuccgaggaggcccgccugaaccgggaggagaucagcggcgucaagcuggaguccauggggaccuaccagauccucagcaucuacuccaccguggccagcucccuggcgcuggccaucaugguggccggccucagccuguggaugugcagcaacgggucccugcagugccgcaucugcaucuga

SEQ ID NO: 64034 - RNA, 1701 nt, Artificial Sequence
  derived and/or modified CDS sequence (opt1) from hemagglutinin__InfluenzaA__AAF87274
augaaggccauccuggugguccuccuguacaccuucaccacggccaacgcggacacccugugcaucggcuaccacgccaacaacagcaccgacaccguggacacggugcucgagaagaacgucaccgugacccacuccgugaaccugcuggagaaccgccacaacgggaagcucugcaagcugaagggcgucgcgccccugcaccucgggaagugcaacaucgccggcuggcugcuggggaacccggagugcgagcuccuguucaccgccagcuccuggagcuacaucguggagacguccaacagcgacaacgggaccugcuaccccggcgacuucaucaacuacgaggagcugcgggagcagcucuccagcguguccagcuucgagcgcuucgagaucuuccccaaggccaacuccuggcccaaccacgagaccaaccgcggggucaccagcgccugcccguacgccggcgccaacuccuucuaccggaaccugaucuggcuggugaagaaggggaacagcuaccccaagcucuccaagagcuacaucaacaacaagggcaaggaggugcugguccugugggggauccaccacccgcccacguccaacgaccagcagagccucuaccagaacgcggacgccuacguguucgugggcuccagcaaguacaacaagaaguucaugcccgagaucgccacccggcccaagguccgcggccaggccgggcggaugaacuacuacuggacccugaucgagcccggcgacaccaucacguucgaggccaccgggaaccugguggcgccccgcuacgccuucgccauggagcggggcagcggcuccgggaucaucaucagcgacaccccggugcacgacugcaacgcgaccugccagacgcccaagggcgccaucaacaccaaccuccccuuccagaacauccaccccgucaccaucggggagugcccgaaguacgugaaguccacccgccugcggauggccacgggccugcgcaacauccccagcauccagucccggggccucuucggcgccaucgccggcuucaucgagggcggguggaccgggaugaucgacggcugguacggguaccaccaccagaacgagcagggcagcggcuacgccgccgaccgcaaguccacccagaacgcgaucgacgggaucaccaacaaggugaacagcgucaucgagaagaugaacacgcaguucaccgccgugggcaaggaguucaaccaccuggagaagcggaucaagaaccugaacaagaagguggacgacggguuccucgacgucuggaccuacaacgccgagcugcuggugcuccuggagaacgagcgcacccuggacuaccacgacuccaacgucaagaaccucuacgagaaggugcggagccagcugcgcaacaacgccaaggagaucggcaacgggugcuucgaguucuaccacaagugcgacgacacgugcauggaguccaucaagaacggcaccuacgacuaccccaaguacagcgaggaggccaagcugacccgggaggagaucgacggcgugaagcucgaguccacccgcaucuaccagauccuggcgaucuacagcacgaucgccuccagccugguccuccuggugucccugggggccaucagcuucuggaugugcuccaacggcagccuccagugccggaucugcaucuga

SEQ ID NO: 64035 - RNA, 1701 nt, Artificial Sequence
  derived and/or modified CDS sequence (opt1) from hemagglutinin__InfluenzaA__AAF87275
augaaggccauccuggugguccuccuguacaccuucaccacggccaacgcggacacccugugcaucggcuaccacgccaacaacagcaccgacaccguggacacggugcucgagaagaacgucaccgugacccacuccgugaaccugcuggagaaccgccacaacgggaagcucugcaagcugaagggcgucgcgccccugcaccucgggaagugcaacaucgccggcuggcugcuggggaacccggagugcgagcuccuguucaccgccagcuccuggagcuacaucguggagacguccaacagcgacaacgggaccugcuaccccggcgacuucaucaacuacgaggagcugcgggagcagcucuccagcguguccagcuucgagcgcuucgagaucuuccccaaggccaacuccuggcccaaccacgagaccaaccgcggggucaccagcgccugcccguacgccggcgccaacuccuucuaccggaaccugaucuggcuggugaagaaggggaacagcuaccccaagcucuccaagagcuacaucaacaacaagggcaaggaggugcugguccugugggggauccaccacccgcccacguccaacgaccagcagagccucuaccagaacgcggacgccuacguguucgugggcuccagcaaguacaacaagaaguucaugcccgagaucgccacccggcccaagguccgcggccaggccgggcggaugaacuacuacuggacccugaucgagcccggcgacaccaucacguucgaggccaccgggaaccugguggcgccccgcuacgccuucgccauggagcggggcagcggcuccgggaucaucaucagcgacaccccggugcacgacugcaacgcgaccugccagacgcccaagggcgccaucaacaccaaccuccccuuccagaacauccaccccgucaccaucggggagugcccgaaguacgugaaguccacccgccugcggauggccacgggccugcgcaacauccccagcauccagucccggggccucuucggcgccaucgccggcuucaucgagggcggguggaccgggaugaucgacggcugguacggguaccaccaccagaacgagcagggcagcggcuacgccgccgaccgcaaguccacccagaacgcgaucgacgggaucaccaacaaggugaacagcgucaucgagaagaugaacacgcaguucaccgccgugggcaaggaguucaaccaccuggagaagcggaucgagaaccugaacaagaagguggacgacggguuccucgacgucuggaccuacaacgccgagcugcuggugcuccuggagaacgagcgcacccuggacuaccacgacuccaacgucaagaaccucuacgagaaggugcggagccagcugcgcaacaacgccaaggagaucggcaacgggugcuucgaguucuaccacaagugcgacgacacgugcauggaguccaucaagaacggcaccuacgacuaccccaaguacagcgaggaggccaagcugacccgggaggagaucgacggcgugaagcucgaguccacccgcaucuaccagauccuggcgaucuacagcacgaucgccuccagccugguccuccuggugucccugggggccaucagcuucuggaugugcuccaacggcagccuccagugccggaucugcaucuga

SEQ ID NO: 64036 - RNA, 1701 nt, Artificial Sequence
  derived and/or modified CDS sequence (opt1) from hemagglutinin__InfluenzaA__AAF87277
augaaggccauccugcucgugcugcuguacaccuucaccgccgcgaacgccgacacgcucugcaucggcuaccacgccaacaacagcaccgacaccgucgacaccgugcuggagaagaacgugacggucacccacuccgugaaccugcucgaggaccgccacaacgggaagcugugcaagcugcggggcaucgcgccccuccaccuggggaagugcaacaucgccggcuggcugcucgggaacccggagugcgagcugcuguucaccgccagcuccuggagcuacaucguggagaccuccaacagcgacaacggcacgugcuaccccggcgacuucaucaacuacgaggagcuccgcgagcagcuguccagcgucuccagcuucgagcgguucgagaucuuccccaaggccuccagcuggcccgaccacgagaccaaccgcggggugaccgccgccugcccguacgcgggcgccaacuccuucuaccggaaccugaucuggcucgugaagaaggggaacagcuaccccaagcuguccaagagcuacaucaacaacaaggagaaggagguccuggugcucuggggcauccaccacccgcccaccuccacggaccagcagagccuguaccagaacgccgacgccuacguguucgucggguccagcaaguacaacaagaaguucaagcccgagaucgccagccgccccaaggugcggggccaggcgggccgcauggacuacuacuggacccugguggagcccggggacaccaucaccuucgaggccacgggcaaccucgucgugccccgguacgccuucgccaugaagcgcggguccggcagcggcaucaucaucuccgacaccccggugcacgacugcaacacgaccugccagacccccaagggggccaucaacaccagccugcccuuccagaacauccaccccgucaccaucggcgagugcccgaaguacgugaaguccaccaagcugcggauggcgacggggcuccgcaacauccccagcauccagucccggggccuguucggggccaucgccggcuucaucgagggcggguggaccggcaugaucgacgggugguacggcuaccaccaccagaacgagcaggggagcggcuacgccgccgaccgcaaguccacccagaacgcgaucgacggcgugaccaacaaggucaacagcgugaucgagaagaugaacacgcaguucaccgccguggggaaggaguucaaccaccuggagaagcggaucgagaaccucaacaagaaggucgacgacggcuuccuggacguguggaccuacaacgccgagcugcucguccugcuggagaacgagcgcacccucgacuaccacgacuccaacgugaagaaccuguacgagaaggugcggagccagcugaagaacaacgccaaggagaucgggaacggcugcuucgaguucuaccacaagugcgacgacacgugcauggaguccgucaagaacgggaccuacgacuaccccaaguacagcgaggaguccaagcucaaccgcgaggagaucgacggcgugaagcuggagagcacccggaucuaccagauccuggccaucuacuccaccguggcgagcucccucauccugcuggucagccucggcgccaucagcuucuggaugugcuccaacgggagccugcagugccgcaucugcaucuga

SEQ ID NO: 64037 - RNA, 1701 nt, Artificial Sequence
  derived and/or modified CDS sequence (opt1) from hemagglutinin__InfluenzaA__AAF87278
augaaggccauccugcucgugcugcuguacaccuucaccgccgcgaacgccgacacgcucugcaucggcuaccacgccaacaacagcaccgacaccgucgacaccgugcuggagaagaacgugacggucacccacuccgugaaccugcucgaggaccgccacaacgggaagcugugcaagcugcggggcaucgcgccccuccaccuggggaagugcaacaucgccggcuggcugcucgggaacccggagugcgagcugcuguucaccgccagcuccuggagcuacaucguggagaccuccaacagcgacaacggcacgugcuaccccggcgacuucaucaacuacgaggagcuccgcgagcagcuguccagcgucuccagcuucgagcgguucgagaucuuccccaaggccuccagcuggcccaaccacgagaccaaccgcggggugaccgccgccugcccguacgcgggcgccaacuccuucuaccggaaccugaucuggcucgugaagaaggggaacagcuaccccaagcuguccaagagcuacaucaacaacaaggagaaggagguccuggugcucuggggcauccaccacccgcccaccuccacggaccagcagagccuguaccagaacgccgacgccuacguguucgucggguccagcaaguacaacaagaaguucaagcccgagaucgccagccgccccaaggugcggggccaggcgggccgcauggacuacuacuggacccugguggagcccggggacaccaucaccuucgaggccacgggcaaccucgucgugccccgguacgccuucgccaugaagcgcggguccggcagcggcaucaucaucuccgacaccccggugcacgacugcaacacgaccugccagacccccaagggggccaucaacaccagccugcccuuccagaacauccaccccgucaccaucggcgagugcccgaaguacgugaaguccaccaagcugcggauggcgacggggcuccgcaacauccccagcauccagucccggggccuguucggggccaucgccggcuucaucgagggcggguggaccggcaugaucgacgggugguacggcuaccaccaccagaacgagcaggggagcggcuacgccgccgaccgcaaguccacccagaacgcgaucgacggcgugaccaacaaggucaacagcgugaucgagaagaugaacacgcaguucaccgccguggggaaggaguucaaccaccuggagaagcggaucgagaaccucaacaagaaggucgacgacggcuuccuggacguguggaccuacaacgccgagcugcucguccugcuggagaacgagcgcgcccucgacuaccacgacuccaacgugaagaaccuguacgagaaggugcggagccagcugaagaacaacgccaaggagaucgggaacggcugcuucgaguucuaccacaagugcgacgacacgugcauggaguccgucaagaacgggaccuacgacuaccccaaguacagcgaggaguccaagcucaaccgcgaggagaucgacggcgugaagcuggagagcacccggaucuaccagauccuggcgaucuacuccaccguggccagcucccucauccugcuggucagccucggcgccaucagcuucuggaugugcuccaacgggagccugcagugccgcaucugcaucuga

SEQ ID NO: 64038 - RNA, 1701 nt, Artificial Sequence
  derived and/or modified CDS sequence (opt1) from hemagglutinin__InfluenzaA__AAF87279
augaaggccauccugcucgugcugcuguacaccuucaccgccgcgaacgccgacacgcucugcaucggcuaccacgccaacaacagcaccgacaccgucgacaccgugcuggagaagaacgugacggucacccacuccgugaaccugcucgaggaccgccacaacgggaagcugugcaagcugcggggcaucgcgccccuccaccuggggaagugcaacaucgccggcuggcugcucgggaacccggagugcgagcugcuguucaccgccagcuccuggagcuacaucguggagaccuccaacagcgacaacggcacgugcuaccccggcgacuucaucaacuacgaggagcuccgcgagcagcuguccagcgucuccagcuucgagcgguucgagaucuuccccaaggccuccagcuggcccaaccacgagaccaaccgcggggugaccgccgccugcccguacgcgggcgccaacuccuucuaccggaaccugaucuggcucgugaagaaggggaacagcuaccccaagcuguccaagagcuacaucaacaacaaggagaaggagguccuggugcucuggggcauccaccacccgcccaccuccacggaccagcagagccuguaccagaacgccgacgccuacguguucgucggguccagcaaguacaacaagaaguucaagcccgagaucgccagccgccccaaggugcggggccaggcgggccgcauggacuacuacuggacccugguggagcccggggacaccaucaccuucgaggccacgggcaaccucgucgugccccgguacgccuucgccaugaagcgcggguccggcagcggcaucaucaucuccgacaccccggugcacgacugcaacacgaccugccagacccccaagggggccaucaacaccagccugcccuuccagaacauccaccccgucaccaucggcgagugcccgaaguacgugaaguccaccaagcugcggauggcgacggggcuccgcaacauccccagcauccagucccggggccuguucggggccaucgccggcuucaucgagggcggguggaccggcaugaucgacgggugguacggcuaccaccaccagaacgagcaggggagcggcuacgccgccgaccgcaaguccacccagaacgcgaucgacggcgugaccaacaaggucaacagcgugaucgagaagaugaacacgcaguucaccgccguggggaaggaguucaaccaccuggagaagcggaucgagaaccucaacaagaaggucgacgacggcuuccuggacguguggaccuacaacgccgagcugcucguccugcuggagaacgagcgcacccucgacuaccacgacuccaacgugaagaaccuguacgagaaggugcggagccagcugaagaacaacgccaaggagaucgggaacggcugcuucgaguucuaccacaagugcgacgacacgugcauggaguccgucaagaacgggaccuacgacuaccccaaguacagcgaggaguccaagcucaaccgcgaggagaucgacggcgugaagcuggagagcacccggaucuaccagauccuggccaucuacuccaccguggcgagcucccucauccugcuggucagccucggcgccaucagcuucuggaugugcuccaacgggagccugcagugccgcaucugcaucuga

SEQ ID NO: 64039 - RNA, 1701 nt, Artificial Sequence
  derived and/or modified CDS sequence (opt1) from hemagglutinin__InfluenzaA__AAF87281
augaaggccauccuggugguccuccuguacaccuucaccacggccaacgcggacacccugugcaucggcuaccacgccaacaacagcaccgacaccguggacacggugcucgagaagaacgucaccgugacccacuccgugaaccugcuggaggaccgccacaacgggaagcucugcaagcugaagggcaucgcgccccugcaccucgggaagugcaacaucgccggcuggcugcuggggaacccggagugcgagcuccuguucaccgccagcuccuggagcuacaucgucgagacguccaacagcgacaacgggaccugcuaccccggcgacuucaucaacuacgaggagcugcgggagcagcucuccagcguguccagcuucgagcgcuucgagaucuuccccaaggccuccagcuggcccaaccacgagaccaaccgcggggugaccuccgccugcccguacgccggcgccaacagcuucuaccggaaccugaucuggcuggucaagaaggggaacuccuaccccaagcucagcaaguccuacaucaacaacaagggcaagaaggugcuggugcugugggggauccaccacccgcccacgagcaccgaccagcagucccucuaccagaacgcggacgccuacgucuucgugggcagcagcaaguacaacaagaaguucaugcccgagaucgccacccggcccaaggugcgcggccaggccgggcggaugaacuacuacuggacccugaucgagcccggcgacacgaucaccuucgaggccaccgggaaccuggucgugccccgcuacgcguucgccauggagcggggcuacggcuccgggaucaucaucagcgacaccccggugcacgacugcaacacgaccugccagacccccaagggcgccaucaacaccucccuccccuuccagaacauccaccccgucacgaucggggagugcccgaaguacgucaagagcaccaagcugcgcauggccaccggccugcggaacauccccuccauccagagccgcggccucuucggcgccaucgcgggcuucaucgagggcggguggaccgggaugaucgacggcugguacggguaccaccaccagaacgagcagggcuccggcuacgccgccgaccgcaagagcacgcagaacgccaucgacgggaucaccaacaaggugaacuccgugaucgagaagaugaacacccaguucaccgccgugggcaaggaguucaaccaccuggagaagcggaucgagaaccugaacaagaagguggacgacggguuccucgacgucuggacguacaacgcggagcugcuggugcuccuggagaacgagcggacccuggacuaccacgacagcaacgucaagaaccucuacgagaaggugaagucccagcugaagaacaacgccaaggagaucggcaacgggugcuucgaguucuaccacaagugcgacgacacgugcauggagagcgugaagaacggcaccuacgacuaccccaaguacuccgaggaggccaagcugaaccgcgaggagaucgacggcgucaagcucgagagcacccggaucuaccagauccuggccaucuacuccaccaucgccagcucccuggugcuccuggugagccugggggcgaucuccuucuggaugugcagcaacggcagccuccagugccgcaucugcaucuga

SEQ ID NO: 64040 - RNA, 1701 nt, Artificial Sequence; identical to SEQ ID NO: 64038
  derived and/or modified CDS sequence (opt1) from hemagglutinin__InfluenzaA__AAF87282

SEQ ID NO: 64041 - RNA, 1701 nt, Artificial Sequence
  derived and/or modified CDS sequence (opt1) from hemagglutinin__InfluenzaA__AAF87283
augaaggccauccuggugguccuccuguacgccuucaccaccgcgaacgccgacacgcugugcaucggcuaccacgccaacaacagcaccgacaccguggacaccgugcucgagaagaacgucacggugacccacuccgugaaccugcuggaggaccgccacaacgggaagcucugcaagcugaagggcgucgcgccccugcaccucgggaagugcaacaucgccggcuggcugcuggggaacccggagugcgagcuccuguucaccgccagcuccuggagcuacaucguggagaccuccaacagcgacaacggcacgugcuaccccggcgacuucaucaacuacgaggagcugcgggagcagcucuccagcguguccagcuucgagcgcuucgagaucuuccccaaggccuccagcuggcccaaccacgagaccaaccgcggggucaccuccgccugcccguacagcggcgccaacuccuucuaccggaaccugaucuggcuggugaagaaggggaacagcuaccccaagcucuccaagagcuacaucaacaacaagggcaaggaggugcugguccugugggggauccaccacccgcccaccuccacggaccagcagagccucuaccagaacgcggacgccuacguguucgugggcagcuccaaguacaacaagaaguucaugcccgagaucgccacccggcccaagguccgcggccaggccgggcggaugaacuacuacuggacccugaucgagcccggcgacaccaucacguucgaggccaccgggaaccugguggcgccccgcuacgccuucgccauggagcggggcagcggcuccgggaucaucaucagcgacaccccgguguacgacugcaacaccgccugccagacgcccaagggcgccaucaacaccucccuccccuuccagaacauccaccccgucaccaucggggagugcccgaaguacgucaagagcaccaagcugcgcauggcgacgggccugcggaacauccccuccauccagagccgcggccucuucggggccaucgccggcuucaucgagggcggguggaccgggaugaucgacggcugguacggguaccaccaccagaacgagcagggcuccggcuacgcccccgaccgcaagagcacccagaacgccaucgacgggaucaccaacaaggugaacuccgugaucgagaagaugaacacgcaguucaccgcggugggcaaggaguucaaccaccuggagaagcggaucgagaaccugaacaagaagguggacgacggguuccucaacgucuggaccuacaacgccgagcugcuggugcuccuggagaacgagcggacccuggacuaccacgacagcaacgucaagaaccucuacgagaaggugcgcucccagcugaagaacaacgccaaggagaucggcaacgggugcuucgaguucuaccacaagugcgacgacacgugcauggagagcgugaagaacggcaccuacgacuaccccaaguacuccgaggaggcccggcugaaccgcgaggagaucgacggcgucaagcucgagagcacccggaucuaccagauccuggccaucuacuccaccaucgcgagcucccuggugcuccuggugagccugggggccaucagcuucuggaugugcuccaacggcagccuccagugccgcaucugcaucuga

SEQ ID NO: 64042 - RNA, 1701 nt, Artificial Sequence
  derived and/or modified CDS sequence (opt1) from hemagglutinin__InfluenzaA__AAF87284
augaaggccauccuggugguccuccuguacgccuucaccaccgcgaacgccgacacgcugugcaucggcuaccacgccaacaacagcaccgacaccguggacaccgugcucgagaagaacgucacggugacccacuccgugaaccugcuggaggaccgccacaacgggaagcucugcaagcugaagggcgucgcgccccugcaccucgggaagugcaacaucgccggcuggcugcuggggaacccggagugcgagcuccuguucaccgccagcuccuggagcuacaucguggagaccuccaacagcgacaacggcacgugcuaccccggcgacuucaucaacuacgaggagcugcgggagcagcucuccagcguguccagcuucgagcgcuucgagaucuuccccaaggccuccagcuggcccaaccacgagaccaaccgcggggucaccuccgccugccugcuguucuggagcaagcagcuccugcagaagcugaacauggccggcaagaaggggaacuccuacccgaagcucagcaaguccuacaucaacaacaagggcaaggaggugcuggugcugugggggauccaccacccgcccaccagcacggaccagcagucccucuaccagaacgcggacgccuacgucuucgugggcagcagcaaguacaacaagaaguucaugcccgagaucgccacccggcccaaggugcggggccaggccgggcgcaugaacuacuacuggacccugaucgagcccggcgacaccaucacguucgaggccaccgggaaccuggucgcgccccgguacgccuucgccauggagcgcggcuccggcagcgggaucaucaucuccgacacccccguguacgacugcaacaccgccugccagacgccgaagggcgccaucaacaccagccuccccuuccagaacauccaccccgugaccaucggggagugccccaaguacgucaaguccaccaagcugcggauggcgacgggccugcgcaacaucccgagcauccagucccggggccucuucggggccaucgccggcuucaucgagggcggguggaccgggaugaucgacggcugguacggguaccaccaccagaacgagcagggcagcggcuacgccgccgaccgcaaguccacccagaacgcgaucgacgggaucaccaacaaggugaacagcgugaucgagaagaugaacacgcaguucaccgccgucggcaaggaguucaaccaccuggagaagcggaucgagaaccugaacaagaagguggacgacggguuccucaacguguggaccuacaacgccgagcugcugguccuccuggagaacgagcgcacccuggacuaccacgacuccaacgugaagaaccucuacgagaagguccggagccagcugaagaacaacgccaaggagaucggcaacgggugcuucgaguucuaccacaagugcgacgacacgugcauggaguccgugaagaacggcaccuacgacuaccccaaguacagcgaggaggcccgccugaaccgggaggagaucgacggcgugaagcucgaguccacccgcaucuaccagauccuggcgaucuacagcaccaucgccuccagccugguccuccuggugucccugggggccaucagcuucuggaugugcagcaacggcucccuccagugccggaucugcaucuga

SEQ ID NO: 64043 - RNA, 1701 nt, Artificial Sequence
  derived and/or modified CDS sequence (opt1) from hemagglutinin__InfluenzaA__AAG01749
augagcaccaucaucgcccuguccuacauccucugccugguguucgcccagaagcugcccggcaacgacaacagcaccgcgacgcucugccuggggcaccacgccgucccgaacggcacccuggugaagaccaucaccaacgaccagaucgaggugacgaacgccaccgagcucguccaguccagcuccaccgggcgcaucugcgacagcccccaccggauccuggacggcaagaacugcacccugaucgacgcccuccugggggacccccacugcgacggcuuccagaacaaggagugggaccuguucguggagcgcuccaaggccuacagcaacugcuaccccuacgacgugccggacuacgcgucccuccggagccuggucgccuccagcggcacgcuggaguucaccaacgagggguucaacuggaccggcguggcccaggacgggaccuccuacgccugcaagcgcggcagcgugaaguccuucuucagccggcucaacuggcugcacaagcuggaguacaaguaccccgcgcucaacgucacgaugcccaacaacgacaaguucgacaagcuguacaucuggggcgugcaccaccccuccaccgacagcgaccagaccucccuguacgugcaggccagcgggcgcgucaccgugagcacgaagcggucccagcagaccgugaucccgaacaucggcagccgccccuggguccgggggaucuccagccgcaucuccaucuacuggaccaucgugaagcccggcgacauccuccugaucaacagcaccgggaaccugaucgcgccccggggcuacuucaagauccgcuccggcaagagcuccaucaugcggagcgacgccccgaucgacaacugcaacuccgagugcaucacgcccaacgggagcauccccaacgagaagcccuuccagaacgugaaccgcaucaccuacggcgccugcccgcgguacgucaagcagaacacccucaagcuggccaccgggaugcgcaacgugcccgagaagcagacgcggggcaucuucggggccaucgccggcuucaucgagaacggcugggaggggaugguggacggcugguacggguuccgccaccagaacuccgagggcaccgggcaggccgccgaccucaagagcacccaggcggccaucaaccagaucaacggcaagcugaaccggcugaucgagaagaccaacgagaaguuccaccagaucgagaaggaguucuccgaggucgagggccgcauccaggaccuggagaaguacguggaggacacgaagaucgaccucuggagcuacaacgccgagcugcugguggcccucgagaaccagcacaccaucgaccugaccgacuccgagaugaacaagcuguucgagcggacccgcaagcagcuccgcgagaacgccgaggacauggggaacggcugcuucaagaucuaccacaagugcgacaacgcgugcaucgggagcauccggaacggcacguacgaccacgacgucuaccgcgacgaggcccugaacaaccgguuccagaucaaggggguggagcugaaguccggcuacaaggacuggauccucuggaucagcuucgccaucagcugcuuccugcugugcgucgugcuccugggcuucaucaugugggccugccagaaggggaacauccgcugcaacaucugcaucuga

SEQ ID NO: 64044 - RNA, 1701 nt, Artificial Sequence
  derived and/or modified CDS sequence (opt1) from hemagglutinin__InfluenzaA__AAG01767
augaacaccaucaucgcccugagcuacauccucugccugguguucgcccagaagcugcccggcaacgacaacuccaccgcgacgcucugccuggggcaccacgccgucccgaacggcacccuggugaagaccaucaccaacgaccagaucgaggugacgaacgccaccgagcucguccagagcuccagcaccgggcgcaucugcgacagcccccaccggauccuggacggcaagaacugcacccugaucgacgcccuccugggggacccccacugcgacggcuuccagaacaaggagugggaccuguucaucgagcgcagcaaggccuacuccaacugcuaccccuacgacgugccggacuacagcucccuccggagccugguggcguccagcggcacgcuggaguucaccaacgaggacuucaacuggaccggggucgcccaggacggcggguccuacagcugcaagcgcgaguccgugaaguccuucuucucccggcucaacuggcugcacaagcuggaguacaaguaccccgcccucaacgugaccaugcccaacaacgacaaguucgacaagcuguacaucuggggcguccaccaccccagcacggacuccgagcagaccagccuguacgugcaggccaucgggcgcgugaccgucagcaccaaguccagccagcagacggugaucccgaacaucggcucccggcccugggugcgcggcaucagcucccggaucagcaucuacuggaccaucgucaagcccggggacauccuccugaucuccagcaccggcaaccugaucgcgccccgcggguacuucaagauccggaacggcaaguccagcaucaugcgcuccgacgccccgaucgacaacugcuacagcgagugcaucacccccaacggcuccauccccaacgacaagcccuuccagaacgugaaccggaucacguacggggccugcccgaaguacgugaagcagaagacccucaagcuggccaccggcaugcgcaacguccccgagaagcagacccgggggaucuucggcgccaucgcgggguucaucgagaacggcugggagggcaugguggacgggugguacggcuuccgccaccagaacagcgaggggacgggccaggccgccgaccugaaguccacccaggccgccaucgaccaggugaacgggaagcucaaccggcugaucgagaagaccaacgagaaguuccaccagaucgagaaggaguucagcgaggucgagggccgcauccaggaccuggagaaguacguggaggacaccaagaucgaccucugguccuacaacgcggagcugcugguggcccucgagaaccagcacacgaucgaccugaccgacagcgagaugaacaagcuguucgagaagacccggaagcagcuccgcgagaacgccgaggacaugggcaacgggugcuucaagaucuaccacaagugcgacaacgccugcaucggcuccauccggaacgggaccuacgaccacgacgucuaccgcgacgaggcccugaacaaccgcuuccagaucaagggcguggagcucaagagcggguacaaggacuggauccuguggaucagcuucgcgaucuccugcuuccugcugugcgucgugcuccugggcuucaucaugugggccugccagaagggcaacauccggugcaacaucugcaucuga

SEQ ID NO: 64045 - RNA, 1701 nt, Artificial Sequence
  derived and/or modified CDS sequence (opt1) from hemagglutinin__InfluenzaA__AAG01776
augaacaccaucaucgcccugagcuacauccucugccugguguucgcccagaagcugcccggcaacgacaacuccaccgcgacgcucugccuggggcaccacgccgucccgaacggcacccuggugaagaccaucaccaacgaccagaucgaggugacgaacgccaccgagcucguccagagcuccagcaccgggcgcaucugcgacagcccccaccggauccuggacggcaagaacugcacccugaucgacgcccuccugggggacccccacugcgacggcuuccagaacaaggagugggaccuguucaucgagcgcagcaaggccuacuccaacugcuaccccuacgacgugccggacuacagcucccuccggagccugguggcguccagcggcacgcuggaguucaccaacgaggacuucaacuggaccggggucgcccaggacggcggguccuacagcugcaagcgcgaguccgugaaguccuucuucucccggcucaacuggcugcacaagcuggaguacaaguaccccgcccucaacgugaccaugcccaacaacgacaaguucgacaagcuguacaucuggggcguccaccaccccagcacggacuccgagcagaccagccuguacgugcaggccaucgggcgcgugaccgucagcaccaaguccagccagcagacggugaucccgaacaucggcucccggcccugggugcgcggcaucagcucccggaucagcaucuacuggaccaucgucaagcccggggacauccuccugaucuccagcaccggcaaccugaucgcgccccgcggguacuucaagauccggaacggcaaguccagcaucaugcgcuccgacgccccgaucgacaacugcuacagcgagugcaucacccccaacggcuccauccccaacgacaagcccuuccagaacgugaaccggaucacguacggggccugcccgaaguacgugaagcagaagacccucaagcuggccaccggcaugcgcaacguccccgagaagcagacccgggggaucuucggcgccaucgcgggguucaucgagaacggcugggagggcaugguggacgggugguacggcuuccgccaccagaacagcgaggggacgggccaggccgccgaccugaaguccacccaggccgccaucgaccaggugaacgggaagcucaacuggcugaucgagaagaccaacgagaaguuccaccagaucgagaaggaguucagcgaggucgagggccggauccaggaccuggagaaguacguggaggacaccaagaucgaccucugguccuacaacgcggagcugcugguggcccucgagaaccagcacacgaucgaccugaccgacagcgagaugaacaagcuguucgagaagacccgcaagcagcuccgggagaacgccgaggacaugggcaacgggugcuucaagaucuaccacaagugcgacaacgccugcaucggcuccauccgcaacgggaccuacgaccacgacgucuaccgggacgaggcccugaacaaccgcuuccagaucaagggcguggagcucaagagcggguacaaggacuggauccuguggaucagcuucgcgaucuccugcuuccugcugugcgucgugcuccugggcuucaucaugugggccugccagaagggcaacauccgcugcaacaucugcaucuga

SEQ ID NO: 64046 - RNA, 1701 nt, Artificial Sequence
  derived and/or modified CDS sequence (opt1) from hemagglutinin__InfluenzaA__AAG01785
augaagaccaucaucgcccugagcuacauccucugccugguguucgcccagaagcugcccggcaacgacaacuccaccgcgacgcucugccuggggcaccacgccgucccgaacggcacccuggugaagaccaucaccaacgaccagaucgaggugacgaacgccaccgagcucguccagagcuccagcaccgggcgcaucugcgacagcccccaccggauccuggacggcaagaacugcacccugaucgacgcccuccugggggacccccacugcgacggcuuccagaacaaggagugggaccuguucaucgagcgcagcaaggccuacuccaacugcuaccccuacgacgugccggacuacagcucccuccggagccugguggcguccagcggcacgcuggaguucaccaacgaggacuucaacuggaccggggucgcccaggacggcggguccuacagcugcaagcgcgaguccgugaaguccuucuucucccggcucaacuggcugcacaagcuggaguacaaguaccccgcccucaacgugaccaugcccaacaacgacaaguucgacaagcuguacaucuggggcguccaccaccccagcacggacuccgagcagaccagccuguacgugcaggccaucgggcgcgugaccgucagcaccaaguccagccagcagacggugaucccgaacaucggcucccggcccugggugcgcggcaucagcucccggaucagcaucuacuggaccaucgucaagcccggggacauccuccugaucuccagcaccggcaaccugaucgcgccccgcggguacuucaagauccggaacggcaaguccagcaucaugcgcuccgacgccccgaucgacaacugcuacagcgagugcaucacccccaacggcuccauccccaacgacaagcccuuccagaacgugaaccggaucacguacggggccugcccgaaguacgugaagcagaagacccucaagcuggccaccggcaugcgcaacguccccgagaagcagacccgggggaucuucggcgccaucgcgggguucaucgagaacggcugggagggcaugguggacgggugguacggcuuccgccaccagaacagcgaggggacgggccaggccgccgaccugaaguccacccaggccgccaucgaccaggugaacgggaagcucaaccggcugaucgagaagaccaacgagaaguuccaccagaucgagaaggaguucagcgaggucgagggccgcauccaggaccuggagaaguacguggaggacaccaagaucgaccucugguccuacaacgcggagcugcugguggcccucgagaaccagcacacgaucgaccugaccgacagcgagaugaacaagcuguucgagaagacccggaagcagcuccgcgagaacgccgaggacaugggcaacgggugcuucaagaucuaccacaagugcgacaacgccugcaucggcuccauccggaacgggaccuacgaccacgacgucuaccgcgacgaggcccugaacaaccgcuuccagaucaagggcguggagcucaagagcggguacaaggacuggauccuguggaucagcuucgcgaucuccugcuuccugcugugcgucgugcuccugggcuucaucaugugggccugccagaagggcaacauccggugcaacaucugcaucuga

SEQ ID NO: 64047 - RNA, 1701 nt, Artificial Sequence
  derived and/or modified CDS sequence (opt1) from hemagglutinin__InfluenzaA__AAK52911
augaagaccaucaucgcccugagcuacauccucugccugguguucgcccagaagcugcccggcaacgacaacuccaccgcgacgcucugccuggggcaccacgccgucccgaacggcacccuggugaagaccaucaccaacgaccagaucgaggugacgaacgccaccgagcucguccagagcuccagcaccgggcgcaucugcgacagcccccaccagauccuggacggcaagaacugcacccugaucgacgcccuccugggggacccccacugcgacggcuuccagaacaaggagugggaccuguucguggagcggagcacggccuacuccaacugcuaccccuacgacgugccggacuacgcgagccuccgcucccuggucgccagcuccggcacccuggaguucaccaaggagggguucaacuggaccggcguggcccaggacgggacgagcuacgccugcaagcggggcuccgugaaguccuucuucucccgccucaacuggcugcacaagcuggaguacaaguaccccgcgcucaacgucaccaugcccaacaacgacaaguucgacaagcuguacaucuggggcgugcaccaccccagcaccgacuccgaccagaccagccuguacgugcaggccuccgggcgggucacggugagcaccaagcgcagccagcagaccgugaucccgaacaucggcucccggcccuggguccgcggggugagcucccggaucagcaucuacuggaccaucgugaagcccggcgacauccuccugaucaacuccacggggaaccugaucgcgccccgcggcuacuucaagauccggagcggcaaguccagcaucaugcgcuccgacgccccgaucgacaacugcaacagcgagugcaucacccccaacggguccauccccaacgacaagcccuuccagaacgucaaccggaucaccuacggcgccugcccgcgcuacgugaagcagaacacccucaagcuggccacggggaugcggaacgugcccgagaagcagacccgcggcaucuucggggccaucgccggcuucaucgagaacggcugggaggggauggucgacggcugguacggguuccggcaccagaacagcgagggcaccgggcaggccgccgaccugaaguccacccaggcggccaucaaccagaucaacggcaagcucaaccgccugaucgagaagacgaacgagaaguuccaccagaucgagaaggaguucagcgagguggagggccggauccaggaccuggagaaguacguggaggacaccaagaucgaccucugguccuacaacgccgagcugcuggucgcccucgagaaccagcacaccaucgaccugaccgacagcgagaugaacaagcuguucgagcgcacgcggaagcagcuccgcgagaacgccgaggacauggggaacggcugcuucaagaucuaccacaagugcgacaacgcgugcaucggguccauccgcaacggcaccuacgaccacgacguguaccgggacgaggcccugaacaaccgcuuccagaucaagggggucgagcucaagagcggcuacaaggacuggauccuguggaucuccuucgccaucagcugcuuccugcugugcguggugcuccugggcuucaucaugugggccugccagaaggggaacauccggugcaacaucugcaucuga

SEQ ID NO: 64048 - RNA, 1701 nt, Artificial Sequence
  derived and/or modified CDS sequence (opt1) from hemagglutinin__InfluenzaA__AAK52912
augaagaccaucaucgcccugagcuacauccucugccugguguucgcccagaagcugcccggcaacgacaacuccaccgcgacgcucugccuggggcaccacgccgucccgaacggcacccuggugaagaccaucaccaacgaccagaucgaggugacgaacgccaccgagcucguccagagcuccagcaccgggcgcaucugcgacagcccccaccggauccuggacggcaagaacugcacccugaucgacgcccuccugggggacccccacugcgacggcuuccagaacaaggagugggaccuguucguggagcgcacgaaggccuacagcaacugcuaccccuacgacgugccggacuacgcgucccuccggagccuggucgccuccagcggcacccuggaguucaccaacgagggguucaacuggaccggcguggcccagaacgggacguccuacgccugcaagcgcggcagcgugaaguccuucuucagccggcucaacuggcugcacaagcuggaguacaaguaccccgcgcucaacgucaccaugcccaacaacgacaaguucgacaagcuguacaucuggggcgugcaccaccccuccaccgacagcgaccagaccucccuguacgugcaggccagcgggcgcgucacgguguccaccaagcggagccagcagaccgugaucccgaacaucggcagccgccccuggguccgcgggguguccagccggaucuccaucuacuggaccaucgugaagcccggcgacauccuccugaucaacagcacggggaaccugaucgcgccccggggcuacuucaagauccgcuccggcaagagcuccaucaugcggagcgacgccccgaucgggaacugcaacuccgagugcaucacccccaacggcagcauccccaacgacaagcccuuccagaacgucaaccgcaucaccuacggggccugcccgcgguacgugaagcagaacacccucaagcuggccacgggcaugcgcaacgugcccgagaagcagacccgggggaucuucggcgccaucgccggcuucaucgagaacgggugggagggcauggucgacgggugguacggcuuccgccaccagaacuccgaggggaccggccaggccgccgaccugaaguccacccaggcggccaucaaccagaucaacggcaagcucaaccggcugaucgagaagacgaacgagaaguuccaccagaucgagaaggaguucuccgagguggaggggcgcauccaggaccuggagaaguacguggaggacaccaagaucgaccucuggagcuacaacgccgagcugcuggucgcccucgagaaccagcacaccaucgaccugaccgacuccgagaugaacaagcuguucgagcggacgcgcaagcagcuccgcgagaacgccgaggacaugggcaacgggugcuucaagaucuaccacaagugcgacaacgcgugcaucggcagcauccggaacgggaccuacgaccacgacguguaccgcgacgaggcccugaacaaccgguuccagaucaagggcgucgagcugaaguccggcuacaaggacuggauccucuggaucagcuucgccaucuccugcuuccugcugugcguggugcuccugggguucaucaugugggccugccagaagggcaacauccgcugcaacaucugcaucuga

SEQ ID NO: 64049 - RNA, 1701 nt, Artificial Sequence
  derived and/or modified CDS sequence (opt1) from hemagglutinin__InfluenzaA__AAK71687
augaaggccauccuggugguccuccuguacaccuucaccacggccaacgcggacacccugugcaucggcuaccacgccaacaacagcaccgacaccguggacacggugcucgagaagaacgucaccgugacccacuccgugaaccugcuggaggaccgccacaacgggaagcucugcaagcugcggggcgucgcgccccugcaccucgggaagugcaacaucgccggcuggcugcuggggaacccggagugcgagagccucuucaccgccuccagcugguccuacaucguggagacgagcaacuccgacaacgggaccugcuaccccggcgacuucaucaacuacgaggagcugcgcgagcagcugagcuccgugagcuccuucgagcgguucgagaucuuccccgagaccagcuccuggcccaaccacgacaccaaccgcggcgucacggccgccugcccgcacgccggcgccaacagcuucuaccggaaccucaucuggcuggcgaagaagggggacuccuaccccaagcugagcaaguccuacaucaacaacaagggcaaggaggugcucgugcugugggggauccaccacccgcccaccagcgccgaccagcagucccuguaccagaacgccgacgccuacgucuucgugggcagcagccgcuacuccaagaaguucaagcccgagaucgccacccggcccaaggugcgcggccaggcggggcggaugaacuacuacuggacccucgucgagcccggcgacaagaucacguucgaggccaccgggaaccugguggugccccgcuacgccuucgccaugaagcggaacagcgaguccggcaucaucaucagcgacaucuccguccacgacugcaacacgaccugccagaccccgaagggcgccaucaacaccagccugcccuuccagaacauccaccccgugaccaucggggagugccccaaguacgugaaguccaccaagcuccgcauggcgacgggccugcggaacgucccgagcauccagucccgcgggcuguucggcgccaucgccggguucaucgagggcggcuggaccgggaugaucgacggcugguacggguaccaccaccagaacgagcagggcagcggguacgccgccgaccucaaguccacccagaacgcgaucgacggcaucaccaacaaggugaacagcgugaucgagaagaugaacacgcaguucaccgucgugggcaaggaguucaaccaccuggagaagcggaucgagaaccugaacaagaaggucgacgacggguuccucgacaucuggaccuacaacgccgagcugcuggugcuccuggagaacgagcgcacccuggacuaccacgacuccaacgugaagaaccucuacgagaagguccggagccagcugaagaacaacgccaaggagaucggcaacgggugcuucgaguucuaccacaagugcgacgacacgugcauggaguccgugaagaacggcaccuacgacuaccccaaguacagcgaggaggccaagcugaaccgcgaggagaucgacggggugaagcucgaguccacccggaucuaccagauccuggccaucuacagcaccgucgcguccagccuggugcucguggucagccugggcacgaucuccuucuggaugugcagcaacggcucccugcagugccgcaucugcaucuga

SEQ ID NO: 64050 - RNA, 1707 nt, Artificial Sequence
  derived and/or modified CDS sequence (opt1) from hemagglutinin__InfluenzaA__AAS65618
auggagaagaucgugcugcuguucgccaucgucagccuggugaaguccgaccagaucugcaucggcuaccacgccaacaacagcaccgagcaggucgacaccaucauggagaagaacgugacggugacccacgcgcaggacauccuggagaagacccacaacgggaagcucugcgaccuggacggcgugaagccccugauccuccgcgacugcuccgucgccggguggcugcugggcaacccgaugugcgacgaguucaucaacgugcccgaguggagcuacaucguggagaaggccaaccccgucaacgaccucugcuaccccggggacuucaacgacuacgaggagcugaagcaccuccucucccggaucaaccacuucgagaagauccagaucauccccaagagcuccuggagcucccacgaggugagccugggcguguccagcgccugcccguaccagggcaaguccagcuucuuccgcaacgucguguggcugaucaagaagaacuccaccuaccccacgaucaagcggagcuacaacaacaccaaccaggaggaccuccuggugcugugggggauccaccaccccaacgacgccgcggagcagaccaagcucuaccagaacccgaccacguacaucuccgucggcaccagcacccugaaccagcgccuggugccccggaucgccacccgcuccaaggugaacgggcagagcggccggauggaguucuucuggacgauccucaagcccaacgacgccaucaacuucgagagcaacgggaacuucaucgcccccgaguacgcguacaagaucgucaagaagggcgacuccaccaucaugaaguccgagcuggaguacggcaacugcaacaccaagugccagaccccgaugggggccaucaacagcagcaugcccuuccacaacauccacccccugacgaucggcgagugccccaaguacgugaaguccaaccgccucgugcuggccaccgggcugcggaacagcccgcagcgcgagcggcgccggaagaagcgcggccucuucggcgccaucgccggguucaucgagggcggguggcagggcauggucgacgggugguacggcuaccaccacuccaacgagcagggcagcggguacgcggccgccaaggaguccacccagaaggccaucgacggcgugaccaacaaggugaacagcaucaucgacaagaugaacacgcaguucgaggccgucgggcgggaguucaacaaccuggagcgccggaucgagaaccugaacaagaagauggaggacggcuuccucgacguguggaccuacaacgcggagcugcugguccucauggagaacgagcgcacccuggacuuccacgacuccaacgugaagaaccuguacgacaaggugcggcuccagcugaaggacaacgccaaggagcuggggaacggcugcuucgaguucuaccacaagugcgacaacgagugcauggagagcguccgcaacggcaccuacgacuacccccaguacuccgaggaggcccggcucaagcgcgaggagaucagcggggugaagcuggaguccaucggcaucuaccagauccugagcaucuacuccacgguggccagcucccucgcccuggcgaucauggucgccgggcugagccucuggaugugcagcaacggcucccugcagugccgcaucugcaucuga

SEQ ID NO: 64051 - RNA, 1704 nt, Artificial Sequence
  derived and/or modified CDS sequence (opt1) from hemagglutinin__InfluenzaA__AAT38819
augaacacccagauccuggccuucaucgccugcaugcucaucggcaccaagggggacaagaucugccugggccaccacgcgguggccaacgggacgaaggucaacacccugaccgagcgcggcaucgagguggugaacgccaccgagacggucgagaccgugaacaucaagaagaucugcacccaggggaagcggcccaccgaccucggccagugcggccugcuggggacgcucaucggcccgccccagugcgaccaguuccuggaguucgacgccaaccugaucaucgagcgccgggaggggaccgacgugugcuaccccggcaaguucaccaacgaggagagccuccgccagauccugcggggguccggcggcaucgacaaggagagcaugggguucaccuacuccggcauccgcacgaacggggccaccagcgcgugccggcgcuccggcagcuccuucuacgccgagaugaaguggcugcucagcaacuccgacaacgccgccuucccccagaugaccaagagcuaccggaacccgcgcaacaagcccgcgcugaucaucuggggcguccaccacuccgggagcgccaccgagcagacgaagcuguacggcuccgggaacaagcucaucaccgugggcagcuccaaguaccagcagagcuucacccccucccccggggcccggccccaggugaacggccagagcggccgcaucgacuuccacuggcugcugcucgacccgaacgacaccgucacguucaccuucaacggggccuucaucgcccccgaccgggcguccuucuuccgcggcgagagccugggggugcagagcgacgugccccuggacuccggcugcgagggggacugcuuccacagcggcggcaccaucgucuccagccucccguuccagaacaucaacccccggaccguggggaagugcccccgcuacgugaagcagacgucccugcugcucgccaccggcaugcggaacguccccgagaacccgaagcaggccuaccagaagcagaugacccgcgggcuguucggcgccaucgccggguucaucgagaacggcugggagggccugaucgacgggugguacggcuuccggcaccagaacgcgcagggggagggcaccgccgccgacuacaagagcacgcaguccgccaucgaccagaucaccggcaagcucaaccgccugaucgacaagaccaaccagcaguucgagcugaucgacaacgaguucagcgagaucgagcagcagaucgggaacgugaucaacuggacccgggacuccaugacggagguguggagcuacaacgccgagcuccuggucgcgauggagaaccagcacaccaucgaccuggccgacuccgagaugaacaagcucuacgagcgcgugcgcaagcagcugcgggagaacgccgaggaggacggcaccgggugcuucgagaucuuccacaagugcgacgaccagugcauggagagcauccgcaacaacaccuacgaccacacgcaguaccggaccgagucccugcagaaccgcauccagaucgaccccgugaagcucagcuccggcuacaaggacaucauccugugguucagcuucggggccuccugcuuccugcuccuggccaucgcgaugggccuggucuucaucugcaucaagaacggcaacaugcggugcaccaucugcaucuga

SEQ ID NO: 64052 - RNA, 1707 nt, Artificial Sequence
  derived and/or modified CDS sequence (opt1) from hemagglutinin__InfluenzaA__AAV32636
auggagaagaucgugcugcuguucgccaucgucagccuggugaaguccgaccagaucugcaucggcuaccacgccaacaacagcaccgagcaggucgacaccaucauggagaagaacgugacggugacccacgcgcaggacauccuggagaagacccacaacgggaagcucugcgaccuggacggcgugaagccccugauccuccgcgacugcuccgucgccggguggcugcugggcaacccgaugugcgacgaguucaucaacgugcccgaguggagcuacaucguggagaaggccaaccccgucaacgaccucugcuaccccggggacuucaacgacuacgaggagcugaagcaccuccucucccggaucaaccacuucgagaagauccagaucauccccaagagcuccuggagcucccacgaggccagccugggcguguccagcgccugcccguaccagggcaaguccagcuucuuccgcaacguggucuggcugaucaagaagaacuccaccuaccccacgaucaagcggagcuacaacaacaccaaccaggaggaccuccuggugcugugggggauccaccaccccaacgacgcggccgagcagaccaagcucuaccagaacccgaccacguacaucuccgugggcaccagcacccugaaccagcgccuggucccccggaucgccacccgcuccaaggugaacgggcagagcggccggauggaguucuucuggacgauccucaagcccaacgacgccaucaacuucgagagcaacgggaacuucaucgcgcccgaguacgccuacaagaucgugaagaagggcgacuccaccaucaugaaguccgagcuggaguacggcaacugcaacaccaagugccagaccccgaugggggccaucaacagcagcaugcccuuccacaacauccacccccugacgaucggcgagugccccaaguacgucaaguccaaccgccucgugcuggccaccgggcugcggaacagcccgcagcgcgagcggcgccggaagaagcgcggccucuucggcgccaucgcgggguucaucgagggcggguggcagggcaugguggacgggugguacggcuaccaccacuccaacgagcagggcagcggguacgccgccgacaaggaguccacccagaaggccaucgacggcgucaccaacaaggugaacagcaucaucgacaagaugaacacgcaguucgaggccguggggcgggaguucaacaaccuggagcgccggaucgagaaccugaacaagaagauggaggacggcuuccucgacgucuggaccuacaacgcggagcugcuggugcucauggagaacgagcgcacccuggacuuccacgacuccaacgucaagaaccuguacgacaaggugcggcuccagcugcgcgacaacgccaaggagcuggggaacggcugcuucgaguucuaccacaagugcgacaacgagugcauggagagcgugcggaacggcaccuacgacuacccccaguacuccgaggaggcccgccucaagcgcgaggagaucagcggggucaagcuggaguccaucggcaucuaccagauccugagcaucuacuccacgguggccagcucccucgcccuggcgaucaugguggccgggcugagccucuggaugugcagcaacggcucccugcagugccggaucugcaucuga

SEQ ID NO: 64053 - RNA, 1707 nt, Artificial Sequence; identical to SEQ ID NO: 64052
  derived and/or modified CDS sequence (opt1) from hemagglutinin__InfluenzaA__AAV34704

SEQ ID NO: 64054 - RNA, 1707 nt, Artificial Sequence
  derived and/or modified CDS sequence (opt1) from hemagglutinin__InfluenzaA__AAV65826
auggagaagaucgugcugcuguucgccaucgucagccuggugaaguccgaccagaucugcaucggcuaccacgccaacaacagcaccgagcaggucgacaccaucauggagaagaacgugacggugacccacgcgcaggacauccuggagaagacccacaacgggaagcucugcgaccuggacggcgugaagccccugauccuccgcgacugcuccgucgccggguggcugcugggcaacccgaugugcgacgaguucaucaacgugcccgaguggagcuacaucguggagaaggccaaccccgucaacgaccucugcuaccccggggacuucaacgacuacgaggagcugaagcaccuccucucccggaucaaccacuucgagaagauccagaucauccccaagagcuccuggagcucccacgaggccagccugggcguguccagcgccugcccguaccagggcaaguccagcuucuuccgcaacguggucuggcugaucaagaagaacuccaccuaccccacgaucaagcggagcuacaacaacaccaaccaggaggaccuccuggugcucgggggcauccaccaccccaacgacgcggccgagcagaccaagcuguaccagaacccgaccacguacaucuccguggggaccagcacccugaaccagcgccuggucccccggaucgccacccgcuccaaggugaacggccagagcgggcggauggaguucuucuggacgauccucaagcccaacgacgccaucaacuucgagagcaacggcaacuucaucgcgcccgaguacgccuacaagaucgugaagaagggcgacuccaccaucaugaaguccgagcuggaguacgggaacugcaacaccaagugccagaccccgaugggcgccaucaacagcagcaugcccuuccacaacauccacccccugacgaucggggagugccccaaguacgucaaguccaaccgccucgugcuggccaccggccugcggaacagcccgcagcgcgagcggcgccggaagaagcgcggccucuucggggccaucgcgggcuucaucgagggcggguggcaggggaugguggacggcugguacggcuaccaccacuccaacgagcaggggagcggcuacgccgccgacaaggaguccacccagaaggccaucgacggggucaccaacaaggugaacagcaucaucgacaagaugaacacgcaguucgaggccgugggccgggaguucaacaaccuggagcgccggaucgagaaccugaacaagaagauggaggacggguuccucgacgucuggaccuacaacgcggagcugcuggugcucauggagaacgagcgcacccuggacuuccacgacuccaacgucaagaaccuguacgacaaggugcggcuccagcugcgcgacaacgccaaggagcugggcaacggcugcuucgaguucuaccacaagugcgacaacgagugcauggagagcgugcggaacgggaccuacgacuacccccaguacuccgaggaggcccgccucaagcgcgaggagaucagcggcgucaagcuggaguccaucgggaucuaccagauccugagcaucuacuccacgguggccagcucccucgcccuggcgaucaugguggccggccugagccucuggaugugcagcaacgggucccugcagugccggaucugcaucuga

SEQ ID NO: 64055 - RNA, 1701 nt, Artificial Sequence
  derived and/or modified CDS sequence (opt1) from hemagglutinin__InfluenzaA__AAX11505
augaagaccaucaucgcccugagcuacauccucugccugguguucgcccagaagcugcccggcaacgacaacuccaccgcgacgcucugccuggggcaccacgccgucccgaacggcaccaucgugaagaccaucaccaacgaccagaucgaggugacgaacgccaccgagcugguccagagcuccagcaccgggggcaucugcgacagcccccaccagauccucgacggggagaacugcacccugaucgacgcccugcucggcgacccccagugcgacggcuuccagaacaagaagugggaccuguucguggagcgcagcaaggccuacuccaacugcuaccccuacgacgugccggacuacgcgagccugcggucccucgucgccagcuccgggacgcuggaguucaacaacgagagcuucaacuggaccggcgugacccagaacgggaccuccagcgccugcgagcgccgguccaacaagagcuucuucucccgccugaacuggcucacgcaccugaaguacaaguaccccgcccugaacgugaccaugcccaacaacgagaaguucgacaagcucuacaucuggggcguccaccaccccgggaccgacagcgaccagaucucccuguacgcgcaggccagcggccggaucaccgugagcacgaagcgcucccagcagaccgugaucccgaacaucggcagccggccccgcguccgggacguguccagccgcaucuccaucuacuggaccaucgugaagcccggggacauccugcucaucaacagcaccggcaaccugaucgcgccccggggguacuucaagauccgcuccggcaagagcuccaucaugcggagcgacgccccgaucggcaagugcaacuccgagugcaucacgcccaacgggagcauccccaacgacaagcccuuccagaacgucaaccgcaucaccuacggcgccugcccgcgguacgugaagcagaacacccugaagcucgccaccgggaugcgcaacgugcccgagaagcagacgcggggcaucuucggggccaucgccggcuucaucgagaacggcugggaggggauggucgacggcugguacggguuccgccaccagaacuccgagggcaccgggcaggccgccgaccugaaguccacccaggcggccaucaaccagaucaacggcaagcugaaccggcucaucggcaagaccaacgagaaguuccaccagaucgagaaggaguucuccgagguggaggggcgcauccaggaccuggagaaguacguggaggacacgaagaucgaccuguggagcuacaacgccgagcuccuggucgcccuggagaaccagcacaccaucgaccucaccgacuccgagaugaacaagcuguucgagcggaccaagaagcagcugcgcgagaacgccgaggacaugggcaacgggugcuucaagaucuaccacaagugcgacaacgcgugcaucggcagcauccgcaacgggacguacgaccacgacguguaccgggacgaggcccucaacaaccgcuuccagaucaagggcguggagcugaaguccggcuacaaggacuggauccuguggaucagcuucgccaucagcugcuuccuccugugcgucgcccugcucggguucaucaugugggccugccagaagggcaacauccggugcgacaucugcaucuga

SEQ ID NO: 64056 - RNA, 1701 nt, Artificial Sequence
  derived and/or modified CDS sequence (opt1) from hemagglutinin__InfluenzaA__AAX11525
augaagaccaucaucgcccugagcuacauccucugccugguguucgcccagaagcugcccggcaacgacaacuccaccgcgacgcucugccuggggcaccacgccgucccgaacggcaccaucgugaagaccaucaccaacgaccagaucgaggugacgaacgccaccgagcugguccagagcuccagcaccgggggcaucugcgacagcccccaccagauccucgacggggagaacugcacccugaucgacgcccugcucggcgacccccagugcgacggcuuccagaacaagaagugggaccuguucguggagcgcagcaaggccuacuccaacugcuaccccuacgacgugccggacuacgcgagccugcggucccucgucgccagcuccgggacgcuggaguucaacaacgagagcuucgacuggaccggcgugacccagaacgggaccuccagcgccugcaagcgccgguccaacaagagcuucuucucccgccugaacuggcucacgcaccugaaguacaaguaccccgcccugaacgugaccaugcccaacaacgagaaguucgacaagcucuacaucuggggcguccaccaccccgggaccgacagcgaccagaucucccuguacgcgcaggccagcggccggaucaccgugagcacgaagcgcucccagcagaccgugaucccgaacaucggcagccggccccgcguccgggacguguccagccgcaucuccaucuacuggaccaucgugaagcccggggacauccugcucaucaacagcaccggcaaccugaucgcgccccggggguacuucaagauccgcuccggcaagagcuccaucaugcggagcgacgccccgaucggcaagugcaacuccgagugcaucacgcccaacgggagcauccccaacgacaagcccuuccagaacgucaaccgcaucaccuacggcgccugcccgcgguacgugaagcagaacacccugaagcucgccaccgggaugcgcaacgugcccgagaagcagacgcggggcaucuucggggccaucgccggcuucaucgagaacggcugggaggggauggucgacggcugguacggguuccgccaccagaacuccgagggcaccgggcaggccgccgaccugaaguccacccaggcggccaucaaccagaucaacggcaagcugaaccggcucaucggcaagaccaacgagaaguuccaccagaucgagaaggaguucuccgagguggaggggcgcauccaggaccuggagaaguacguggaggacacgaagaucgaccuguggagcuacaacgccgagcuccuggucgcccuggagaaccagcacaccaucgaccucaccgacuccgagaugaacaagcuguucgagcggaccaagaagcagcugcgcgagaacgccgaggacaugggcaacgggugcuucaagaucuaccacaagugcgacaacgcgugcaucggcagcauccgcaacgggacguacgaccacgacguguaccgggacgaggcccucaacaaccgcuuccagaucaagggcguggagcugaaguccggcuacaaggacuggauccuguggaucagcuucgccaucagcugcuuccuccugugcgucgcccugcucggguucaucaugugggccugccagaagggcaacauccggugcaacaucugcaucuga

SEQ ID NO: 64057 - RNA, 1701 nt, Artificial Sequence; identical to SEQ ID NO: 64056
  derived and/or modified CDS sequence (opt1) from hemagglutinin__InfluenzaA__AAX11535

SEQ ID NO: 64058 - RNA, 1701 nt, Artificial Sequence; identical to SEQ ID NO: 64056
  derived and/or modified CDS sequence (opt1) from hemagglutinin__InfluenzaA__AAX11545

SEQ ID NO: 64059 - RNA, 1701 nt, Artificial Sequence; identical to SEQ ID NO: 64055
  derived and/or modified CDS sequence (opt1) from hemagglutinin__InfluenzaA__AAX11555

SEQ ID NO: 64060 - RNA, 1701 nt, Artificial Sequence; identical to SEQ ID NO: 64056
  derived and/or modified CDS sequence (opt1) from hemagglutinin__InfluenzaA__AAX11565

SEQ ID NO: 64061 - RNA, 1701 nt, Artificial Sequence
  derived and/or modified CDS sequence (opt1) from hemagglutinin__InfluenzaA__AAX11585
augaagaccaucaucgcccugagcuacauccucugccugguguucgcccagaagcugcccggcaacgacaacuccaccgcgacgcucugccuggggcaccacgccgucccgaacggcaccaucgugaagaccaucaccaacgaccagaucgaggugacgaacgccaccgagcugguccagaucagcuccaccgggggcaucugcgacagcccccaccagauccucgacggggagaacugcacccugaucgacgcccugcucggcgacccccagugcgacggcuuccagaacaagaagugggaccuguucguggagcgcuccaaggccuacagcaacugcuaccccuacgacgugccggacuacgcgucccugcggagccucgucgccuccagcgggacgcuggaguucaacaacgaguccuucgacuggaccggcgugacccagaacgggaccagcuccgccugcaagcgccggagcaacaaguccuucuucagccgccugaacuggcucacgcaccugaaguacaaguaccccgcccugaacgugaccaugcccaacaacgagaaguucgacaagcucuacaucuggggcguccaccaccccgggaccgacaacgaccagaucucccuguacgcgcaggccagcggccggaucaccguguccacgaagcgcagccagcagaccgugaucccgaacaucggcagccggccccgcguccgggacguguccagccagaucuccaucuacuggaccaucgugaagcccggggacauccugcucaucaacagcaccggcaaccugaucgcgccccgcggguacuucaagauccgguccggcaagagcuccaucaugcgcagcgacgccccgaucggcaagugcaacuccgagugcaucacgcccaacgggagcauccccaacgacaagcccuuccagaacgucaaccggaucaccuacggcgccugcccgcgcuacgugaagcagaacacccugaagcucgccaccgggaugcggaacgugcccgagaagcagacgcgcggcaucuucggggccaucgccggcuucaucgagaacggcugggaggggauggucgacggcugguacggguuccggcaccagaacuccgagggcaccgggcaggccgccgaccucaagagcacccaggcggccaucaaccagaucaacggcaagcugaaccgccugaucggcaagaccaacgagaaguuccaccagaucgagaaggaguucuccgagguggaggggcggauccaggaccuggagaaguacguggaggacacgaagaucgaccuguggagcuacaacgccgagcuccuggucgcccuggagaaccagcacaccaucgaccucaccgacuccgagaugaacaagcuguucgagcgcaccaagaagcagcugcgggagaacgccgaggacaugggcaacgggugcuucaagaucuaccacaagugcgacaacgcgugcaucggcagcauccgcaacgggacguacgaccacgacguguaccgcgacgaggcccucaacaaccgguuccagaucaagggcguggagcugaaguccggcuacaaggacuggauccuguggaucagcuucgccaucuccugcuuccuccugugcgucgcccugcucggguucaucaugugggccugccagaagggcaacauccgcugcaacaucugcaucuga

SEQ ID NO: 64062 - RNA, 1701 nt, Artificial Sequence; identical to SEQ ID NO: 64056
  derived and/or modified CDS sequence (opt1) from hemagglutinin__InfluenzaA__AAX11605

SEQ ID NO: 64063 - RNA, 1701 nt, Artificial Sequence; identical to SEQ ID NO: 64056
  derived and/or modified CDS sequence (opt1) from hemagglutinin__InfluenzaA__AAX11615

SEQ ID NO: 64064 - RNA, 1701 nt, Artificial Sequence
  derived and/or modified CDS sequence (opt1) from hemagglutinin__InfluenzaA__AAX11625
augaagaccaucaucgcccugagcuacauccucugccugguguucgcccagaagcugcccggcaacgacaacuccaccgcgacgcucugccuggggcaccacgccgucccgaacggcacccuggugaagaccaucaccaacgaccagaucgaggugacgaacgccaccgagcucguccagagcuccagcaccucccgcaucugcgacagcccccaccagauccuggacggggagaacugcacccugaucgacgcccuccugggcgacccccacugcgacggguuccagaacaaggagugggaccuguucguggagcgguccaaggccuacagcaacugcuaccccuacgacgugccggacuacgucucccuccgcagccugguggcguccagcggcacgcuggaguucaacaacgaguccuucaacuggaccggcguggcccagaacgggaccagcuccgccugcaagcggcgcagcgacaaguccuucuucagccggcucaacuggcugcaccagcugaaguacaaguaccccgcccucaacgucaccaugcccaacaacgagaaguucgacaagcuguacaucuggggcgugcaccaccccgggacggacuccgaccagaucagccuguacgcgcaggccagcggccgcgugaccgucuccaccaagcggagccagcagaccgugaucccgaacaucggguccggccccugggugcgcggcgucagcucccggaucagcaucuacuggacgaucgugaagcccggggacauccuccugaucaacuccaccggcaaccugaucgcgccccgcggguacuucaagauccggagcggcaaguccagcaucaugcgcuccgacgccccgaucggcaagugcaacagcgagugcaucacccccaacggguccauccccaacgacaagcccuuccagaacgugaaccggaucaccuacggcgccugcccgcgcuacgucaagcagaacacgcucaagcuggccaccgggaugcggaacgugcccgagaagcaggcccgcggcaucuucggggccaucgccggcuucaucgagaacggcugggaggggaugauggacggcugguacggguuccggcaccagaacagcgagggcaccgggcaggccgcggaccugaaguccacccaggccgccaucaaccagaucaacggcaagcucaaccgccugaucgagaagacgaacgagaaguuccaccagaucgagaaggaguucagcgagguggagggccggauccaggaccuggagaaguacgucgaggacaccaagaucgaccucugguccuacaacgccgagcugcugguggcccucgagaaccagcacaccaucgaccugaccgacagcgagaugaacaagcuguucgagcgcacgaagaagcagcuccgggagaacgcggaggacauggggaacggcugcuucaagaucuaccacaagugcgacaacgccugcaucggguccauccgcaacggcaccuacgaccacgacguguaccgcgacgaggcccugaacaaccgguuccagaucaagggggucgagcucaagagcggcuacaaggacuggauccuguggaucagcuucgccaucuccugcuuccugcugugcaucgugcuccugggcuucaucaugugggccugccagaaggggaacauccgcugcaacaucugcaucuga

SEQ ID NO: 64065 - RNA, 1701 nt, Artificial Sequence; identical to SEQ ID NO: 64056
  derived and/or modified CDS sequence (opt1) from hemagglutinin__InfluenzaA__AAX12731

SEQ ID NO: 64066 - RNA, 1701 nt, Artificial Sequence
  derived and/or modified CDS sequence (opt1) from hemagglutinin__InfluenzaA__AAX12741
augaagaccaucaucgcccugagcuacauccucugccugguguucgcccagaagcugcccggcaacgacaacuccaccgcgacgcucugccuggggcaccacgccgucccgaacggcaccaucgugaagaccaucaccaacgaccagaucgaggugacgaacgccaccgagcugguccagagcuccagcaccgggggcaucugcgacagcccccaccagauccucgacggggagaacugcacccugaucgacgcccugcucggcgacccccagugcgacggcuuccagaacaagaagugggaccuguucguggagcgcagcaaggccuacuccaacugcuaccccuacgacgugccggacuacgcgagccugcggucccucgucgccagcuccgggacgcuggaguucaacaacgagagcuucgacuggaccggcgugacccagaacgggaccuccagcgccugcaagcgccgguccaacaagagcuucuucucccgccugaacuggcucacgcaccugaaguacaaguaccccgcccugaacgugaccaugcccaacaacgagaaguucgacaagcucuacaucuggggcguccaccaccccgggaccgacagcgaccagaucucccuguacgcgcaggccagcggccggaucaccgugagcacgaagcgcucccagcagaccgugaucccgaacaucggcagccggccccgcguccgggacguguccagccgcaucuccaucuacuggaccaucgugaagcccggggacauccugcucaucaacagcaccggcaaccugaucgcgccccggggguacuucaagauccgcuccggcaagagcuccaucaugcggagcgacgccccgaucggcaagugcaacuccgagugcaucacgcccaacgggagcauccccaacgacaagcccuuccagaacgucaaccgcaucaccuacggcgccugcccgcgguacgugaagcagaacacccugaagcucgccaccgggaugcgcaacgugcccgagaagcagacgcggggcaucuucggggccaucgccggcuucaucgagaacggcugggaggggauggucgacggcugguacggguuccgccaccagaacuccgagggcaccgggcaggccgccgaccugaaguccacccaggcggccaucaaccagaucaacggcaagcugaaccggcucaucggcaagaccaacgagaaguuccaccagaucgagaaggaguucuccgagguggaggggcgcauccaggaccuggagaaguacguggaggacacgaagaucgaccuguggagcuacaacgccgagcuccuggucgcccuggagaaccagcacaccaucgaccucaccgacuccgagaugaacaagcuguucgagcggaccaagaagcagcugcgcgagaacgccgaggacaugggcaacgggugcuucaagaucuaccacaagugcgacaacgcgugcaucggcagcauccgcaacgggacguacgaccacgacguguaccgggacgaggcccucaacaaccgcuuccagaucaagggcguggagcugaaguccggcuacaaggacuggauccuguggaucagcuucgccaccagcugcuuccuccugugcgucgcccugcucggguucaucaugugggccugccagaagggcaacauccggugcaacaucugcaucuga

SEQ ID NO: 64067 - RNA, 1701 nt, Artificial Sequence; identical to SEQ ID NO: 64056
  derived and/or modified CDS sequence (opt1) from hemagglutinin__InfluenzaA__AAX12751

SEQ ID NO: 64068 - RNA, 1701 nt, Artificial Sequence
  derived and/or modified CDS sequence (opt1) from hemagglutinin__InfluenzaA__AAX12761
augaagaccaucaucgcccugagcuacauccucugccugguguucgcccagaagcugcccggcaacgacaacuccaccgcgacgcucugccuggggcaccacgccgucccgaacggcacccuggugaagaccaucaccaacgaccagaucgaggugacgaacgccaccgagcucguccagagcuccagcaccgggcgcaucugcgacagcccccaccagauccuggacggcgagaacugcacccugaucgacgcccuccugggggacccccacugcgacggcuuccagaacaaggagugggaccuguucguggagcggagcaaggccuacuccaacugcuaccccuacgacgugccggacuacgucagccuccgcucccugguggcgagcuccggcacgcuggaguucaacaacgagagcuucaacuggaccgggguggcccagaacggcaccuccagcgccugcaagcggcgcuccgacaagagcuucuucucccggcucaacuggcugcaccagcugaaguacaaguaccccgcccucaacgucaccaugcccaacaacgagaaguucgacaagcuguacaucuggggcgugcaccaccccgggacggacagcgaccagaucucccuguacgcgcaggccagcgggcgcgugaccgucagcaccaagcggucccagcagaccgugaucccgaacaucggcagccgccccugggugcggggcgucuccagccgcaucuccaucuacuggacgaucgugaagcccggggacauccuccugaucaacagcaccggcaaccugaucgcgccccggggguacuucaagauccgcuccggcaagagcuccaucaugcggagcgacgccccgaucggcaagugcaacuccgagugcaucacccccaacgggagcauccccaacgacaagcccuuccagaacgugaaccgcaucaccuacggcccgugcccccgguacgucaagcagaacacgcucaagcuggccaccgggaugcgcaacgugcccgagaagcagacccggggcaucuucggggccaucgccggcuucaucgagaacggcugggaggggaugauggacggcugguacggguuccgccaccagaacuccgagggcaccgggcaggccgccgaccugaaguccacgcaggccgcgaucaaccagaucaacggcaagcucaaccggcugaucgagaagaccaacgagaaguuccaccagaucgagaaggaguucuccgagguggagggccgcauccaggaccuggagaaguacgucgaggacaccaagaucgaccucuggagcuacaacgccgagcugcugguggcccucgagaaccagcacaccaucgaccugacggacuccgagaugaacaagcuguucgagcggaccaagaagcagcuccgcgagaacgccgaggacauggggaacggcugcuucaagaucuaccacaagugcgacaacgugugcaucgggagcauccgcaacggcaccuacgaccacgacgucuaccgggacgaggcccugaacaaccgcuuccagaucaaggggguggagcugaaguccggcuacaaggacuggauccucuggaucagcuucgcgaucagcugcuuccugcugugcaucguccuccugggcuucaucaugugggccugccagaaggggaacauccggugcaacaucugcaucuga

SEQ ID NO: 64069 - RNA, 1701 nt, Artificial Sequence
  derived and/or modified CDS sequence (opt1) from hemagglutinin__InfluenzaA__AAX12791
augaagaccaucaucgcccugagcuacauccucugccugguguucgcccagaagcugcccggcaacgacaacuccauggcgacccucugccuggggcaccacgccgucccgaacggcacgcuggugaagaccaucaccaacgaccagaucgaggugaccaacgccacggagcucguccagagcuccagcaccgggcgcaucugcgacagcccccaccagauccuggacggcgagaacugcacccugaucgacgcccuccugggggacccccacugcgacggcuuccagaacaaggagugggaccuguucguggagcgguccaaggccuacuccaacugcuaccccuacgacgugccggacuacgucagccuccgcucccugguggcgagcuccggcacccuggaguucaacaacgagagcuucaacuggacggggguggcccagaacggcaccuccagcgccugcaagcggcgcuccgacaagagcuucuucucccggcucaacuggcugcaccagcugaaguacaaguaccccgcccucaacgucaccaugcccaacaacgagaaguucgacaagcuguacaucuggggcgugcaccaccccgggaccgacagcgaccagaucucccuguacgcgcaggccagcgggcgcgugacggucagcaccaagcggucccagcagaccgugaucccgaacaucggcagcggccccugggugcgcggggucuccagccggaucuccaucuacuggaccaucgugaagcccggcgacauccuccugaucaacagcacggggaaccugaucgcgccccgcggcuacuucaagauccgguccggcaagagcuccaucaugcgcagcgacgccccgaucgacaagugcaacuccgagugcaucacccccaacgggagcauccccaacgacaagcccuuccagaacgugaaccggaucaccuacggccucugcccgcgcuacgucaagcagaacacccugaagcuggccacggggaugcggaacgugcccgagaagcagacccgcggcaucuucggggccaucgccggcuucaucgagaacggcugggaggggaugauggacggcugguacggguuccggcaccagaacuccgagggcaccgggcaggccgccgaccucaagagcacccaggccgcgaucaaccagaucaacggcaagcugaaccgccugaucgagaagacgaacgagaaguuccaccagaucgagaaggaguucuccgagguggagggccggauccaggaccucgagaaguacgucgaggacaccaagaucgaccuguggagcuacaacgccgagcugcucguggcccuggagaaccagcacaccaucgaccugaccgacuccgagaugaacaagcuguucgagcgcacgaagaagcagcuccgggagaacgccgaggacauggggaacggcugcuucaagaucuaccacaagugcgacaacgccugcaucgggagcauccgcaacggcaccuacgaccacgacguguaccgcgacgaggcgcugaacaaccgguuccagaucaagggggucgagcucaaguccggcuacaaggacuggauccuguggaucagcuucgccaucagcugcuuccugcucugcaucgugcugcugggcuucaucaugugggccugccagaaggggaacauccgcugcaacaucugcaucuga

SEQ ID NO: 64070 - RNA, 1701 nt, Artificial Sequence
  derived and/or modified CDS sequence (opt1) from hemagglutinin__InfluenzaA__AAX12801
augaagaccaucaucgcccugagcuacauccucugccugguguucgcccagaaguuccccggcaacgacaacuccaccgcgacgcugugccucgggcaccacgccgucccgaacggcacccuggugaagaccaucaccaacgaccagaucgaggugacgaacgccaccgagcugguccagagcuccagcaccgaccgcaucugcgacagcccccaccagauccucgacggggagaacugcacccugaucgacgcccugcucggcgacccccacugcgacggguuccagaacaaggagugggaccuguucguggagcggagcaaggccuacuccaacugcuaccccuacgacgugccggacuacgucagccugcgcucccucguggcgagcuccggcacgcuggaguucaacaacgagagcuucaacuggaccggcguggcccagaacgggaccuccagcgccugcaagcggcgcuccgacaagagcuucuucucccggcugaacuggcuccaccagcugaaguacaaguaccccgcccugaacgucaccaugcccaacaacgagaaguucgacaagcucuacaucuggggcgugcaccaccccgggacggacagcgaccagaucucccuguacgcgcaggccagcggccgcgugaccgucagcaccaagcggucccagcagaccgugaucccgaacaucgggagccgccccugggugcggggcgucuccagccgcaucuccaucuacuggacgaucgugaagcccggcgacauccugcucaucaacagcaccgggaaccugaucgcgccccggggcuacuucaagauccgcuccgggaaguccuccaucaugcggagcgacgccccgaucggcaagugcaacuccgagugcaucacccccaacggcagcauccccaacgacaagcccuuccagaacgugaaccgcaucaccuacggggccugcccgcgguacgucaagcagaacacgcugaagcucgccaccggcaugcgcaacgugcccgagaagcagacccgggggaucuucggcgccaucgccggguucaucgagaacggcugggagggcaugauggacgggugguacggcuuccgccaccagaacuccgaggggaccggccaggccgccgaccucaagagcacgcaggcggccaucaaccagaucaacgggaagcugaaccggcugaucgagaagaccaacgagaaguuccaccagaucgagaaggaguucuccgagguggagggccgcauccaggaccuggagaaguacgucgaggacaccaagaucgaccuguggagcuacaacgccgagcuccugguggcccuggagaaccagcacaccaucgaccucacggacuccgagaugaacaagcuguucgagcggaccaagaagcagcugcgcgagaacgccgaggacaugggcaacgggugcuucaagaucuaccacaagugcgacaacgcgugcaucggcagcauccgcaacgggaccuacgaccacgacguguaccgggacgaggcccucaacaaccgcuuccagaucaagggcgucgagcugaaguccggguacaaggacuggauccuguggaucagcuucgccaucagcugcuuccuccugugcaucgugcugcucggcuucaucaugugggccugccagaagggcaacauccggugcaacaucugcaucuga

SEQ ID NO: 64071 - RNA, 1701 nt, Artificial Sequence
  derived and/or modified CDS sequence (opt1) from hemagglutinin__InfluenzaA__AAX12811
augaagaccaucaucgcccugagcuacauccucugccugguguucgcccagaagcugcccggcaacgacaacuccaccgcgacgcucugccuggggcaccacgccgucccgaacggcacccuggugaagaccaucaccaacgaccagaucgaggugacgaacgccaccgagcucguccagagcuccagcaccucccgcaucugcgacagcccccaccagauccuggacggggagaacugcacccugaucgacgcccuccugggcgacccccacugcgacggguuccagaacaaggagugggaccuguucguggagcgguccaaggccuacagcaacugcuaccccuacgacgugccggacuacgucucccuccgcagccugguggcguccagcggcacgcuggaguucaacaacgaguccuucaacuggaccggcguggcccagaacgggaccagcuccgccugcaagcggcgcagcgacaaguccuucuucagccggcucaacuggcugcaccagcugaaguacaaguaccccgcccucaacgucaccaugcccaacaacgagaaguucgacaagcuguacaucuggggcgugcaccaccccgggacggacuccgaccagaucagccuguacgcgcaggccagcggccgcgugaccgucuccaccaagcggagccagcagaccgugaucccgaacaucgggucccgccccugggugcggggcgucagcucccgcaucagcaucuacuggacgaucgugaagcccggcgacauccuccugaucaacuccaccgggaaccugaucgcgccccggggcuacuucaagauccgcagcgggaaguccagcaucaugcgguccgacgccccgaucggcaagugcaacagcgagugcaucacccccaacggcuccauccccaacgacaagcccuuccagaacgugaaccgcaucaccuacggggccugcccgcgguacgucaagcagaacacgcucaagcuggccaccggcaugcgcaacgugcccgagaagcagacccgggggaucuucggcgccaucgccggguucaucgagaacggcugggagggcaugauggacgggugguacggcuuccgccaccagaacagcgaggggaccggccaggccgccgaccugaaguccacgcaggcggccaucaaccagaucaacgggaagcucaaccggcugaucgagaagaccaacgagaaguuccaccagaucgagaaggaguucagcgagguggagggccgcauccaggaccuggagaaguacgucgaggacaccaagaucgaccucugguccuacaacgccgagcugcugguggcccucgagaaccagcacaccaucgaccugacggacagcgagaugaacaagcuguucgagcggaccaagaagcagcuccgcgagaacgccgaggacaugggcaacgggugcuucaagaucuaccacaagugcgacaacgcgugcaucggcuccauccgcaacgggaccuacgaccacgacguguaccgggacgaggcccugaacaaccgcuuccagaucaagggcgucgagcucaagagcggguacaaggacuggauccuguggaucagcuucgccaucuccugcuuccugcugugcaucgugcuccugggcuucaucaugugggccugccagaagggcaacauccggugcaacaucugcaucuga

SEQ ID NO: 64072 - RNA, 1701 nt, Artificial Sequence
  derived and/or modified CDS sequence (opt1) from hemagglutinin__InfluenzaA__AAX34061
augaagaccaucaucgcccugagcuacauccucugccugguguucgcccagaagcugcccggcaacgacaacuccaccgcgacgcucugccuggggcaccacgccgucccgaacggcaccaucgugaagaccaucaccaacgaccagaucgaggugacgaacgccaccgagcugguccagagcuccagcaccggggagaucugcgacagcccccaccagauccucgacggcgagaacugcacccugaucgacgcccugcucggggacccccagugcgacggcuuccagaacaagaagugggaccuguucguggagcgcagcaaggccuacuccaacugcuaccccuacgacgugccggacuacgcgagccugcggucccucgucgccagcuccggcacgcuggaguucaacaacgagagcuucgacuggaccggggugacccagaacggcaccuccagcgccugcaagcgccgguccaacaagagcuucuucucccgccugaacuggcucacgcaccugaaguacaaguaccccgcccugaacgugaccaugcccaacaacgagaaguucgacaagcucuacaucuggggcguccaccaccccgggaccgacagcgaccagaucucccuguacgcgcaggccagcgggcggaucaccgugagcacgaagcgcucccagcagaccgugaucccgaacaucggcagccggccccgcguccgggacguguccagccgcaucuccaucuacuggaccaucgugaagcccggcgacauccugcucaucaacagcaccgggaaccugaucgcgccccggggcuacuucaagauccgcuccgggaaguccuccaucaugcggagcgacgccccgaucggcaagugcaacuccgagugcaucacgcccaacggcagcauccccaacgacaagcccuuccagaacgucaaccgcaucaccuacggggccugcccgcgguacaucaagcagaacacccugaagcucgccaccggcaugcgcaacgugcccgagaagcagacgcgggggaucuucggcgccaucgccggguucaucgagaacggcugggagggcaugguggacgggugguacggcuuccgccaccagaacuccgaggggaccggccaggccgccgaccucaagagcacccaggcggccaucaaccagaucaacgggaagcugaaccggcugaucggcaagaccaacgagaaguuccaccagaucgagaaggaguucuccgaggucgagggccgcauccaggaccuggagaaguacguggaggacacgaagaucgaccuguggagcuacaacgccgagcuccugguggcccuggagaaccagcacaccaucgaccucaccgacuccgagaugaacaagcuguucgagcggaccaagaagcagcugcgcgagaacgccgaggacauggggaacggcugcuucaagaucuaccacaagugcgacaacgcgugcaucgggagcauccgcaacggcacguacgaccacgacgucuaccgggacgaggcccucaacaaccgcuuccagaucaaggggguggagcugaaguccggcuacaaggacuggauccuguggaucagcuucgccaucagcugcuuccuccugugcguggcccugcucggcuucaucaugugggccugccagaaggggaacauccggugcaacaucugcaucuga

SEQ ID NO: 64073 - RNA, 1701 nt, Artificial Sequence
  derived and/or modified CDS sequence (opt1) from hemagglutinin__InfluenzaA__AAX35821
augaagaccaucaucgcccugagcuacauccucugccugguguucgcccagaagcugcccggcaacgacaacuccaccgcgacgcucugccuggggcaccacgccgucccgaacggcaccaucgugaagaccaucaccaacgaccagaucgaggugacgaacgccaccgagcugguccagagcuccagcaccgggggcaucugcgacagcccccaccagauccucgacggggagaacugcacccugaucgacgcccugcucggcgacccccagugcgacggcuuccagaacaagaagugggaccuguucguggagcgcagcaaggccuacuccaacugcuaccccuacgacgugccggacuacgcgagccugcggucccucgucgccagcuccgggacgcuggaguucaacaacgagagcuucaacuggaccggcgugacccagaacgggaccuccagcgccugcaagcgcaaguccaacaagagcuucuucucccggcugaacuggcucacgcaccugaaguacaaguaccccgcccugaacgugaccaugcccaacaacgagaaguucgacaagcucuacaucuggggcguccaccaccccgggaccgacaacgaccagaucagccuguacgcgcaggccuccggccgcaucaccgugagcacgaagcggagccagcagaccgugaucccgaacaucggcucccgcccccggguccgcgacgugagcucccggaucagcaucuacuggaccaucgugaagcccggggacauccugcucaucaacuccaccggcaaccugaucgcgccccgcggguacuucaagauccggagcggcaaguccagcaucaugcgcuccgacgccccgaucggcaagugcaacagcgagugcaucacgcccaacggguccauccccaacgacaagcccuuccagaacgucaaccggaucaccuacggcgccugcccgcgcuacgugaagcagaacacccugaagcucgccaccgggaugcggaacgugcccgagcgccagacgcggggcaucuucggggccaucgccggcuucaucgagaacggcugggaggggauggucgacggcugguacggguuccgccaccagaacagcgagggcaccgggcaggccgccgaccugaaguccacccaggcggccaucaaccagaucaacggcaagcugaaccggcucaucggcaagaccaacgagaaguuccaccagaucgagaaggaguucagcgagguggaggggcgcauccaggaccuggagaaguacguggaggacacgaagaucgaccugugguccuacaacgccgagcuccuggucgcccuggagaaccagcacaccaucgaccucaccgacagcgagaugaacaagcuguucgagcggaccaagaagcagcugcgcgagaacgccgaggacaugggcaacgggugcuucaagaucuaccacaagugcgacaacgcgugcaucggcuccauccgcaacgggacguacgaccacgacguguaccgggacgaggcccucaacaaccgcuuccagaucaagggcguggagcugaaguccggcuacaaggacuggauccuguggaucuccuucgccaucagcugcuuccuccugugcgucgcccugcucggguucaucaugugggccugccagaagggcaacauccggugcaacaucugcaucuga

SEQ ID NO: 64074 - RNA, 1701 nt, Artificial Sequence; identical to SEQ ID NO: 64055
  derived and/or modified CDS sequence (opt1) from hemagglutinin__InfluenzaA__AAX35831

SEQ ID NO: 64075 - RNA, 1701 nt, Artificial Sequence
  derived and/or modified CDS sequence (opt1) from hemagglutinin__InfluenzaA__AAX35851
augaagaccaucaucgcccugagcuacauccucugccugguguucgcccagaagcugcccggcaacgacaacuccaccgcgacgcucugccuggggcaccacgccgucccgaacggcacccuggugaagaccaucaccaacgaccagaucgaggugacgaacgccaccgagcucguccagagcuccagcaccgggcgcaucugcgacagcccccaccagauccuggacggcgagaacugcacccugaucgacgcccuccugggggacccccacugcgacggcuuccagaacaaggagugggaccuguucguggagcggagcaaggccuacuccaacugcuaccccuacgacgugccggacuacgucagccuccgcucccugguggcgagcuccggcacgcuggaguucaacaacgagagcuucaacuggaccgggguggcccagaacggcaccuccagcgccugcaagcggcgcuccgacaagagcuucuucucccggcucaacuggcugcaccagcugaaguacaaguaccccgcccucaacgucaccaugcccaacaacgagaaguucgacaagcuguacaucuggggcgugcaccaccccgggacggacagcgaccagaucucccuguacgcgcaggccagcgggcgcgugaccgucagcaccaagcggucccagcagaccgugaucccgaacaucggcagccgccccugggugcggggcgucuccagccgcaucuccaucuacuggacgaucgugaagcccggggacauccuccugaucaacagcaccggcaaccugaucgcgccccggggguacuucaagauccgcuccggcaagagcuccaucaugcggagcgacgccccgaucggcaagugcaacuccgagugcaucacccccaacgggagcauccccaacgacaagcccuuccagaacgugaaccgcaucaccuacggcccgugcccccgguacgucaagcagaacacgcucaagcuggccaccgggaugcgcaacgugcccgagaagcagacccggggcaucuucggggccaucgccggcuucaucgagaacggcugggaggggaugauggacggcugguacggguuccgccaccagaacuccgagggcaccgggcaggccgccgaccugaaguccacgcaggccgcgaucaaccagaucaacggcaagcucaaccggcugaucgagaagaccaacgagaaguuccaccagaucgagaaggaguucuccgagguggagggccgcauccaggaccuggagaaguacgucgaggacaccaagaucgaccucuggagcuacaacgccgagcugcugguggcccucgagaaccagcacaccaucgaccugacggacuccgagaugaacaagcuguucgagcggaccaagaagcagcuccgcgagaacgccgaggacauggggaacggcugcuucaagaucuaccacaagugcgacaacgccugcaucgggagcauccgcaacggcaccuacgaccacgacguguaccgggacgaggcgcugaacaaccgcuuccagaucaagggggucgagcugaaguccggcuacaaggacuggauccucuggaucagcuucgccaucagcugcuuccugcugugcaucgugcuccugggcuucaucaugugggccugccagaaggggaacauccggugcaacaucugcaucuga

SEQ ID NO: 64076 - RNA, 1701 nt, Artificial Sequence
  derived and/or modified CDS sequence (opt1) from hemagglutinin__InfluenzaA__AAX35861
augaagaccaucaucgcccugagcuacauccucugccugguguucgcccagaagcugcccggcaacgacaacuccaccgcgacgcucugccuggggcaccacgccgucccgaacggcacccuggugaagaccaucaccaacgaccagaucgaggugacgaacgccaccgagcucguccagagcuccagcaccucccgcaucugcgacagcccccaccagauccuggacggggagaacugcacccugaucgacgcccuccugggcgacccccacugcgacggguuccagaacaaggagugggaccuguucguggagcgguccaaggccuacagcaacugcuaccccuacgacgugccggacuacgucucccuccgcagccugguggcguccagcggcacgcuggaguucaacaacgaguccuucaacuggaccggcguggcccagaacgggaccagcuccgccugcaagcggcgcagcgacaaguccuucuucagccggcucaacuggcugcaccagcugaaguacaaguaccccgcccucaacgucaccaugcccaacaacgagaaguucgacaagcuguacaucuggggcgugcaccaccccgggacggacuccgaccagaucagccuguacgcgcaggccagcggccgcaucaccguguccaccaagcggagccagcagaccgucaucccgaacaucggguccggccccugggugcgcggcgugagcucccggaucagcaucuacuggacgaucgucaagcccggggacauccuccugaucaacuccaccggcaaccugaucgcgccccgcggguacuucaagauccggagcggcaaguccagcaucaugcgcuccgacgccccgaucggcaagugcaacagcgagugcaucacccccaacggguccauccccaacgacaagcccuuccagaacgugaaccggaucaccuacggcgccugcccgcgcuacgugaagcagaacacgcucaagcuggccaccgggaugcggaacguccccgagaagcagacccgcggcaucuucggggccaucgccggcuucaucgagaacggcugggaggggaugauggacggcugguacggguuccggcaccagaacagcgagggcaccgggcaggccgccgaccugaaguccacgcaggcggccaucaaccagaucaacggcaagcucaaccgccugaucgagaagaccaacgagaaguuccaccagaucgagaaggaguucagcgagguggagggccggauccaggaccuggagaaguacguggaggacaccaagaucgaccucugguccuacaacgccgagcugcuggucgcccucgagaaccagcacaccaucgaccugacggacagcgagaugaacaagcuguucgagcgcaccaagaagcagcuccgggagaacgccgaggacauggggaacggcugcuucaagaucuaccacaagugcgacaacgcgugcaucggguccauccgcaacggcaccuacgaccacgacguguaccgcgacgaggcccugaacaaccgguuccagaucaaggggguggagcucaagagcggcuacaaggacuggauccuguggaucagcuucgccaucuccugcuuccugcugugcaucguccuccugggcuucaucaugugggccugccagaaggggaacauccgcugcaacaucugcaucuga

SEQ ID NO: 64077 - RNA, 1701 nt, Artificial Sequence
  derived and/or modified CDS sequence (opt1) from hemagglutinin__InfluenzaA__AAX35871
augaagaccaucaucgcccugagcuacauccucugccugguguucgcccagaagcugcccggcaacgacaacuccaccgcgacgcucugccuggggcaccacgccgucccgaacggcacccuggugaagaccaucaccaacgaccagaucgaggugacgaacgccaccgagcucguccagagcuccagcgccucccgcaucugcgacagcccccaccagauccuggacggggagaacugcacccugaucgacgcccuccugggcgacccccacugcgacggguuccagaacaaggagugggaccuguucguggagcgguccaaggcguacagcaacugcuaccccuacgacgugccggacuacgucucccuccgcagccugguggccuccagcggcacccuggaguucaacaacgaguccuucaacuggacgggcguggcccagaacgggaccagcuucgccugcaagcggcgcuccgacaagagcuucuucucccggcucaacuggcugcaccagcugaaguacaaguaccccgcgcucaacgucaccaugcccaacaacgagaaguucgacaagcuguacaucuggggcgugcaccaccccgggaccgacagcgaccagaucucccuguacgcccaggccagcggccgcgugacggucagcaccaagcggucccagcagaccgugaucccgaacaucgggagcggccccugggugcgcggcgucuccagccggaucuccaucuacuggaccaucgugaagcccggggacauccuccugaucaacagcacgggcaaccugaucgcgccccgcggguacuucaagauccgguccggcaagagcuccaucaugcgcagcgacgccccgaucggcaagugcaacuccgagugcaucacccccaacgggagcauccccaacgacaagcccuuccagaacgugaaccggaucaccuacggcgccugcccgcgcuacgucaagcagaacacccucaagcuggccacggggaugcggaacgugcccgagaagcagacccgcggcaucuucggggccaucgccggcuucaucgagaacggcugggaggggaugauggacggcugguacggguuccggcaccagaacuccgagggcaccgggcaggccgcggaccucaagagcacccaggccgccaucaaccagaucaacggcaagcugaaccgccugaucgagaagacgaacgagaaguuccaccagaucgagaaggaguucuccgagguggagggccggauccaggaccuggagaaguacgucgaggacaccaagaucgaccucuggagcuacaacgccgagcugcugguggcccucgagaaccagcacaccaucgaccugaccgacuccgagaugaacaagcuguucgagcgcacgaagaagcagcuccgggagaacgcggaggacauggggaacggcugcuucaagaucuaccacaagugcgacaacgccugcaucgggagcauccgcaacggcaccuacgaccacgacguguaccgcgacgaggcccugaacaaccgguuccagaucaagggggucgagcugaaguccggcuacaaggacuggauccucuggaucagcuucgccaucagcugcuuccugcugugcaucgugcuccugggcuucaucaugugggccugccagaaggggaacauccgcugcaacaucugcaucuga

SEQ ID NO: 64078 - RNA, 1701 nt, Artificial Sequence; identical to SEQ ID NO: 64071
  derived and/or modified CDS sequence (opt1) from hemagglutinin__InfluenzaA__AAX38237

SEQ ID NO: 64079 - RNA, 1701 nt, Artificial Sequence
  derived and/or modified CDS sequence (opt1) from hemagglutinin__InfluenzaA__AAX47515
augaaggccaucaucgcccugagcuacauccucugccugguguucgcgcagaagcugcccggcaacgacaacuccaccgccacccucugccuggggcaccacgccgucccgaacggcacgcuggugaagaccaucaccaacgaccagaucgaggugaccaacgccacggagcucguccagagcuccagcaccgggcgcaucugcgacagcccccaccagauccuggacggcgagaacugcacccugaucgacgcccuccugggggacccccacugcgacggcuuccagaacaaggagugggaccuguucguggagcggagcaaggcguacuccaacugcuaccccuacgacgugccggacuacgucagccuccgcucccugguggccagcuccggcacccuggaguucaacaacgagagcuucaacuggacggggguggcccagaacggcaccuccagcgccugcaagcggcgcuccgacaagagcuucuucucccggcucaacuggcugcaccagcugaaguacaaguaccccgcgcucaacgucaccaugcccaacaacgagaaguucgacaagcuguacaucuggggcgugcaccaccccgggaccgacagcgaccagaucucccuguacgcccaggccagcgggcgcgugacggucagcaccaagcggucccagcagaccgugaucccgaacaucggcagccgccccugggugcggggcgucuccagccgcaucuccaucuacuggaccaucgugaagcccggggacauccuccugaucaacagcacgggcaaccugaucgcgccccggggguacuucaagauccgcuccggcaagagcuccaucaugcggagcgacgccccgaucggcaagugcaacuccgagugcaucacccccaacgggagcauccccaacgacaagcccuuccagaacgugaaccgcaucaccuacggcgccugcccgcgguacgucaagcagaacacccucaagcuggccacggggaugcgcaacgugcccgagaagcagacccggggcaucuucggggccaucgccggcuucaucgagaacggcugggaggggaugauggacggcugguacggguuccgccaccagaacuccgagggcaccgggcaggccgcggaccugaaguccacccaggccgccaucaaccagaucaacggcaagcucaaccggcugaucgagaagacgaacgagaaguuccaccagaucgagaaggaguucuccgagguggagggccgcauccaggaccuggagaaguacgucgaggacaccaagaucgaccucuggagcuacaacgccgagcugcugguggcccucgagaaccagcacaccaucgaccugaccgacuccgagaugaacaagcuguucgagcggacgaagaagcagcuccgcgagaacgcggaggacauggggaacggcugcuucaagaucuaccacaagugcgacaacgccugcaucgggagcauccgcaacggcaccuacgaccacgacguguaccgggacgaggcccugaacaaccgcuuccagaucaagggggucgagcugaaguccggcuacaaggacuggauccucuggaucagcuucgccaucagcugcuuccugcugugcaucgugcuccugggcuucaucaugugggccugccagaaggggaacauccggugcaacaucugcaucuga

SEQ ID NO: 64080 - RNA, 1701 nt, Artificial Sequence
  derived and/or modified CDS sequence (opt1) from hemagglutinin__InfluenzaA__AAX47525
augaagaccaucaucgcccugagcuacauccucugccugguguucgcccagaagcugcccggcaacgacaacuccaccgcgacgcucugcauggggcaccacgccgucccgaacggcacccuggugaagaccaucaccaacgaccagaucgaggugacgaacgccaccgagcugguccagagcuccagcaccgggcgcaucugcgacagcccccaccagauccucgacggcgagaacugcacccugaucgacgcccugcucggggacccccacugcgacggcuuccagaacaaggagugggaccuguucguggagcggagcaaggccuacuccaacugcuaccccuacgacgugccggacuacgucagccugcgcucccucguggcgagcuccggcacgcuggaguucaacaacgagagcuucaacuggaccgggguggcccagaacggcaccuccagcgccugcaagcggcgcuccaacaagagcuucuucucccggcugaacuggcuccaccagcugaaguacaaguaccccgcccugaacgucaccaugcccaacaacgagaaguucgacaagcucuacaucuggggcgugcaccaccccgacacggacagcaaccagaucucccuguacgcgcaggccagcgggcgcgugaccgucagcaccaagcggucccagcagaccgugaucccgaacaucgggagcggccccugggugcgcggcgucuccagccggaucuccaucuacuggacgaucgugaagcccggggacauccugcucaucaacagcaccggcaaccugaucgcgccccgcggguacuucaagauccgguccggcaagagcuccaucaugcgcagcgacgccccgaucggcaagugcaacuccgagugcaucacccccaacgggagcauccccaacgacaagcccuuccagaacgugaaccggaucaccuacggcgccugcccgcgcuacgucaagcagaacacgcugaagcucgccaccgggaugcggaacgugcccgagaagcagacccgcggcaucuucggggccaucgccggcuucaucgagaacggcugggaggggaugauggacggcugguacggguuccggcaccagaacuccgagggcaccgggcaggccgccgaccugaaguccacgcaggcggccaucaaccagaucaacggcaagcugaaccgccucaucgagaagaccaacgagaaguuccaccagaucgagaaggaguucuccgagguggagggccggauccaggaccuggagaaguacgucgaggacaccaagaucgaccuguggagcuacaacgccgagcuccugguggcccuggagaaccagcacaccaucgaccucacggacuccgagaugaacaagcuguucgagcgcaccaagaagcagcugcgggagaacgccgaggacauggggaacggcugcuucaagaucuaccacaagugcgacaacgcgugcaucgggagcauccgcaacggcaccuacgaccacgacguguaccgcgacgaggcccucaacaaccgguuccagaucaagggggucgagcugaaguccggcuacaaggacuggauccuguggaucagcuucgccaucagcugcuuccuccugugcaucgugcugcucggcuucaucaugugggccugccagaaggggaacauccgcugcaacaucugcaucuga

SEQ ID NO: 64081 - RNA, 1701 nt, Artificial Sequence; identical to SEQ ID NO: 64071
  derived and/or modified CDS sequence (opt1) from hemagglutinin__InfluenzaA__AAX47535

SEQ ID NO: 64082 - RNA, 1701 nt, Artificial Sequence; identical to SEQ ID NO: 64055
  derived and/or modified CDS sequence (opt1) from hemagglutinin__InfluenzaA__AAX56380

SEQ ID NO: 64083 - RNA, 1701 nt, Artificial Sequence; identical to SEQ ID NO: 64055
  derived and/or modified CDS sequence (opt1) from hemagglutinin__InfluenzaA__AAX56390

SEQ ID NO: 64084 - RNA, 1701 nt, Artificial Sequence
  derived and/or modified CDS sequence (opt1) from hemagglutinin__InfluenzaA__AAX56400
augaagaccaucaucgcccugagcuacauccucugccugguguucgcccagaagcugcccggcaacgacaacuccaccgcgacgcucugccuggggcaccacgccgucccgaacggcaccaucgugaagaccaucaccaacgaccagaucgaggugacgaacgccaccgagcugguccagagcuccagcaccgggggcaucugcgacagcccccaccagauccucgacggggagaacugcacccugaucgacgcccugcucggcgacccccagugcgacggcuuccagaacaagaagugggaccuguucguggagcgcagcaaggccuacuccaacugcuaccccuacgacgugccggacuacgcgagccugcggucccucgucgccagcuccgggacgcuggaguucaacaacgagagcuucaacuggaccggcgugacccagaacgggaccuccagcgccugcgagcgccgguccaacaagagcuucuucucccgccugaacuggcucacgcaccugaaguacaaguaccccgcccugaacgugaccaugcccaacaacgagaaguucgacaagcucuacaucuggggcguccaccaccccgggaccgacagcgaccagaucucccuguacgcgcaggccagcggccggaucaccgugagcacgaagcgcucccagcagaccgugaucccgaacaucggcagccggccccgcguccgggacaucuccagccgcaucuccaucuacuggaccaucgugaagcccggggacauccugcucaucaacagcaccggcaaccugaucgcgccccggggguacuucaagauccgcuccggcaagagcuccaucaugcggagcgacgccccgaucggcaagugcaacuccgagugcaucacgcccaacgggagcauccccaacgacaagcccuuccagaacgugaaccgcaucaccuacggcgccugcccgcgguacgucaagcagaacacccugaagcucgccaccgggaugcgcaacgugcccgagaagcagacgcggggcaucuucggggccaucgccggcuucaucgagaacggcugggaggggaugguggacggcugguacggguuccgccaccagaacuccgagggcaccgggcaggccgccgaccugaaguccacccaggcggccaucaaccagaucaacggcaagcugaaccggcucaucggcaagaccaacgagaaguuccaccagaucgagaaggaguucuccgaggucgaggggcgcauccaggaccuggagaaguacguggaggacacgaagaucgaccuguggagcuacaacgccgagcuccugguggcccuggagaaccagcacaccaucgaccucaccgacuccgagaugaacaagcuguucgagcggaccaagaagcagcugcgcgagaacgccgaggacaugggcaacgggugcuucaagaucuaccacaagugcgacaacgcgugcaucggcagcauccgcaacgggacguacgaccacgacgucuaccgggacgaggcccucaacaaccgcuuccagaucaagggcguggagcugaaguccggcuacaaggacuggauccuguggaucagcuucgccaucagcugcuuccuccugugcguggcccugcucggguucaucaugugggccugccagaagggcaacauccggugcgacaucugcaucuga

SEQ ID NO: 64085 - RNA, 1701 nt, Artificial Sequence; identical to SEQ ID NO: 64055
  derived and/or modified CDS sequence (opt1) from hemagglutinin__InfluenzaA__AAX56410

SEQ ID NO: 64086 - RNA, 1701 nt, Artificial Sequence
  derived and/or modified CDS sequence (opt1) from hemagglutinin__InfluenzaA__AAX56420
augaagaccaucaucgcccugagcuacuuccucugccugguguucgcccagaagcugcccggcaacgacaacuccaccgcgacgcucugccuggggcaccacgccgucccgaacggcaccaucgugaagaccaucaccaacgaccagaucgaggugacgaacgccaccgagcugguccagagcuccagcaccgggggcaucugcgacagcccccaccagauccucgacggggagaacugcacccugaucgacgcccugcucggcgacccccagugcgacggcuuccagaacaagaagugggaccuguucguggagcgcagcaaggccuacuccaacugcuaccccuacgacgugccggacuacgcgagccugcggucccucgucgccagcuccgggacgcuggaguucaacaacgagagcuucgacuggaccggcgugacccagaacgggaccuccagcgccugcaagcgccgguccaacaagagcuucuucucccgccugaacuggcucacgcaccugaaguacaaguaccccgcccugaacgugaccaugcccaacaacgagaaguucgacaagcucuacaucuggggcguccaccaccccgggaccgacagcgaccagaucucccuguacgcgcaggccagcggccggaucaccgugagcacgaagcgcucccagcagaccgugaucccgaacaucggcagccggccccgcguccgggacguguccagccgcaucuccaucuacuggaccaucgugaagcccggggacauccugcucaucaacagcaccggcaaccugaucgcgccccggggguacuucaagauccgcuccggcaagagcuccaucaugcggagcgacgccccgaucggcaagugcaacuccgagugcaucacgcccaacgggagcauccccaacgacaagcccuuccagaacgucaaccgcaucaccuacggcgccugcccgcgguacgugaagcagaacacccugaagcucgccaccgggaugcgcaacgugcccgagaagcagacgcggggcaucuucggggccaucgccggcuucaucgagaacggcugggaggggauggucgacggcugguacggguuccgccaccagaacuccgagggcaccgggcaggccgccgaccugaaguccacccaggcggccaucaaccagaucaacggcaagcugaaccggcucaucggcaagaccaacgagaaguuccaccagaucgagaaggaguucuccgagguggaggggcgcauccaggaccuggagaaguacguggaggacacgaagaucgaccuguggagcuacaacgccgagcuccuggucgcccuggagaaccagcacaccaucgaccucaccgacuccgagaugaacaagcuguucgagcggaccaagaagcagcugcgcgagaacgccgaggacaugggcaacgggugcuucaagaucuaccacaagugcgacaacgcgugcaucggcagcauccgcaacgggacguacgaccacgacguguaccgggacgaggcccucaacaaccgcuuccagaucaagggcguggagcugaaguccggcuacaaggacuggauccuguggaucagcuucgccaucagcugcuuccuccugugcgucgcccugcucggguucaucaugugggccugccagaagggcaacauccggugcaacaucugcaucuga

SEQ ID NO: 64087 - RNA, 1701 nt, Artificial Sequence
  derived and/or modified CDS sequence (opt1) from hemagglutinin__InfluenzaA__AAX56430
augaagaccaucaucgcccugagcuacauccucugccugguguucacccagaagcugcccggcaacgacaacuccacggccacccucugccuggggcaccacgcggucccgaacggcaccaucgugaagaccaucacgaacgaccagaucgaggugaccaacgccaccgagcugguccagagcuccagcaccgggggcaucugcgacagcccccaccagauccucgacggggagaacugcacgcugaucgacgcccugcucggcgacccccagugcgacggcuuccagaacaagaagugggaccuguucguggagcgcagcaaggccuacuccaacugcuaccccuacgacgugccggacuacgccagccugcggucccucgucgcgagcuccgggacccuggaguucaacaacgagagcuucaacuggaccggcgugacccagaacgggacguccagcgccugcgagcgccgguccaacaagagcuucuucucccgccugaacuggcucacccaccugaaguacaaguaccccgcccugaacgugaccaugcccaacaacgagaaguucgacaagcucuacaucuggggcguccaccaccccgggaccgacagcgaccagaucucccuguacgcccaggcgagcggccggaucacggugagcaccaagcgcucccagcagaccgugaucccgaacaucggcagccggccccgcguccgggacguguccagccgcaucuccaucuacuggaccaucgugaagcccggggacauccugcucaucaacagcacgggcaaccugaucgcgccccggggguacuucaagauccgcuccggcaagagcuccaucaugcggagcgacgccccgaucggcaagugcaacuccgagugcaucacccccaacgggagcauccccaacgacaagcccuuccagaacgucaaccgcaucaccuacggcgccugcccgcgguacgugaagcagaacacccugaagcucgccacggggaugcgcaacgugcccgagaagcagacccggggcaucuucggggccaucgccggcuucaucgagaacggcugggaggggauggucgacggcugguacggguuccgccaccagaacuccgagggcaccgggcaggccgccgaccugaaguccacccaggccgcgaucaaccagaucaacggcaagcugaaccggcucaucggcaagacgaacgagaaguuccaccagaucgagaaggaguucuccgagguggaggggcgcauccaggaccuggagaaguacguggaggacaccaagaucgaccuguggagcuacaacgccgagcuccuggucgcccuggagaaccagcacaccaucgaccucaccgacuccgagaugaacaagcuguucgagcggacgaagaagcagcugcgcgagaacgccgaggacaugggcaacgggugcuucaagaucuaccacaagugcgacaacgccugcaucggcagcauccgcaacgggaccuacgaccacgacguguaccgggacgaggcgcucaacaaccgcuuccagaucaagggcguggagcugaaguccggcuacaaggacuggauccuguggaucagcuucgccaucagcugcuuccuccugugcgucgcccugcucggguucaucaugugggccugccagaagggcaacauccggugcgacaucugcaucuga

SEQ ID NO: 64088 - RNA, 1701 nt, Artificial Sequence
  derived and/or modified CDS sequence (opt1) from hemagglutinin__InfluenzaA__AAX56440
augaagaccaucaucgcccugagcuacauccucugccugguguucgcccagaagcugcccggcaacgacaacuccaccgcgacgcucugccuggggcaccacgccgucccgaacggcacccuggugaagaccaucaccaacgaccagaucgaggugacgaacgccaccgagcucguccagaacagcuccaccgggcgcaucugcgacagcccccaccagauccuggacggcgagaacugcacccugaucgacgcccuccugggggacccccacugcgacggcuuccagaacaaggagugggaccuguucguggagcgguccaaggccuacagcaacugcuaccccuacgacgugccggacuacgucucccuccgcagccugguggcguccagcggcacgcuggaguucaacaacgaguccuucaacuggaccgggguggcccagaacggcaccagcuccgccugcaagcggcgcagcgacaaguccuucuucagccggcucaacuggcugcaccagcugaaguacaaguaccccgcccucaacgucaccaugcccaacaacgagaaguucgacaagcuguacaucuggggcgugcaccaccccgggacggacaacgaccagaucucccuguacgcgcaggccagcgggcgcgugaccgucuccaccaagcggagccagcagaccgugaucccgaacaucggcagcggccccugggugcgcggggucuccagccggaucuccaucuacuggacgaucgugaagcccggcgacauccuccugaucaacagcaccgggaaccugaucgcgccccgcggcuacuucaagauccgguccggcaagagcuccaucaugcgcagcgacgccccgaucgggaagugcaacuccgagugcaucacccccaacggcagcauccccaacgacaagcccuuccagaacgugaaccggaucaccuacgggccgugcccccgcuacgucaagcagaacacgcucaagcuggccaccggcaugcggaacgugcccgagaagcagacccgcgggaucuucggcgccaucgccggcuucaucgagaacgggugggagggcaugauggacgggugguacggcuuccggcaccagaacuccgaggggaccggccaggccgccgaccucaagagcacgcaggccgcgaucaaccagaucaacggcaagcugaaccgccugaucgagaagaccaacgagaaguuccaccagaucgagaaggaguucuccgagguggaggggcggauccaggaccuggagaaguacgucgaggacaccaagaucgaccucuggagcuacaacgccgagcugcugguggcccucgagaaccagcacaccaucgaccugacggacuccgagaugaacaagcuguucgagcgcaccaagaagcagcuccgggagaacgccgaggacaugggcaacgggugcuucaagaucuaccacaagugcgacaacgccugcaucggcagcauccgcaacgggaccuacgaccacgacguguaccgcgacgaggcgcugaacaaccgguuccagaucaagggcgucgagcugaaguccggcuacaaggacuggauccucuggaucagcuucgccaucuccugcuuccugcugugcaucgugcuccugggguucaucaugugggccugccagaagggcaacauccgcugcaacaucugcaucuga

SEQ ID NO: 64089 - RNA, 1701 nt, Artificial Sequence; identical to SEQ ID NO: 64071
  derived and/or modified CDS sequence (opt1) from hemagglutinin__InfluenzaA__AAX56450

SEQ ID NO: 64090 - RNA, 1701 nt, Artificial Sequence
  derived and/or modified CDS sequence (opt1) from hemagglutinin__InfluenzaA__AAX56460
augaagaccaucaucgcccugagcuacauccucugccugguguucgcccagaagcugcccgagaacgacaacuccaccgcgacgcucugccugggccaccacgccgucccgaacgggacccuggugaagaccaucaccaacgaccagaucgaggugacgaacgccaccgagcucguccagagcuccagcaccggccgcaucugcgacagcccccaccagauccuggacggggagaacugcacccugaucgacgcccuccugggcgacccccacugcgacggguuccagaacaaggagugggaccuguucguggagcggagcaaggccuacuccaacugcuaccccuacgacgugccggacuacgucagccuccgcucccugguggcgagcuccggcacgcuggaguucaacaacgagagcuucaacuggaccggcguggcccagaacgggaccuccagcgccugcaagcggcgcuccgacaagagcuucuucucccggcucaacuggcugcaccagcugaaguacaaguaccccgcccucaacgucaccaugcccaacaacgagaaguucgacaagcuguacaucuggggcgugcaccaccccgggacggacagcgaccagaucucccuguacgcgcaggccagcggccgcgugaccgucagcaccaagcggucccagcagaccgugaucccgaacaucgggagccgccccugggugcggggcgucuccagccgcaucuccaucuacuggacgaucgugaagcccggcgacauccuccugaucaacagcaccgggaaccugaucgcgccccggggcuacuucaagauccgcuccgggaaguccuccaucaugcggagcgacgccccgaucggcaagugcaacuccgagugcaucacccccaacggcagcauccccaacgacaagcccuuccagaacgugaaccgcaucacccacgggccgugcccccgguacgucaagcagaacacgcucaagcuggccaccggcaugcgcaacgugcccgagaagcagacccgggggaucuucggcgccaucgccggguucaucgagaacggcugggagggcaugauggacgggugguacggcuuccgccaccagaacuccgaggggaccggccaggccgccgaccucaagagcacgcaggccgcgaucaaccagaucaacgggaagcugaaccggcugaucgagaagaccaacgagaaguuccaccagaucgagaaggaguucuccgagguggagggccgcauccaggaccuggagaaguacgucgaggacaccaagaucgaccucuggagcuacaacgccgagcugcugguggcccucgagaaccagcacaccaucgaccugacggacuccgagaugaacaagcuguucgagcggaccaagaagcagcuccgcgagaacgccgaggacaugggcaacgggugcuucaagaucuaccacaagugcgacaacgccugcaucggcagcauccgcaacgggaccuacgaccacgacguguaccgggacgaggcgcugaacaaccgcuuccagaucaagggcgucgagcugaaguccggguacaaggacuggauccucuggaucagcuucgccaucagcugcuuccugcugugcaucgugcuccugggcuucaucaugugggccugccagaagggcaacauccggugcaacaucugcaucuga

SEQ ID NO: 64091 - RNA, 1701 nt, Artificial Sequence
  derived and/or modified CDS sequence (opt1) from hemagglutinin__InfluenzaA__AAX56470
augaagaccaucaucgcccugagcuacauccucugccugguguucgcccagaagcugcccggcaacgacaacuccaccgcgacgcucugccuggggcaccacgccgucccgaacggcacccuggugaagaccaucaccaacgaccagaucgaggugacgaacgccaccgagcucguccagagcuccagcaccgggcgcaucugcgacagcccccaccagauccuggacggcgagaacugcacccugaucgacgcccuccugggggacccccacugcgacggcuuccagaacaaggagugggaccuguucguggagcggagcaaggccuacuccaacugcuaccccuacgacgugccggacuacgucagccuccgcucccugguggcgagcuccggcacgcuggaguucaacaacgagagcuucaacuggaccgggguggcccagaacggcaccuccagcgccugcaagcggcgcuccgacaagagcuucuucucccggcucaacuggcugcaccagcugaaguacaaguaccccgcccucaacgucaccaugcccaacaacgagaaguucgacaagcuguacaucuggggcgugcaccaccccgggacggacagcgaccagaucucccuguacgcgcaggccagcgggcgcgugaccgucagcaccaagcggucccagcagaccgugaucccgaacaucggcagccgccccugggugcggggcgucuccagccgcaucuccaucuacuggacgaucgugaagcccggggacauccuccugaucaacagcaccggcaaccugaucgcgccccggggguacuucaagaugcgcuccggcaagagcuccaucaugcggagcgacgccccgaucggcaagugcaacuccgagugcaucacccccaacgggagcauccccaacgacaagcccuuccagaacgugaaccgcaucaccuacggcccgugcccccgguacgucaagcagaacacgcucaagcuggccaccgggaugcgcaacgugcccgagaagcagacccggggcaucuucggggccaucgccggcuucaucgagaacggcugggaggggaugauggacggcugguacggguuccgccaccagaacuccgagggcaccgggcaggccgccgaccugaaguccacgcaggccgcgaucaaccagaucaacggcaagcucaaccggcugaucgagaagaccaacgagaaguuccaccagaucgagaaggaguucuccgagguggagggccgcauccaggaccuggagaaguacgucgaggacaccaagaucgaccucuggagcuacaacgccgagcugcugguggcccucgagaaccagcacaccaucgaccugacggacuccgagaugaacaagcuguucgagcggaccaagaagcagcuccgcgagaacgccgaggacauggggaacggcugcuucaagaucuaccacaagugcgacaacgccugcaucgggagcauccgcaacggcaccuacgaccacgacguguaccgggacgaggcgcugaacaaccgcuuccagaucaagggggucgagcugaaguccggcuacaaggacuggauccucuggaucagcuucgccaucagcugcuuccugcugugcaucgugcuccugggcuucaucaugugggccugccagaaggggaacauccggugcaacaucugcaucuga

SEQ ID NO: 64092 - RNA, 1701 nt, Artificial Sequence; identical to SEQ ID NO: 64075
  derived and/or modified CDS sequence (opt1) from hemagglutinin__InfluenzaA__AAX56480

SEQ ID NO: 64093 - RNA, 1701 nt, Artificial Sequence
  derived and/or modified CDS sequence (opt1) from hemagglutinin__InfluenzaA__AAX56510
augaagaccaucaucgcccugagcuacauccucugccugguguucgcccagaagcugcccggcaacgacaacuccaccgcgacgcucugccuggggcaccacgccgucccgaacggcacccuggugaagaccaucaccaacgaccagaucgaggugacgaacgccaccgagcucguccagagcuccagcaccgggcgcaucugcgacagcccccaccagauccuggacggcgagaacugcacccugaucgacgcccuccugggggacccccacugcgacggcuuccagaacaaggagugggaccuguucguggagcggagcaaggccuacuccaacugcuaccccuacgacgugccggacuacgucagccuccgcucccugguggcgagcuccggcacgcuggaguucaacaacgagagcuucaacuggaccgggguggcccagaacggcaccuccagcgccugcaagcggcgcuccgacaagagcuucuucucccggcucaacuggcugcaccagcugaaguacaaguaccccgcccucaacgucaccaugcccaacaacgagaaguucgacaagcuguacaucuggggcgugcaccaccccgggacggacagcgaccagaucucccuguacgcgcaggccagcgggcgcgugaccgucagcaccaagcggucccagcagaccgugaucccgaacaucggcagccgccccugggugcggggcgucuccagcaagaucuccaucuacuggacgaucgugaagcccggggacauccuccugaucaacagcaccggcaaccugaucgcgccccgcggguacuucaagauccgguccggcaagagcuccaucaugcgcagcgacgccccgaucggcaagugcaacuccgagugcaucacccccaacgggagcauccccaacgacaagcccuuccagaacgugaaccggaucaccuacggcgccugcccgcgcuacgucaagcagaacacgcucaagcuggccaccgggaugcggaacgugcccgagaagcagacccgcggcaucuucggggccaucgccggcuucaucgagaacggcugggaggggaugauggacggcugguacggguuccggcaccagaacuccgagggcaccgggcaggccgccgaccugaaguccacgcaggcggccaucaaccagaucaacggcaagcucaaccgccugaucgagaagaccaacgagaaguuccaccagaucgagaaggaguucuccgagguggagggccggauccaggaccuggagaaguacgucgaggacaccaagaucgaccucuggagcuacaacgccgagcugcugguggcccucgagaaccagcacaccaucgaccugacggacuccgagaugaacaagcuguucgagcgcaccaagaagcagcuccgggagaacgccgaggacauggggaacggcugcuucaagaucuaccacaagugcgacaacgcgugcaucgggagcauccgcaacggcaccuacgaccacgacguguaccgcgacgaggcccugaacaaccgguuccagaucaagggggucgagcugaaguccggcuacaaggacuggauccucuggaucagcuucgccaucagcugcuuccugcugugcaucgugcuccugggcuucaucaugugggccugccagaaggggaacauccgcugcaacaucugcaucuga

SEQ ID NO: 64094 - RNA, 1701 nt, Artificial Sequence; identical to SEQ ID NO: 64071
  derived and/or modified CDS sequence (opt1) from hemagglutinin__InfluenzaA__AAX56520

SEQ ID NO: 64095 - RNA, 1701 nt, Artificial Sequence
  derived and/or modified CDS sequence (opt1) from hemagglutinin__InfluenzaA__AAX56530
augaaggccaagcugcucgugcugcugugcgccuucaccgcgaccuacgccgacacgaucugcaucggcuaccacgccaacaacagcaccgacaccgucgacaccgugcucgagaagaacgugacggucacccacuccgugaaccugcuggaggacagccacaacgggaagcucugccgccugaagggcaccgcgccccugcagcucgggaacugcuccaucgccggcuggauccuggggaacccggagugcgagagccuguucuccaaggagagcugguccuacaucgccgagacccccaaccccaagaacggcacgugcuaccccggcuacuucgccgacuacgaggagcuccgggagcagcugagcuccgugagcuccuucgagcgcuucgagaucuucccgaaggacagcuccuggcccaaccacaccgucaccaagggggugaccgccagcugcucccacaacggcaagagcuccuucuacaagaaccugcucuggcugacggagaagaacgggcuguaccccaaccucagcaaguccuacgugaacaagaagggcaaggagguccuggugcuguggggcgugcaccaccccagcaacaugggggaccagcgggccaucuaccacaaggagaacgcguacgucagcgugcucuccagccacuacucccgccgguucaccccggagaucgccaagcgccccaaggugcgggaccaggagggccgcaucaacuacuacuggacccugcuggagcccggggacaccaucaucuucgaggccaacggcaaccucaucgcccccugguacgccuucgcgcugagccggggguucggcuccggcaucaucaucagcaacgccuccaugggggagugcgacgccaagugccagacgccgcagggcgccaucaacagcucccugcccuuccagaacguccaccccgugaccaucggggagugccccaaguacgugcgcagcaccaagcuccggauggucaccggccugcgcaacgugccguccauccagagccgggggcuguucggcgccaucgcgggcuucaucgagggcggguggacggggaugaucgacggcugguacggguaccaccaccagaacgagcagggcuccggcuacgccgccgaccagaaguccacccagaacgccaucaacgggaucaccaacaaggugaacagcaucaucgagaagaugaacacccaguucacggccgucggcaaggaguucaacaagcucgagaagcgcauggagaaccugaacaagaagguggacgacggguuccuggacaucuggaccuacaacgcggagcuccuggugcugcucgagaacgagcggacccuggacuuccacgaccugaacgucaagaaccucuacgagaaggugaagaaccagcugaagaacaacgccaaggagaucggcaacgggugcuucgaguucuaccacaagugcaacaacgagugcauggagagcgucaagaacggcaccuacgacuaccccaaguacuccaaggagagcaagcugaaccgcgagaagaucgacggcgugaagcucgaguccauggggguguaccagauccuggccaucuacagcacggucgccagcucccuggugcuccuggugagccugggcgccaucuccuucuggaugugcagcaacgggucccuccagugccggaucugcaucuga

SEQ ID NO: 64096 - RNA, 1701 nt, Artificial Sequence
  derived and/or modified CDS sequence (opt1) from hemagglutinin__InfluenzaA__AAX56550
augaagaccaucaucgcccugagcuacauccucugccugguguucgcccagaagcugcccgucaacgacaacuccaccgcgacgcucugccugggccaccacgccgugccgaacgggacccuggugaagaccaucaccaacgaccacaucgaggucacgaacgccaccgagcucgugcagagcuccagcaccggccgcaucugcgacagcccccaccagauccuggacggggagaacugcacccugaucgacgcccuccugggcgacccccacugcgacggguuccagaacaaggagugggaccuguucguggagcggagcacggccuacuccaacugcuaccccuacgacgucccggacuacgcgagccuccgcucccugguggccagcuccggcacccuggaguucaacaacgagagcuucaacuggaccggcguggcccagaacgggaccuccagcgccugcaagcggcgcuccaucaagagcuucuucucccggcucaacuggcugcaccagcugaaguacaaguaccccgcgcucaacgucacgaugcccaacaacgagaaguucgacaagcuguacaucuggggcgugcaccaccccagcaccgacuccgaccagaucagccuguacgcccaggccagcgggcgcgugaccgucuccaccaagcggagccagcagacggugaucccgaacaucggcucccgccccugggugcgcggggucagcucccggaucagcaucuacuggaccaucgugaagcccggcgacauccuccugaucaacuccaccggcaaccugaucgcgccccggggguacuucaagauccgcagcggcaaguccagcaucaugcgguccaacgccccgaucgggaagugcaacagcgagugcaucacccccaacggcuccauccccaacgacaagcccuuccagaacgugaaccgcaucacguacggcgccugcccgcgguacgucaagcagaacacccucaagcuggccaccgggaugcgcaacgugcccgagaagcagacccggggcaucuucggggccaucgccggcuucaucgagaacgggugggagggcaugguggacggcugguacggguuccgccaccagaacagcgagggcacggggcaggccgcggaccugaaguccacccaggccgccaucaaccagaucaacggcaagcucaaccggcugaucgagaagaccaacgagaaguuccaccagaucgagaaggaguucagcgaggucgaggggcgcauccaggaccuggagaaguacguggaggacaccaagaucgaccucugguccuacaacgccgagcugcugguggcccucgagaaccagcacacgaucgaccugaccgacagcgagaugaacaagcuguucgagcggacccgcaagcagcuccgcgagaacgcggaggacaugggcaacggcugcuucaagaucuaccacaagugcgacaacgccugcaucggguccauccggaacggcaccuacgaccacgacgucuaccgcgacgaggcccugaacaaccgguuccagaucaaggggguggagcugaaguccggcuacaaggacuggauccucuggaucagcuucgccaucuccugcuuccugcugugcgucgugcuccugggguucaucaugugggccugccagaagggcaacauccgcugcaacaucugcaucuga

SEQ ID NO: 64097 - RNA, 1701 nt, Artificial Sequence
  derived and/or modified CDS sequence (opt1) from hemagglutinin__InfluenzaA__AAX56560
augaagaccaucaucgcccugagcuacauccucugccugguguucgcccagaagcugcccggcaacgacaacuccaccgcgacgcucugccuggggcaccacgccgucccgaacggcaccaucgugaagaccaucaccaacgaccagaucgaggugacgaacgccaccgagcugguccagaucagcuccaccgggggcaucugcgacagcccccaccagauccucgacggggagaacugcacccugaucgacgcccugcucggcgacccccagugcgacggcuuccagaacaagaagugggaccuguucguggagcgcuccaaggccuacagcaacugcuaccccuacgacgugccggacuacgcgucccugcggagccucgucgccuccagcgggacgcuggaguucaacaacgaguccuucgacuggaccggcgugacccagaacgggaccagcuccgccugcaagcgccggagcaacaaguccuucuucagccgccugaacuggcucacgcaccugaaguacaaguaccccgcccugaacgugaccaugcccaacaacgagaaguucgacaagcucuacaucuggggcguccaccaccccgggaccgacuccgaccagaucagccuguacgcgcaggccuccggccggaucaccgugagcacgaagcgcagccagcagaccgugaucccgaacaucggcucccggccccgcguccgggacgugagcucccgcaucagcaucuacuggaccaucgugaagcccggggacauccugcucaucaacuccaccggcaaccugaucgcgccccggggguacuucaagauccgcagcggcaaguccagcaucaugcgguccgacgccccgaucggcaagugcaacagcgagugcaucacgcccaacggguccauccccaacgacaagcccuuccagaacgucaaccgcaucaccuacggcgccugcccgcgguacgugaagcagaacacccugaagcucgccaccgggaugcgcaacgugcccgagaagcagacgcggggcaucuucggggccaucgccggcuucaucgagaacggcugggaggggauggucgacggcugguacggguuccgccaccagaacagcgagggcaccgggcaggccgccgaccugaaguccacccaggcggccaucaaccagaucaacggcaagcugaaccggcucaucggcaagaccaacgagaaguuccaccagaucgagaaggaguucagcgagguggaggggcgcauccaggaccuggagaaguacguggaggacacgaagaucgaccugugguccuacaacgccgagcuccuggucgcccuggagaaccagcacaccaucgaccucaccgacagcgagaugaacaagcuguucgagcggaccaagaagcagcugcgcgagaacgccgaggacaugggcaacgggugcuucaagaucuaccacaagugcgacaacgcgugcaucggcuccauccgcaacgggacguacgaccacgacguguaccgggacgaggcccucaacaaccgcuuccagaucaagggcguggagcucaagagcggcuacaaggacuggauccuguggaucuccuucgccaucagcugcuuccugcugugcgucgcccugcucggguucaucaugugggccugccagaagggcaacauccggugcaacaucugcaucuga

SEQ ID NO: 64098 - RNA, 1701 nt, Artificial Sequence
  derived and/or modified CDS sequence (opt1) from hemagglutinin__InfluenzaA__AAX56570
augaagaccaucaucgcccugagcuacauccucugccugguguucgcccagaagcugcccggcaacgacaacuccaccgcgacgcucugccuggggcaccacgccgucccgaacggcacccuggugaagaccaucaccaacgaccagaucgaggugacgaacgccaccgagcucguccagagcuccagcaccucccgcaucugcgacagcccccaccagauccuggacggggagaacugcacccugaucgacgcccuccugggcgacccccacugcgacggguuccagaacaaggagugggaccuguucguggagcgguccaaggccuacagcaacugcuaccccuacgacgugccggacuacgucucccuccgcagccugguggcguccagcggcacgcuggaguucaacaacgaguccuucaacuggaccggcguggcccagaacgggaccagcuccgccugcaagcggcgcagcgacaaguccuucuucagccggcucaacuggcugcaccagcugaaguacaaguaccccgcccucaacgucaccaugcccaacaacgagaaguucgacaagcuguacaucuggggcgugcaccaccccgggacggacuccgaccagaucagccuguacgcgcaggccagcggccgcgugaccgucuccaccaagcggagccagcagaccgugaucccgaacaucgggucccgccccugggugcggggcgucagcuccggcaucagcaucuacuggacgaucgugaagcccggggacauccuccugaucaacuccaccggcaaccugaucgcgccccgcggguacuucaagauccggagcggcaaguccagcaucaugcgcuccgacgccccgaucggcaagugcaacagcgagugcaucacccccaacggguccauccccaacgacaagcccuuccagaacgugaaccggaucaccuacggcgccugcccgcgcuacgucaagcagaacacgcucaagcuggccaccgggaugcggaacgugcccgagaagcagacccgcggcaucuucggggccaucgccggcuucaucgagaacggcugggaggggaugauggacggcugguacggguuccggcaccagaacagcgagggcaccgggcaggccgccgaccugaaguccacgcaggcggccaucaaccagaucaacggcaagcucaaccgccugaucgagaagaccaacgagaaguuccaccagaucgagaaggaguucagcgagguggagggccggauccaggaccuggagaaguacgucgaggacaccaagaucgaccucugguccuacaacgccgagcugcugguggcccucgagaaccagcacaccaucgaccugacggacagcgagaugaacaagcuguucgagcgcaccaagaagcagcuccgggagaacgccgaggacauggggaacggcugcuucaagaucuaccacaagugcgacaacgcgugcaucggguccauccgcaacggcaccuacgaccacgacguguaccgcgacgaggcccugaacaaccgguuccagaucaagggggucgagcucaagagcggcuacaaggacuggauccuguggaucagcuucgccaucuccugcuuccugcugugcaucgugcuccugggcuucaucaugugggccugccagaaggggaacauccgcugcaacaucugcaucuga

SEQ ID NO: 64099 - RNA, 1701 nt, Artificial Sequence
  derived and/or modified CDS sequence (opt1) from hemagglutinin__InfluenzaA__AAX56590
augaagaccaucaucgcccugagcuacauccucugccugguguucgcccagaagcugcccggcaacgacaacuccaccgcgacgcucugccuggggcaccacgccgucccgaacggcacccuggugaagaccaucaccaacgaccagaucgaggugacgaacgccaccgagcucguccagagcuccagcaccucccgcaucugcgacagcccccaccagauccuggacggggagaacugcacccugaucgacgcccuccugggcgacccccacugcgacggguuccagaacaaggagugggaccuguucguggagcgguccaaggccuacagcaacugcuaccccuacgacgugccggacuacgucucccuccgcagccugguggcguccagcggcacgcuggaguucaacaacgaguccuucaacuggaccggcguggcccagaacgggaccagcuccgccugcaagcggcgcagcgacaaguccuucuucagccggcucaacuggcugcaccagcugaaguacaaguaccccgcccucaacgucaccaugcccaacaacgagaaguucgacaagcuguacaucuggggcgugcaccaccccuccacggacagcgaccagaucagccuguacgcgcaggccuccgggcgcgugaccgucagcaccaagcggucccagcagaccgugaucccgaacaucggcagccgccccugggugcgcggggucuccagccggaucuccaucuacuggacgaucgugaagcccggcgacauccuccugaucaacagcaccggcaaccugaucgcgccccggggguacuucaagauccgcuccggcaagagcuccaucaugcggagcgacgccccgaucgggaagugcaacuccgagugcaucacccccaacggcagcauccccaacgacaagcccuuccagaacgugaaccgcaucaccuacggcgccugcccgcgguacgucaagcagaacacgcucaagcuggccaccgggaugcgcaacgugcccgagaagcagacccggggcaucuucggggccaucgccggcuucaucgagaacgggugggagggcaugauggacggcugguacggguuccgccaccagaacuccgagggcaccgggcaggccgccgaccucaagagcacgcaggcggccaucaaccagaucaacggcaagcugaaccggcugaucgagaagaccaacgagaaguuccaccagaucgagaaggaguucuccgagguggaggggcgcauccaggaccuggagaaguacgucgaggacaccaagaucgaccucuggagcuacaacgccgagcugcugguggcccucgagaaccagcacaccaucgaccugacggacuccgagaugaacaagcuguucgagcggaccaagaagcagcuccgcgagaacgccgaggacaugggcaacggcugcuucaagaucuaccacaagugcgacaacgcgugcaucgggagcauccgcaacggcaccuacgaccacgacguguaccgggacgaggcccugaacaaccgcuuccagaucaagggggucgagcucaagagcggcuacaaggacuggauccuguggaucuccuucgccaucagcugcuuccugcugugcaucgugcuccugggguucaucaugugggccugccagaagggcaacauccggugcaacaucugcaucuga

SEQ ID NO: 64100 - RNA, 1701 nt, Artificial Sequence; identical to SEQ ID NO: 64097
  derived and/or modified CDS sequence (opt1) from hemagglutinin__InfluenzaA__AAX56600

SEQ ID NO: 64101 - RNA, 1701 nt, Artificial Sequence
  derived and/or modified CDS sequence (opt1) from hemagglutinin__InfluenzaA__AAX57644
augaagaccaucaucgcccugagcuacauccucugccugguguucgcccagaagcugcccggcaacgacaacuccaccgcgacgcucugccuggggcaccacgccgucccgaacggcaccaucgugaagaccaucaccaacgaccagaucgaggugacgaacgccaccgagcugguccagagcuccagcaccgggggcaucugcgacagcccccaccagauccucgacggggagaacugcacccugaucgacgcccugcucggcgacccccagugcgacggcuuccagaacaagaagugggaccuguucguggagcgcagcaaggccuacuccaacugcuaccccuacgacgugccggacuacgcgagccugcggucccucgucgccagcuccgggacgcuggaguucaacaacgagagcuucgacuggaccggcgugacccagaacgggaccuccagcgccugcaagcgccgguccaacaagagcuucuucucccgccugaacuggcucacgcaccugaaguacaaguaccccgcccugaacgugaccaugcccaacaacgagaaguucgacaagcucuacaucuggggcguccaccaccccgggaccgacagcgaccagaucucccuguacgcgcaggccagcggccggaucaccgugagcacgaagcgcucccagcagaccgugaucccgaacaucggcagccggccccgcguccgggacguguccagccgcaucuccaucuacuggaccguggucaagcccggggacauccugcucaucaacagcaccggcaaccugaucgcgccccggggguacuucaagaugcgcuccggcaagagcuccaucaugcggagcgacgccccgaucggcaagugcaacuccgagugcaucacgcccaacgggagcauccccaacgacaagcccuuccagaacgugaaccgcaucaccuacggcgccugcccgcgguacgugaagcagaacacccugaagcucgccaccgggaugcgcaacguccccgagaagcagacgcggggcaucuucggggccaucgccggcuucaucgagaacggcugggaggggaugguggacggcugguacggguuccgccaccagaacuccgagggcaccgggcaggccgccgaccugaaguccacccaggcggccaucaaccagaucaacggcaagcugaaccggcucaucggcaagaccaacgagaaguuccaccagaucgagaaggaguucuccgagguggaggggcgcauccaggaccuggagaaguacgucgaggacacgaagaucgaccuguggagcuacaacgccgagcuccugguggcccuggagaaccagcacaccaucgaccucaccgacuccgagaugaacaagcuguucgagcggaccaagaagcagcugcgcgagaacgccgaggacaugggcaacgggugcuucaagaucuaccacaagugcgacaacgcgugcaucggcagcauccgcaacgggacguacgaccacgacguguaccgggacgaggcccucaacaaccgcuuccagaucaagggcgucgagcugaaguccggcuacaaggacuggauccuguggaucagcuucgccaucagcugcuuccuccugugcguggcccugcucggguucaucaugugggccugccagaagggcaacauccggugcaacaucugcaucuga

SEQ ID NO: 64102 - RNA, 1701 nt, Artificial Sequence; identical to SEQ ID NO: 64055
  derived and/or modified CDS sequence (opt1) from hemagglutinin__InfluenzaA__AAX57654

SEQ ID NO: 64103 - RNA, 1701 nt, Artificial Sequence; identical to SEQ ID NO: 64071
  derived and/or modified CDS sequence (opt1) from hemagglutinin__InfluenzaA__AAX57664

SEQ ID NO: 64104 - RNA, 1701 nt, Artificial Sequence
  derived and/or modified CDS sequence (opt1) from hemagglutinin__InfluenzaA__AAX57684
augaagaccaucaucgcccugagcuacauccucugccugguguucgcccagaagcugcccggcaacgacaacuccaccgcgacgcucugccuggggcaccacgccgucccgaacggcacccuggugaagaccaucaccaacgaccagaucgaggugacgaacgccaccgagcucguccagagcuccagcaccucccgcaucugcgacagcccccaccagauccuggacggggagaacugcacccugaucgacgcccuccugggcgacccccacugcgacggguuccagaacaaggagugggaccuguucguggagcgguccaaggccuacagcaacugcuaccccuacgacgugccggacuacgucucccuccgcagccugguggcguccagcggcacgcuggaguucaacaacgaguccuucaacuggaccggcguggcccagaacgggaccagcuccgccugcaagcggcgcagcgacaaguccuucuucagccggcucaacuggcugcaccagcugaaguacaaguaccccgcccucaacgucaccaugcccaacaacgagaaguucgacaagcuguacaucuggggcgugcaccaccccgggacggacuccgaccagaucagccuguacgcgcaggccagcggccgcgugaccgucuccaccaagcggagccagcagaccgugaucccgaacaucggguccggccccugggugcgcggcgucagcucccggaucagcaucuacuggacgaucgugaagcccggggacauccuccugaucaacuccaccggcaaccugaucgcgccccgcggguacuucaagauccggagcggcaaguccagcaucaugcgcuccgacgccccgaucggcaagugcaacagcgagugcaucacccccaacggguccauccccaacgacaagcccuuccagaacgugaaccggaucaccuacggcgccugcccgcgcuacgucaagcagaacacgcucaagcuggccaccgggaugcggaacgugcccgagaagcagacccgcggcaucuucggggccaucgccggcuucaucgagaacggcugggaggggaugauggacggcugguacggguuccggcaccagaacagcgagggcaccgggcaggccgccgaccugaaguccacgcaggcggccaucaaccagaucaacggcaagcucaaccgccugaucgagaagaccaacgagaaguuccaccagaucgagaaggaguucagcgagguggagggccggauccaggaccuggagaaguacgucgaggacaccaagaucgaccucugguccuacaacgccgagcugcugguggcccucgagaaccagcacaccaucgaccugacggacagcgagaugaacaagcuguucgagcgcaccaagaagcagcuccgggagaacgccgaggacauggggaacggcugcuucaagaucuaccacaagugcgacaacgcgugcaucggguccauccgcaacggcaccuacgaccacgacguguaccgcgacgaggcccugaacaaccgguuccagaucaagggggucgagcucaagagcggcuacaaggacuggauccuguggaucagcuucgccaucuccugcuuccugcugugcaucgugcuccugggcuucaucaugugggccugccagaaggggaacauccgcugcaacaucugcaucuga

SEQ ID NO: 64105 - RNA, 1701 nt, Artificial Sequence; identical to SEQ ID NO: 64075
  derived and/or modified CDS sequence (opt1) from hemagglutinin__InfluenzaA__AAX57694

SEQ ID NO: 64106 - RNA, 1701 nt, Artificial Sequence; identical to SEQ ID NO: 64097
  derived and/or modified CDS sequence (opt1) from hemagglutinin__InfluenzaA__AAX57704

SEQ ID NO: 64107 - RNA, 1701 nt, Artificial Sequence; identical to SEQ ID NO: 64075
  derived and/or modified CDS sequence (opt1) from hemagglutinin__InfluenzaA__AAX57714

SEQ ID NO: 64108 - RNA, 1701 nt, Artificial Sequence; identical to SEQ ID NO: 64104
  derived and/or modified CDS sequence (opt1) from hemagglutinin__InfluenzaA__AAX57733

SEQ ID NO: 64109 - RNA, 1701 nt, Artificial Sequence
  derived and/or modified CDS sequence (opt1) from hemagglutinin__InfluenzaA__AAX57734
augaagaccaucaucgcccugagcuacauccucugccugguguucgcccagaagcugcccggcaacgacaacuccaccgcgacgcucugccuggggcaccacgccgucccgaacggcacccuggugaagaccaucaccaacgaccagaucgaggugacgaacgccaccgagcucguccagagcuccagcaccucccgcaucugcaacagcccccaccagauccuggacggggagaacugcacccugaucgacgcccuccugggcgacccccacugcgacggguuccagaacaaggagugggaccuguucguggagcgguccaaggccuacagcaacugcuaccccuacgacgugccggacuacgucucccuccgcagccugguggcguccagcggcacgcuggaguucaacaacgaguccuucaacuggaccggcguggcccagaacgggaccagcuccgccugcaagcggcgcagcgacaaguccuucuucagccggcucaacuggcugcaccagcugaaguacaaguaccccgcccucaacgucaccaugcccaacaacgagaaguucgacaagcuguacaucuggggcgugcaccaccccgggacggacuccgaccagaucagccuguacgcgcaggccagcggccgcgugaccgucuccaccaagcggagccagcagaccgugaucccgaacaucggguccggccccugggugcgcggcgucagcucccggaucagcaucuacuggacgaucgugaagcccggggacauccuccugaucaacuccaccggcaaccugaucgcgccccgcggguacuucaagauccggagcggcaaguccagcaucaugcgcuccgacgccccgaucggcaagugcaacagcgagugcaucacccccaacggguccauccccaacgacaagcccuuccagaacgugaaccggaucaccuacggcgccugcccgcgcuacgucaagcagaacacgcucaagcuggccaccgggaugcggaacgugcccgagaagcagacccgcggcaucuucggggccaucgccggcuucaucgagaacggcugggaggggaugauggacggcugguacggguuccggcaccagaacagcgagggcaccgggcaggccgccgaccugaaguccacgcaggcggccaucaaccagaucaacggcaagcucaaccgccugaucgagaagaccaacgagaaguuccaccagaucgagaaggaguucagcgagguggagggccggauccaggaccuggagaaguacgucgaggacaccaagaucgaccucugguccuacaacgccgagcugcugguggcccucgagaaccagcacaccaucgaccugacggacagcgagaugaacaagcuguucgagcgcaccaagaagcagcuccgggagaacgccgaggacauggggaacggcugcuucaagaucuaccacaagugcgacaacgcgugcaucggguccauccgcaacggcaccuacgaccacgacguguaccgcgacgaggcccugaacaaccgguuccagaucaagggggucgagcucaagagcggcuacaaggacuggauccuguggaucagcuucgccaucuccugcuuccugcugugcaucgugcuccugggcuucaucaugugggccugccagaaggggaacauccgcugcaacaucugcaucuga

SEQ ID NO: 64110 - RNA, 1701 nt, Artificial Sequence; identical to SEQ ID NO: 64096
  derived and/or modified CDS sequence (opt1) from hemagglutinin__InfluenzaA__AAX57744

SEQ ID NO: 64111 - RNA, 1701 nt, Artificial Sequence; identical to SEQ ID NO: 64096
  derived and/or modified CDS sequence (opt1) from hemagglutinin__InfluenzaA__AAX57764

SEQ ID NO: 64112 - RNA, 1701 nt, Artificial Sequence; identical to SEQ ID NO: 64096
  derived and/or modified CDS sequence (opt1) from hemagglutinin__InfluenzaA__AAX57774

SEQ ID NO: 64113 - RNA, 1701 nt, Artificial Sequence
  derived and/or modified CDS sequence (opt1) from hemagglutinin__InfluenzaA__AAX57784
augaagaccaucaucgcccugagcuacauccucugccugguguucgcccagaagcugcccggcaacgacaacuccaccgcgacgcucugccuggggcaccacgccgucccgaacggcacccuggugaagaccaucaccaacgaccagaucgaggugacgaacgccaccgagcucguccagaacagcuccaccagccgcaucugcgacagcccccaccagauccuggacggggagaacugcacccugaucgacgcccuccugggcgacccccacugcgacggguuccagaacaaggagugggaccuguucguggagcggagcaaggccuacuccaacugcuaccccuacgacgugccggacuacgucagccuccgcucccugguggcgagcuccggcacgcuggaguucaacaacgagagcuucaacuggaccggcguggcccagaacgggaccuccagcgccugcaagcggcgcuccgacaagagcuucuucucccggcucaacuggcugcaccagcugaaguacaaguaccccgcccucaacgucaccaugcccaacaacgagaaguucgacaagcuguacaucuggggcgugcaccaccccgggacggacagcgaccagaucucccuguacgcgcaggccagcggccgcgugaccgucagcaccaagcggucccagcagaccgugaucccgaacaucgggagccgccccugggugcggggcgucuccagccgcaucuccaucuacuggacgaucgugaagcccggcgacauccuccugaucaacagcaccgggaaccugaucgcgccccggggcuacuucaagauccgcuccgggaaguccuccaucaugcggagcgacgccccgaucggcaagugcaacuccgagugcaucacccccaacggcagcauccccaacgacaagcccuuccagaacgugaaccgcaucaccuacggggccugcccgcgguacgucaagcagaacacgcucaagcuggccaccggcaugcgcaacgugcccgagaagcagacccgggggaucuucggcgccaucgccggguucaucgagaacggcugggagggcaugauggacgggugguacggcuuccgccaccagaacuccgaggggaccggccaggccgccgaccucaagagcacgcaggcggccaucaaccagaucaacgggaagcugaaccggcugaucgagaagaccaacgagaaguuccaccagaucgagaaggaguucuccgagguggagggccgcauccaggaccuggagaaguacgucgaggacaccaagaucgaccucuggagcuacaacgccgagcugcugguggcccucgagaaccagcacaccaucgaccugacggacuccgagaugaacaagcuguucgagcggaccaagaagcagcuccgcgagaacgccgaggacaugggcaacgggugcuucaagaucuaccacaagugcgacaacgcgugcaucggcagcauccgcaacgggaccuacgaccacgacguguaccgggacgaggcccugaacaaccgcuuccagaucaagggcgucgagcugaaguccggguacaaggacuggauccucuggaucagcuucgccaucagcugcuuccugcugugcaucgugcuccugggcuucaucaugugggccugccagaagggcaacauccggugcaacaucugcaucuga

SEQ ID NO: 64114 - RNA, 1701 nt, Artificial Sequence
  derived and/or modified CDS sequence (opt1) from hemagglutinin__InfluenzaA__AAX57794
augaagaccaucaucgcccugagcuacauccucugccugguguucgcccagaagcugcccgucaacgacaacuccaccgcgacgcucugccugggccaccacgccgugccgaacgggacccuggugaagaccaucaccaacgaccacaucgaggucacgaacgccaccgagcucgugcagagcuccagcaccggccgcaucugcgacagcccccaccagauccuggacggggagaacugcacccugaucgacgcccuccugggcgacccccacugcgacggguuccagaacaaggagugggaccuguucguggagcggagcacggccuacuccaacugcuaccccuacgacgucccggacuacgcgagccuccgcucccugguggccagcuccggcacccuggaguucaacaacgagagcuucaacuggaccggcguggcccagaacgggaccuccagcgccugcaagcggcgcuccaucaagagcuucuucucccggcucaacuggcugcaccagcugaaguacaaguaccccgcgcucaacgucacgaugcccaacaacgagaaguucgacaagcuguacaucuggggcgugcaccaccccagcaccgacuccgaccagaucagccuguacgcccaggccagcgggcgcgugaccgucuccaccaagcggagccagcagacggugaucccgaacaucggcucccgccccugggugcgcggggucagcucccggaucagcauccacuggaccaucgugaagcccggcgacauccuccugaucaacuccaccggcaaccugaucgcgccccggggguacuucaagauccgcagcggcaaguccagcaucaugcgguccaacgccccgaucgggaagugcaacagcgagugcaucacccccaacggcuccauccccaacgacaagcccuuccagaacgugaaccgcaucacguacggcgccugcccgcgguacgucaagcagaacacccucaagcuggccaccgggaugcgcaacgugcccgagaagcagacccggggcaucuucggggccaucgccggcuucaucgagaacgggugggagggcaugguggacggcugguacggguuccgccaccagaacagcgagggcacggggcaggccgcggaccugaaguccacccaggccgccaucaaccagaucaacggcaagcucaaccggcugaucgagaagaccaacgagaaguuccaccagaucgagaaggaguucagcgaggucgaggggcgcauccaggaccuggagaaguacguggaggacaccaagaucgaccucugguccuacaacgccgagcugcugguggcccucgagaaccagcacacgaucgaccugaccgacagcgagaugaacaagcuguucgagcggacccgcaagcagcuccgcgagaacgcggaggacaugggcaacggcugcuucaagaucuaccacaagugcgacaacgccugcaucggguccauccggaacggcaccuacgaccacgacgucuaccgcgacgaggcccugaacaaccgguuccagaucaaggggguggagcugaaguccggcuacaaggacuggauccucuggaucagcuucgccaucuccugcuuccugcugugcgucgugcuccugggguucaucaugugggccugccagaagggcaacauccgcugcaacaucugcaucuga

SEQ ID NO: 64115 - RNA, 1701 nt, Artificial Sequence; identical to SEQ ID NO: 64096
  derived and/or modified CDS sequence (opt1) from hemagglutinin__InfluenzaA__AAX57814

SEQ ID NO: 64116 - RNA, 1701 nt, Artificial Sequence
  derived and/or modified CDS sequence (opt1) from hemagglutinin__InfluenzaA__AAX57824
augaagaccaucaucgcccugagcuacauccucugcaugguguucgcccagaagcugcccgucaacgacaacuccaccgcgacgcugugccucggccaccacgccgugccgaacgggacccuggugaagaccaucaccaacgaccacaucgaggucacgaacgccaccgagcuggugcagagcuccagcaccggccgcaucugcgacagcccccaccagauccucgacggggagaacugcacccugaucgacgcccugcucggcgacccccacugcgacggguuccagaacaaggagugggaccuguucguggagcggagcacggccuacuccaacugcuaccccuacgacgucccggacuacgcgagccugcgcucccucguggccagcuccggcacccuggaguucaacaacgagagcuucaacuggaccggcguggcccagaacgggaccuccagcgccugcaagcggcgcuccaucaagagcuucuucucccggcugaacuggcuccaccagcugaaguacaaguaccccgcgcugaacgucacgaugcccaacaacgagaaguucgacaagcucuacaucuggggcgugcaccaccccagcaccgacuccgaccagaucagccuguacgcccaggccagcgggcgcgugaccgucuccaccaagcggagccagcagacggugaucccgaacaucggcucccgccccugggugcgcggggucagcucccggaucagcaucuacuggaccaucgugaagcccggcgacauccugcucaucaacuccaccggcaaccugaucgcgccccggggguacuucaagauccgcagcggcaaguccagcaucaugcgguccaacgccccgaucgggaagugcaacagcgagugcaucacccccaacggcuccauccccaacgacaagcccuuccagaacgugaaccgcaucacguacggcgccugcccgcgguacgucaagcagaacacccugaagcucgccaccgggaugcgcaacgugcccgagaagcagacccggggcaucuucggggccaucgccggcuucaucgagaacgggugggagggcaugguggacggcugguacggguuccgccaccagaacagcgagggcacggggcaggccgcggaccugaaguccacccaggccgccaucaaccagaucaacggcaagcugaaccggcucaucgagaagaccaacgagaaguuccaccagaucgagaaggaguucagcgaggucgaggggcgcauccaggaccuggagaaguacguggaggacaccaagaucgaccugugguccuacaacgccgagcuccugguggcccuggagaaccagcacacgaucgaccucaccgacagcgagaugaacaagcuguucgagcggacccgcaagcagcugcgcgagaacgcggaggacaugggcaacggcugcuucaagaucuaccacaagugcgacaacgccugcaucggguccauccggaacggcaccuacgaccacgacgucuaccgcgacgaggcccucaacaaccgguuccagaucaaggggguggagcugaaguccggcuacaaggacuggauccuguggaucagcuucgccaucuccugcuuccuccugugcgucgugcugcucggguucaucaugugggccugccagaagggcaacauccgcugcaacaucugcaucuga

SEQ ID NO: 64117 - RNA, 1701 nt, Artificial Sequence; identical to SEQ ID NO: 64096
  derived and/or modified CDS sequence (opt1) from hemagglutinin__InfluenzaA__AAX57834

SEQ ID NO: 64118 - RNA, 1701 nt, Artificial Sequence; identical to SEQ ID NO: 64096
  derived and/or modified CDS sequence (opt1) from hemagglutinin__InfluenzaA__AAX57844

SEQ ID NO: 64119 - RNA, 1701 nt, Artificial Sequence
  derived and/or modified CDS sequence (opt1) from hemagglutinin__InfluenzaA__AAX57864
augaagaccaucaucgcccugagcuacuuccucugccugguguucgcccagaagcugcccgucaacgacaacuccaccgcgacgcucugccugggccaccacgccgugccgaacgggacccuggugaagaccaucaccaacgaccacaucgaggucacgaacgccaccgagcucgugcagagcuccagcaccggccgcaucugcgacagcccccaccagauccuggacggggagaacugcacccugaucgacgcccuccugggcgacccccacugcgacggguuccagaacaaggagugggaccuguucguggagcggagcacggccuacuccaacugcuaccccuacgacgucccggacuacgcgagccuccgcucccugguggccagcuccggcacccuggaguucaacaacgagagcuucaacuggaccggcguggcccagaacgggaccuccagcgccugcaagcggcgcuccaucaagagcuucuucucccggcucaacuggcugcaccagcugaaguacaaguaccccgcgcucaacgucacgaugcccaacaacgagaaguucgacaagcuguacaucuggggcgugcaccaccccagcaccgacuccgaccagaucagccuguacgcccaggccagcgggcgcgugaccgucuccaccaagcggagccagcagacggugaucccgaacaucggcucccgccccugggugcgcggggucagcucccggaucagcaucuacuggaccaucgugaagcccggcgacauccuccugaucaacuccaccggcaaccugaucgcgccccggggguacuucaagauccgcagcggcaaguccagcaucaugcgguccaacgccccgaucgggaagugcaacagcgagugcaucacccccaacggcuccauccccaacgacaagcccuuccagaacgugaaccgcaucacguacggcgccugcccgcgguacgucaagcagaacacccucaagcuggccaccgggaugcgcaacgugcccgagaagcagacccggggcaucuucggggccaucgccggcuucaucgagaacgggugggagggcaugguggacggcugguacggguuccgccaccagaacagcgagggcacggggcaggccgcggaccugaaguccacccaggccgccaucaaccagaucaacggcaagcucaaccggcugaucgagaagaccaacgagaaguuccaccagaucgagaaggaguucagcgaggucgaggggcgcauccaggaccuggagaaguacguggaggacaccaagaucgaccucugguccuacaacgccgagcugcugguggcccucgagaaccagcacacgaucgaccugaccgacagcgagaugaacaagcuguucgagcggacccgcaagcagcuccgcgagaacgcggaggacaugggcaacggcugcuucaagaucuaccacaagugcgacaacgccugcaucggguccauccggaacggcaccuacgaccacgacgucuaccgcgacgaggcccugaacaaccgguuccagaucaaggggguggagcugaaguccggcuacaaggacuggauccucuggaucagcuucgccaucuccugcuuccugcugugcgucgugcuccugggguucaucaugugggccugccagaagggcaacauccgcugcaacaucugcaucuga

SEQ ID NO: 64120 - RNA, 1701 nt, Artificial Sequence; identical to SEQ ID NO: 64096
  derived and/or modified CDS sequence (opt1) from hemagglutinin__InfluenzaA__AAX57874

SEQ ID NO: 64121 - RNA, 1701 nt, Artificial Sequence; identical to SEQ ID NO: 64096
  derived and/or modified CDS sequence (opt1) from hemagglutinin__InfluenzaA__AAX57884

SEQ ID NO: 64122 - RNA, 1701 nt, Artificial Sequence
  derived and/or modified CDS sequence (opt1) from hemagglutinin__InfluenzaA__AAX57894
augaagaccaucaucgcccugagcuacauccucugccugguguucgcccagaagcugcccgucaacgacaacuccaccgcgacgcucugccugggccaccacgccgugccgaacgggacccuggugaagaccaucaccaacgaccacaucgaggucacgaacgccaccgagcucgugcagagcuccagcaccggccgcaucugcgacagcccccaccaggugcuggacggggagaacugcacccugaucgacgcccuccugggcgacccccacugcgacggguuccagaacaaggagugggaccuguucgucgagcggagcacggccuacuccaacugcuaccccuacgacgugccggacuacgcgagccuccgcucccugguggccagcuccggcacccuggaguucaacaacgagagcuucaacuggaccggcgucgcccagaacgggaccuccagcgccugcaagcggcgcuccaucaagagcuucuucucccggcucaacuggcugcaccagcugaaguacaaguaccccgcgcucaacgugacgaugcccaacaacgagaaguucgacaagcuguacaucuggggcgugcaccaccccagcaccgacuccgaccagaucagccuguacgcccaggccagcgggcgcgucaccguguccaccaagcggagccagcagacggugaucccgaacaucggcucccgccccuggguccgcggggugagcucccggaucagcaucuacuggaccaucgugaagcccggcgacauccuccugaucaacuccaccggcaaccugaucgcgccccggggguacuucaagauccgcagcggcaaguccagcaucaugcgguccaacgccccgaucgggaagugcaacagcgagugcaucacccccaacggcuccauccccaacgacaagcccuuccagaacgucaaccgcaucacguacggcgccugcccgcgguacgugaagcagaacacccucaagcuggccaccgggaugcgcaacgugcccgagaagcagacccggggcaucuucggggccaucgccggcuucaucgagaacgggugggagggcauggucgacggcugguacggguuccgccaccagaacagcgagggcacggggcaggccgcggaccugaaguccacccaggccgccaucaaccagaucaacggcaagcucaaccggcugaucgagaagaccaacgagaaguuccaccagaucgagaaggaguucagcgagguggaggggcgcauccaggaccuggagaaguacguggaggacaccaagaucgaccucugguccuacaacgccgagcugcuggucgcccucgagaaccagcacacgaucgaccugaccgacagcgagaugaacaagcuguucgagcggacccgcaagcagcuccgcgagaacgcggaggacaugggcaacggcugcuucaagaucuaccacaagugcgacaacgccugcaucggguccauccggaacggcaccuacgaccacgacguguaccgcgacgaggcccugaacaaccgguuccagaucaagggggucgagcugaaguccggcuacaaggacuggauccucuggaucagcuucgccaucuccugcuuccugcugugcguggugcuccugggguucaucaugugggccugccagaagggcaacauccgcugcaacaucugcaucuga

SEQ ID NO: 64123 - RNA, 1701 nt, Artificial Sequence
  derived and/or modified CDS sequence (opt1) from hemagglutinin__InfluenzaA__AAX57924
augaagaccaucaucgcccugagcuacauccucugccugguguucgcccagaagcugcccgucaacgacaacuccaccgcgacgcucugccugggccaccacgccgugccgaacgggacccuggugaagaccaucaccaacgaccacaucgaggucacgaacgccaccgagcucgugcagagcuccagcaccggccgcaucugcgacagcccccaccagauccuggacggggagaacugcacccugaucgacgcccuccugggcgacccccacugcgacggguuccagaacaaggagugggaccuguucguggagcggagcacggccuacuccaacugcuaccccuacgacgucccggacuacgcgagccuccgcucccugguggccagcuccggcacccuggaguucaacaacgagagcuucaacuggaccggcguggcccagaacgggaccuccuucgccugcaagcggcgcagcaucaaguccuucuucagccggcucaacuggcugcaccagcugaaguacaaguaccccgcgcucaacgucacgaugcccaacaacgagaaguucgacaagcuguacaucuggggcgugcaccaccccuccaccgacagcgaccagaucucccuguacgcccaggccagcgggcgcgugaccgucagcaccaagcggucccagcagacggugaucccgaacaucggcagccgccccugggugcgcggggucuccagccggaucuccaucuacuggaccaucgugaagcccggcgacauccuccugaucaacagcaccggcaaccugaucgcgccccggggguacuucaagauccgcuccggcaagagcuccaucaugcggagcaacgccccgaucgggaagugcaacuccgagugcaucacccccaacggcagcauccccaacgacaagcccuuccagaacgugaaccgcaucacguacggcgccugcccgcgguacgucaagcagaacacccucaagcuggccaccgggaugcgcaacgugcccgagaagcagacccggggcaucuucggggccaucgccggcuucaucgagaacgggugggagggcaugguggacggcugguacggguuccgccaccagaacuccgagggcacggggcaggccgcggaccugaaguccacccaggccgccaucaaccagaucaacggcaagcucaaccggcugaucgagaagaccaacgagaaguuccaccagaucgagaaggaguucuccgaggucgaggggcgcauccaggaccuggagaaguacguggaggacaccaagaucgaccucuggagcuacaacgccgagcugcugguggcccucgagaaccagcacacgaucgaccugaccgacuccgagaugaacaagcuguucgagcggacccgcaagcagcuccgcgagaacgcggaggacaugggcaacggcugcuucaagaucuaccacaagugcgacaacgccugcaucgggagcauccggaacggcaccuacgaccacgacgucuaccgcgacgaggcccugaacaaccgguuccagaucaaggggguggagcugaaguccggcuacaaggacuggauccucuggaucagcuucgccaucagcugcuuccugcugugcgucgugcuccugggguucaucaugugggccugccagaagggcaacauccgcugcaacaucugcaucuga

SEQ ID NO: 64124 - RNA, 1701 nt, Artificial Sequence; identical to SEQ ID NO: 64096
  derived and/or modified CDS sequence (opt1) from hemagglutinin__InfluenzaA__AAX57934

SEQ ID NO: 64125 - RNA, 1701 nt, Artificial Sequence
  derived and/or modified CDS sequence (opt1) from hemagglutinin__InfluenzaA__AAX57944
augaagaccaucaucgcccugagcuacauccucugccugguguucgcccagaagcugcccggcaacgacaacuccaccgcgacgcucugccuggggcaccacgccgucccgaacggcacccuggugaagaccaucaccaacgaccagaucgaggugacgaacgccaccgagcucguccagagcuccagcaccgggcgcaucugcgacagcccccaccagauccuggacggcgagaacugcacccugaucgacgcccuccugggggacccccacugcgacggcuuccagaacaaggagugggaccuguucguggagcggagcaaggccuacuccaacugcuaccccuacgacgugccggacuacgucagccuccgcucccugguggcgagcuccggcacgcuggaguucaacaacgagagcuucaacuggaccgggguggcccagaacggcaccuccagcgccugcaagcggcgcuccgacaagagcuucuucucccggcucaacuggcugcaccagcugaaguacaaguaccccgcccucaacgucaccaugcccaacaacgagaaguucgacaagcuguacaucuggggcgugcaccaccccgggacggacagcgaccagaucucccuguacgcgcaggccagcgggcgcgugaccgucagcaccaagcggucccagcagaccgugaucccgaacaucggcagcggccccugggugcgcggggucuccagccggaucuccaucuacuggacgaucgugaagcccggcgacauccuccugaucaacagcaccgggaaccugaucgcgccccgcggcuacuucaagauccgguccggcaagagcuccaucaugcgcagcgacgccccgaucgggaagugcaacuccgagugcaucacccccaacggcagcauccccaacgggaagcccuuccagaacgugaaccggaucaccuacggcgccugcccgcgcuacgucaagcagaacacgcucaagcuggccaccgggaugcggaacgugcccgagaagcagacccgcggcaucuucggcgccaucgccggguucaucgagaacggcugggaggggaugauggacggcugguacggguuccggcaccagaacuccgagggcaccggccaggccgccgaccugaaguccacgcaggcggccaucaaccagaucaacgggaagcucaaccgccugaucgagaagaccaacgagaaguuccaccagaucgagaaggaguucuccgagguggagggccggauccaggaccuggagaaguacgucgaggacaccaagaucgaccucuggagcuacaacgccgagcugcugguggcccucgagaaccagcacaccaucgaccugacggacuccgagaugaacaagcuguucgagcgcaccaagaagcagcuccgggagaacgccgaggacauggggaacggcugcuucaagaucuaccacaagugcgacaacgcgugcaucgggagcauccgcaacggcaccuacgaccacgacguguaccgcgacgaggcccugaacaaccgguuccagaucaaguccgucgagcucaagagcggcuacaaggacuggauccuguggaucagcuucgccaucuccugcuuccugcugugcaucgugcuccugggguucaucaugugggccugccagaagggcaacauccgcugcaacaucugcaucuga

SEQ ID NO: 64126 - RNA, 1701 nt, Artificial Sequence
  derived and/or modified CDS sequence (opt1) from hemagglutinin__InfluenzaA__AAX76623
augaagaccaucaucgcccugagcuacauccucugccugguguucgcccagaagcugcccggcaacgacaaguccaccgcgacgcucugccuggggcaccacgccgucccgaacggcaccaucgugaagaccaucaccaacgaccagaucgaggugacgaacgccaccgagcugguccagagcuccagcaccgggggcaucugcgacagcccccaccagauccucgacggggagaacugcacccugaucgacgcccugcucggcgacccccagugcgacggcuuccagaacaagaagugggaccuguucguggagcgcagcaaggccuacuccaacugcuaccccuacgacgugccggacuacgcgagccugcggucccucgucgccagcuccgggacgcuggaguucaacaacgagagcuucgacuggaccggcgugacccagaacgggaccuccagcgccugcaagcgccgguccaacaagagcuucuucucccgccugaacuggcucacgcaccugaaguacaaguaccccgcccugaacgugaccaugcccaacaacgagaaguucgacaagcucuacaucuggggcguccaccaccccgggaccgacagcgaccagaucucccuguacgcgcaggccagcggccggaucaccgugagcacgaagcgcucccagcagaccgugaucccgaacaucggcagccggccccgcguccgggacaucuccagccgcaucuccaucuacuggaccaucgugaagcccggggacauccugcucaucaacagcaccggcaaccugaucgcgccccggggguacuucaagauccgcuccggcaagagcuccaucaugcggagcgacgccccgaucggcaagugcaacuccgagugcaucacgcccaacgggagcauccccaacgacaagcccuuccagaacgugaaccgcaucaccuacggcgccugcccgcgguacgucaagcagaacacccugaagcucgccaccgggaugcgcaacgugcccgagaagcagacgcggggcaucuucggggccaucgccggcuucaucgagaacggcugggaggggaugguggacggcugguacggguuccgccaccagaacuccgagggcaccgggcaggccgccgaccugaaguccacccaggcggccaucaaccagaucaacggcaagcugaaccggcucaucggcaagaccaacgagaaguuccaccagaucgagaaggaguucuccgaggucgaggggcgcauccaggaccuggagaaguacguggaggacacgaagaucgaccuguggagcuacaacgccgagcuccugguggcccuggagaaccagcacaccaucgaccucaccgacuccgagaugaacaagcuguucgagcggaccaagaagcagcugcgcgagaacgccgaggacaugggcaacgggugcuucaagaucuaccacaagugcgacaacgcgugcaucggcagcauccgcaacgggacguacgaccacgacgucuaccgggacgaggcccucaacaaccgcuuccagaucaagggcguggagcugcgguccggcuacaaggacuggauccuguggaucagcuucgccaucagcugcuuccuccugugcguggccucccugggguucaucaugugggccugccagaagggcaacauccgcugcaacaucugcaucuga

SEQ ID NO: 64127 - RNA, 1701 nt, Artificial Sequence
  derived and/or modified CDS sequence (opt1) from hemagglutinin__InfluenzaA__AAX76643
augaagaccaucaucgcccugagcuacuuccucugccugguguucgcccagaagcugcccggcaacgacaacuccaccgcgacgcucugccuggggcaccacgccgucccgaacggcaccaucgugaagaccaucaccaacgaccagaucgaggugacgaacgccaccgagcugguccagagcuccagcaccgggggcaucugcgacagcccccaccagauccucgacggggagaacugcacccugaucgacgcccugcucggcgacccccagugcgacggcuuccagaacaagaagugggaccuguucguggagcgcagcaaggccuacuccaacugcuaccccuacgacgugccggacuacgcgagccugcggucccucgucgccagcuccgggacgcuggaguucaacaacgagagcuucaacuggaccggcgugacccagaacgggaccuccagcgccugcgagcgccgguccaacaagagcuucuucucccgccugaacuggcucacgcaccugaaguacaaguaccccgcccugaacgugaccaugcccaacaacgagaaguucgacaagcucuacaucuggggcguccaccaccccgggaccgacagcgaccagaucucccuguacgcgcaggccagcggccggaucaccgugagcacgaagcgcucccagcagaccgugaucccgaacaucggcagccggccccgcguccgggacguguccagccgcaucuccaucuacuggaccaucgugaagcccggggacauccugcucaucaacagcaccggcaaccugaucgcgccccggggguacuucaagauccgcuccggcaagagcuccaucaugcggagcgacgccccgaucggcaagugcaacuccgagugcaucacgcccaacgggagcauccccaacgacaagcccuuccagaacgucaaccgcaucaccuacggcgccugcccgcgguacgugaagcagaacacccugaagcucgccaccgggaugcgcaacgugcccgagaagcagacgcggggcaucuucggggccaucgccggcuucaucgagaacggcugggaggggauggucgacggcugguacggguuccgccaccagaacuccgagggcaccgggcaggccgccgaccugaaguccacccaggcggccaucaaccagaucaacggcaagcugaaccggcucaucggcaagaccaacgagaaguuccaccagaucgagaaggaguucuccgagguggaggggcgcauccaggaccuggagaaguacguggaggacacgaagaucgaccuguggagcuacaacgccgagcuccuggucgcccuggagaaccagcacaccaucgaccucaccgacuccgagaugaacaagcuguucgagcggaccaagaagcagcugcgcgagaacgccgaggacaugggcaacgggugcuucaagaucuaccacaagugcgacaacgcgugcaucggcagcauccgcaacgggacguacgaccacgacguguaccgggacgaggcccucaacaaccgcuuccagaucaagggcguggagcugaaguccggcuacaaggacuggauccuguggaucagcuucgccaucagcugcuuccuccugugcgucgcccugcucggguucaucaugugggccugccagaagggcaacauccggugcgacaucugcaucuga

SEQ ID NO: 64128 - RNA, 1701 nt, Artificial Sequence
  derived and/or modified CDS sequence (opt1) from hemagglutinin__InfluenzaA__AAX76653
augaagaccaucaucgcccugagcuacuuccucugccugguguucgcccagaagcugcccggcaacgacaacuccaccgcgacgcucugccuggggcaccacgccgucccgaacggcaccaucgugaagaccaucaccaacgaccagaucgaggugacgaacgccaccgagcugguccagagcuccagcaccgggggcaucugcgacagcccccaccagauccucgacggggagaacugcacccugaucgacgcccugcucggcgacccccagugcgacggcuuccagaacaagaagugggaccuguucguggagcgcagcaaggccuacuccaacugcuaccccuacgacgugccggacuacgcgagccugcggucccucgucgccagcuccgggacgcuggaguucaacaacgagagcuucaacuggaccggcgugacccagaacgggaccuccagcgccugcgagcgccgguccaacaagagcuucuucucccgccugaacuggcucacgcaccugaaguacaaguaccccgcccugaacgugaccaugcccaacaacgagaaguucgacaagcucuacaucuggggcguccaccaccccgggaccgacagcgaccagaucucccuguucgcgcaggccagcggccggaucaccgugagcacgaagcgcucccagcagaccgugaucccgaacaucggcagcgggccccggguccgcgacguguccagccggaucuccaucuacuggaccaucgugaagcccggcgacauccugcucaucaacagcaccgggaaccugaucgcgccccgcggcuacuucaagauccgguccggcaagagcuccaucaugcgcagcgacgccccgaucgggaagugcaacuccgagugcaucacgcccaacggcagcauccccaacgacaagcccuuccagaacgucaaccggaucaccuacggggccugcccgcgcuacgugaagcagaacacccugaagcucgccaccggcaugcggaacgugcccgagaagcagacgcgcgggaucuucggcgccaucgccggcuucaucgagaacgggugggagggcauggucgacgggugguacggcuuccggcaccagaacuccgaggggaccggccaggccgccgaccugaaguccacccaggcggccaucaaccagaucaacggcaagcugaaccgccucaucgggaagaccaacgagaaguuccaccagaucgagaaggaguucuccgagguggagggccggauccaggaccuggagaaguacguggaggacacgaagaucgaccuguggagcuacaacgccgagcuccuggucgcccuggagaaccagcacaccaucgaccucaccgacuccgagaugaacaagcuguucgagcgcaccaagaagcagcugcgggagaacgccgaggacauggggaacggcugcuucaagaucuaccacaagugcgacaacgcgugcaucgggagcauccgcaacggcacguacgaccacgacguguaccgcgacgaggcccucaacaaccgguuccagaucaagggcguggagcugaaguccggguacaaggacuggauccuguggaucagcuucgccaucagcugcuuccuccugugcgucgcccugcucggcuucaucaugugggccugccagaaggggaacauccgcugcgacaucugcaucuga

SEQ ID NO: 64129 - RNA, 1701 nt, Artificial Sequence
  derived and/or modified CDS sequence (opt1) from hemagglutinin__InfluenzaA__AAX76663
augaagaccaucaucgcccugagcuacauccucugccugguguucgcccagaagcugcccggcaacgacaacuccaccgcgacgcucugccuggggcaccacgccgucccgaacggcacccuggugaagaccaucaccaacgaccagaucgaggugacgaacgccaccgagcucguccagagcuccagcaccgggcgcaucugcgacagcccccaccagauccuggacggcgagaacugcacccugaucgacgcccuccugggggacccccacugcgacggcuuccagaacaaggagugggaccuguucguggagcggagcaaggccuacuccaacugcuaccccuacgacgugccggacuacgucagccuccgcucccugguggcgagcuccggcacgcuggaguucaacaacgagagcuucaacuggaccgggguggcccagaacggcaccuccagcgccugcaagcggcgcuccgacaagagcuucuucucccggcucaacuggcugcaccagcugaaguacaaguaccccgcccucaacgucaccaugcccaacaacgagaaguucgacaagcuguacaucuggggcgugcaccaccccgggacggacagcgaccagaucucccuguacgcgcaggccagcgggcgcgugaccgucagcaccaagcggucccagcagaccgugaucccgaacaucggcagcggccccugggugcgcggggucuccagccggaucuccaucuacuggacgaucgugaagcccggcgacauccuccugaucaacagcaccgggaaccugaucgcgccccgcggcuacuucaagauccgguccggcaagagcuccaucaugcgcagcgacgccccgaucgggaagugcaacuccgagugcaucacccccaacggcagcauccccaacgacaagcccuuccagaacgugaaccggaucaccuacgggccgugcccccgcuacgucaagcagaacacgcucaagcuggccaccggcaugcggaacgugcccgagaagcagacccgcgggaucuucggcgccaucgccggcuucaucgagaacgggugggagggcaugauggacgggugguacggcuuccggcaccagaacuccgaggggaccggccaggccgccgaccugaaguccacgcaggccgcgaucaaccagaucaacggcaagcucaaccgccugaucgagaagaccaacgagaaguuccaccagaucgagaaggaguucuccgagguggaggggcggauccaggaccuggagaaguacgucgaggacaccaagaucgaccucuggagcuacaacgccgagcugcugguggcccucgagaaccagcacaccaucgaccugacggacuccgagaugaacaagcuguucgagcgcaccaagaagcagcuccgggagaacgccgaggacaugggcaacgggugcuucaagaucuaccacaagugcgacaacgccugcaucggcagcauccgcaacgggaccuacgaccacgacguguaccgcgacgaggcgcugaacaaccgguuccagaucaagggcgucgagcugaaguccggcuacaaggacuggauccucuggaucagcuucgccaucagcugcuuccugcugugcaucgugcuccugggguucaucaugugggccugccagaagggcaacauccgcugcaacaucugcaucuga

SEQ ID NO: 64130 - RNA, 1701 nt, Artificial Sequence
  derived and/or modified CDS sequence (opt1) from hemagglutinin__InfluenzaA__AAX76673
augaagaccaucaucgcccugagcuacauccucugccugguguucgcccagaagcugcccgucaacgacaacuccaccgcgacgcucugccugggccaccacgccgugccgaacgggacccuggugaagaccaucaccaacgaccacaucgaggucacgaacgccaccgagcucgugcagagcuccagcaccggccgcaucugcgacagcccccaccagauccuggacggggagaacugcacccugaucgacgcccuccugggcgacccccacugcgacggguuccagaacaaggagugggaccuguucguggagcggagcacggccuacuccaacugcuaccccuacgacgucccggacuacgcgagccuccgcucccugguggccagcuccggcacccuggaguucaacaacgagagcuucaacuggaccggcguggcccagaacgggaccuccagcgccugcaagcggcgcuccaucaagagcuucuucucccggcucaacuggcugcaccagcugaaguacaaguaccccgcgcucaacgucacgaugcccaacaacgagaaguucgacaagcuguacaucuggggcgugcaccaccccagcaccgacuccgaccagaucagccuguacgcccaggccagcgggcgcgugaccgucuccaccaagcggagccagcagacggugaucccgaacaucggcucccgccccugggugcgcggggucagcucccggaucagcaucuacuggaccaucgugaagcccggcgacauccuccugaucaacuccaccggcaaccugaucgcgccccggggguacuucaagauccgcagcggcaaguccagcaucaugcgguccaacgccccgaucgggaagugcaacagcgagugcaucacccccaacggcuccauccccaacgacaagcccuuccagaacgugaaccgcaucacguacggcgccugcccgcgguacgucaagcagaacacccucaagcuggccaccgggaugcgcaacgugcccgagaagcagacccggggcaucuucggggccaucgccggcuucaucgagaacgggugggagggcaugguggacggcugguacggguuccgccaccagaacagcgagggcacggggcaggccgcggaccugaaguccacccaggccgccaucaaccagaucaacggcaagcucaaccggcugaucgagaagaccaacgagaaguuccaccagaucgagaaggaguucagcgaggucgaggggcgcauccaggaccuggagcgguacguggaggacaccaagaucgaccucugguccuacaacgccgagcugcugguggcccucgagaaccagcacacgaucgaccugaccgacagcgagaugaacaagcuguucgagcgcacccgcaagcagcuccgggagaacgcggaggacaugggcaacggcugcuucaagaucuaccacaagugcgacaacgccugcaucggguccauccgcaacggcaccuacgaccacgacgucuaccgggacgaggcccugaacaaccgcuuccagaucaaggggguggagcugaaguccggcuacaaggacuggauccucuggaucagcuucgccaucuccugcuuccugcugugcgucgugcuccugggguucaucaugugggccugccagaagggcaacauccggugcaacaucugcaucuga

SEQ ID NO: 64131 - RNA, 1701 nt, Artificial Sequence
  derived and/or modified CDS sequence (opt1) from hemagglutinin__InfluenzaA__AAX76683
augaagaccaucaucgcccugagcuacauccucugccugguguucgcccagaagcugcccgucaacgacaacuccaccgcgacgcucugccugggccaccacgccgugccgaacgggacccuggugaagaccaucaccaacgaccacaucgaggucacgaacgccaccgagcucgugcagagcuccagcaccggccgcaucugcgacagcccccaccagauccuggacggggagaacugcacccugaucgacgcccuccugggcgacccccacugcgacggguuccagaacaaggagugggaccuguucguggagcggagcacggccuacuccaacugcuaccccuacgacgucccggacuacgcgagccuccgcucccugguggccagcuccggcacccuggaguucaacaacgagagcuucaacuggaccggcguggcccagaacgggaccuccagcgccugcaagcggcgcuccaucaagagcuucuucucccggcucaacuggcugcaccagcugaaguacaaguaccccgcgcucaacgucacgaugcccaacaacgagaaguucgacaagcuguacaucuggggcgugcaccaccccagcaccgacuccgaccagaucagccuguacgcccaggccagcgggcgcgugaccgucuccaccaagcggagccagcagacggugaucccgaacaucggcucccgccccugggugcgcggggucagcucccggaucagcaucuacuggaccaucgugaagcccggcgacauccuccugaucaacuccaccggcaaccugaucgcgccccggggguacuucaagauccgcagcggcaaguccagcgugaugcgguccaacgccccgaucgggaagugcaacagcgagugcaucacccccaacggcuccauccccaacgacaagcccuuccagaacgucaaccgcaucacguacggcgccugcccgcgguacgugaagcagaacacccucaagcuggccaccgggaugcgcaacgugcccgagaagcagacccggggcaucuucggggccaucgccggcuucaucgagaacgggugggagggcauggucgacggcugguacggguuccgccaccagaacagcgagggcacggggcaggccgcggaccugaaguccacccaggccgccaucaaccagaucaacggcaagcucaaccggcugaucgagaagaccaacgagaaguuccaccagaucgagaaggaguucagcgagguggaggggcgcauccaggaccuggagaaguacguggaggacaccaagaucgaccucugguccuacaacgccgagcugcuggucgcccucgagaaccagcacacgaucgaccugaccgacagcgagaugaacaagcuguucgagcggacccgcaagcagcuccgcgagaacgcggaggacaugggcaacggcugcuucaagaucuaccacaagugcgacaacgccugcaucggguccauccggaacggcaccuacgaccacgacguguaccgcgacgaggcccugaacaaccgguuccagaucaagggggucgagcugaaguccggcuacaaggacuggauccucuggaucagcuucgccaucuccugcuuccugcugugcguggugcuccugggguucaucaugugggccugccagaagggcaacauccgcugcaacaucugcaucuga

SEQ ID NO: 64132 - RNA, 1701 nt, Artificial Sequence; identical to SEQ ID NO: 64096
  derived and/or modified CDS sequence (opt1) from hemagglutinin__InfluenzaA__AAX76713

SEQ ID NO: 64133 - RNA, 1701 nt, Artificial Sequence
  derived and/or modified CDS sequence (opt1) from hemagglutinin__InfluenzaA__AAX76723
augaagaccaucaucgcccugagcuacauccucugccugguguucgcccagaagcugcccgucaacgacaacuccaccgcgacgcucugccugggccaccacgccgugccgaacgggacccuggugaagaccaucaccaacgaccacaucgaggucacgaacgccaccgagcucgugcagagcuccagcaccggccgcaucugcgacagcccccaccagauccuggacggggagaacugcacccugaucgacgcccuccugggcgacccccacugcgacggguuccagaacaaggagugggaccuguucguggagcggagcacggccuacuccaacugcuaccccuacgacgucccggacuacgcgagccuccgcucccugguggccagcuccggcacccuggaguucaacaacgagagcuucaacuggaccggcguggcccagaacgggaccuccagcgccugcaagcggcgcuccaucaagagcuucuucucccggcucaacuggcugcaccagcugaaguacaaguaccccgcgcucaacgucacgaugcccaacaacgaggaguucgacaagcuguacaucuggggcgugcaccaccccagcaccgacuccgaccagaucagccuguacgcccaggccagcgggcgcgugaccgucuccaccaagcggagccagcagacggugaucccgaacaucggcucccgccccugggugcgcggggucagcuccaucaucagcaucuacuggaccaucgugaagcccggcgacauccuccugaucaacuccaccggcaaccugaucgcgccccggggguacuucaagauccggagcggcaaguccagcaucaugcgcuccaacgccccgaucgggaagugcaacagcgagugcaucacccccaacggcuccauccccaacgacaagcccuuccagaacgugaaccggaucacguacggcgccugcccgcgcuacgucaagcagaacacccucaagcuggccaccgggaugcggaacgugcccgagaagcagacccgcggcaucuucggggccaucgccggcuucaucgagaacgggugggagggcaugguggacggcugguacggguuccggcaccagaacagcgagggcacggggcaggccgcggaccugaaguccacccaggccgccaucaaccagaucaacggcaagcucaaccgccugaucgagaagaccaacgagaaguuccaccagaucgagaaggaguucagcgaggucgaggggcggauccaggaccuggagaaguacguggaggacaccaagaucgaccucugguccuacaacgccgagcugcugguggcccucgagaaccagcacacgaucgaccugaccgacagcgagaugaacaagcuguucgagcgcacccggaagcagcuccgcgagaacgcggaggacaugggcaacggcugcuucaagaucuaccacaagugcgacaacgccugcaucggguccauccgcaacggcaccuacgaccacgacgucuaccgggacgaggcccugaacaaccgcuuccagaucaaggggguggagcugaaguccggcuacaaggacuggauccucuggaucagcuucgccaucuccugcuuccugcugugcgucgugcuccugggguucaucaugugggccugccagaagggcaacauccggugcaacaucugcaucuga

SEQ ID NO: 64134 - RNA, 1701 nt, Artificial Sequence
  derived and/or modified CDS sequence (opt1) from hemagglutinin__InfluenzaA__AAX76733
augaagaccaucaucgcccugagcuacauccucugccugguguucgcccagaagcugcccggcaacgacaacuccaccgcgacgcucugccuggggcaccacgccgucccgaacggcacccuggugaagaccaucaccaacgaccagaucgaggugacgaacgccaccgagcucguccagagcuccagcaccgaccgcaucugcgacagcccccaccagauccuggacgggggcaacugcacccugaucgacgcccuccugggggacccccacugcgacggcuuccagaacaaggagugggaccuguucguggagcggagcaaggccuacuccaacugcuaccccuacgacgugccggacuacgucagccuccgcucccugguggcgagcuccggcacgcuggaguucaacaacgagagcuucaacuggaccgggguggcccagaacggcaccuccagcgccugcaagcggcgcuccgacaagagcuucuucucccggcucaacuggcugcaccagcugaagaacaaguaccccgcccucaacgucgcgaugcccaacaacgagaaguucgacaagcuguacaucuggggcgugcaccaccccgggaccgacagcgaccagaucucccuguacgcccaggccagcgggcgcgugacggucagcaccaagcggucccagcagaccgugaucccgaacaucggcagccgcccccgggugcgcgacaucuccagccggaucuccaucuacuggaccaucgucaagcccggcgacauccuccugaucaacagcacggggaaccugaucgcgccccgcggcuacuucaagauccgguccgggaaguccuccaucaugcgcagcgacgccccgaucggcaagugcaacuccgagugcaucacccccaacggcagcauccccaacgacaagcccuuccagaacgugaaccggaucaccuacggggccugcccgcgcuacgugaagcagaacacccucaagcuggccacgggcaugcggaacguccccgagaagcagacccgcgggaucuucggcgccaucgccggguucaucgagaacggcugggagggcaugguggacgggugguacggcuuccggcaccagaacuacgaggggaccggccaggccgcggaccugaaguccacccaggccgccaucaaccagaucaacgggaagcucaaccgccugaucgagaagacgaacgagaaguuccaccagaucgagaaggaguucagcgagguggagggccggauccaggaccuggagaaguacgucgaggacaccaagaucgaccucugguccuacaacgccgagcugcugguggcccucgagaaccagcacaccaucgaccugaccgacagcgagaugaacaagcuguucgagcgcacgaagaagcagcuccgcgagaacgcggaggacaugggcaacgggugcuucaagaucuaccacaagugcgacaacgccugcaucggcuccauccggaacgggaccuacgaccacgacguguaccgcgacgaggcccugaacaaccgguuccagaucaagggcgucgagcucaagagcggguacaaggacuggauccuguggaucuccuucgccaucagcugcuuccugcugugcaucgugcuccugggcuucaucaugugggccugccagaagggcaacauccgcugcaacaucugcaucuga

SEQ ID NO: 64135 - RNA, 1701 nt, Artificial Sequence
  derived and/or modified CDS sequence (opt1) from hemagglutinin__InfluenzaA__AAX76743
augaagaccaucaucgcccugagcuacauccucugccugguguucgcccagaagcugcccggcaacgacaacuccaccgcgacgcucugccuggggcaccacgccgucccgaacggcacccuggugaagaccaucaccaacgaccagaucgaggugacgaacgccaccgagcucguccagagcuccagcaccgggcgcaucugcgacagcccccaccagauccuggacggcgagaacugcacccugaucgacgcccuccugggggacccccacugcgacggcuuccagaacaaggagugggaccuguucguggagcggagcaaggccuacuccaacugcuaccccuacgacgugccggacuacgucagccuccgcucccugguggcgagcuccggcacgcuggaguucaacaacgagagcuucaacuggaccgggguggcccagaacggcaccuccagcgccugcaagcggcgcuccaacaagagcuucuucucccggcucaacuggcugcaccagcugaagaacaaguaccccgcccucaacgucgcgaugcccaacaacgagaaguucgacaagcuguacaucuggggcgugcaccaccccgggaccgacagcgaccagaucucccuguacgcccaggccagcgggcgcgugacggucagcaccaagcggucccagcagaccgugaucccgaacaucggcagccgcccccgggugcgcgacaucuccagccggaucuccaucuacuggaccaucgucaagcccggcgacauccuccugaucaacagcacggggaaccugaucgcgccccgcggcuacuucaagauccgguccgggaaguccuccaucaugcgcagcgacgccccgaucggcaagugcaacuccgagugcaucacccccaacggcagcauccccaacgacaagcccuuccagaacgugaaccggaucaccuacggggccugcccgcgcuacgugaagcagaacacccucaagcuggccacgggcaugcggaacguccccgagaagcagacccgcgggaucuucggcgccaucgccggguucaucgagaacggcugggagggcaugauggacgggugguacggcuuccggcaccagaacuccgaggggaccggccaggccgcggaccucaagagcacccaggccgccaucaaccagaucaacgggaagcugaaccgccugaucgagaagacgaacgagaaguuccaccagaucgagaaggaguucuccgagguggagggccggauccaggaccuggagaaguacguggaggacaccaagaucgaccucuggagcuacaacgccgagcugcuggucgcccucgagaaccagcacaccaucgaccugaccgacuccgagaugaacaagcuguucgagcgcacgaagaagcagcuccgcgagaacgcggaggacaugggcaacgggugcuucaagaucuaccacaagugcgacaacgccugcaucggcagcauccggaacgggaccuacgaccacgacguguaccgcgacgaggcccugaacaaccgguuccagaucaagggcguggagcugaaguccggguacaaggacuggauccucuggaucagcuucgccaucagcugcuuccugcugugcaucguccuccugggcuucaucaugugggccugccagaagggcaacauccgcugcaacaucugcaucuga

SEQ ID NO: 64136 - RNA, 1701 nt, Artificial Sequence
  derived and/or modified CDS sequence (opt1) from hemagglutinin__InfluenzaA__AAX76763
augaagaccaucaucgcccugagcuacauccucugccugguguucgcccagaagcugcccggcaacgacaacuccaccgcgacgcucugccuggggcaccacgccgucccgaacggcaccaucgugaagaccaucaccaacgaccagaucgaggugacgaacgccaccgagcugguccagagcuccagcaccgggggcaucugcgacagcccccaccagauccucgacggggagaacugcacccugaucgacgcccugcucggcgacccccagugcgacggcuuccagaacaagaagugggaccuguucguggagcgcagcaaggccuacuccaacugcuaccccuacgacgugccggacuacgcgagccugcggucccucgucgccagcuccgggacgcuggaguucaacaacgagagcuucgacuggaccggcgugacccagaacgggaccuccagcgccugcaagcgccgguccaacaagagcuucuucucccgccugaacuggcucacgcaccugaaguacaaguaccccgcccugaacgugaccaugcccaacaacgagaaguucgacaagcucuacaucuggggcguccaccaccccgggaccgacagcgaccagaucucccuguacgcgcaggccagcggccggaucaccgugagcacgaagcgcucccagcagaccgugaucccgaacaucggcagccggccccgcguccgggacaucuccagccgcaucuccaucuacuggaccaucgugaagcccggggacauccugcucaucaacagcaccggcaaccugaucgcgccccggggguacuucaagauccgcuccggcaagagcuccaucaugcggagcgacgccccgaucggcaagugcaacuccgagugcaucacgcccaacgggagcauccccaacgacaagcccuuccagaacgugaaccgcaucaccuacggcgccugcccgcgguacgucaagcagaacacccugaagcucgccaccgggaugcgcaacgugcccgagaagcagacgcggggcaucuucggggccaucgccggcuucaucgagaacggcugggaggggaugguggacggcugguacggguuccgccaccagaacuccgagggcaccgggcaggccgccgaccugaaguccacccaggcggccaucaaccagaucaacggcaagcugaaccggcucaucggcaagaccaacgagaaguuccaccagaucgagaaggaguucuccgaggucgaggggcgcauccaggaccuggagaaguacguggaggacacgaagaucgaccuguggagcuacaacgccgagcuccugaucgcccuggagaaccagcacaccaucgaccucaccgacuccgagaugaacaagcuguucgagcggaccaagaagcagcugcgcgagaacgccgaggacaugggcaacgggugcuucaagaucuaccacaagugcgacaacgcgugcaucggcagcauccgcaacgggacguacgaccacgacguguaccgggacgaggcccucaacaaccgcuuccagaucaagggcgucgagcugaaguccggcuacaaggacuggauccuguggaucagcuucgccaucagcugcuuccuccugugcguggcccugcucggguucaucaugugggccugccagaagggcaacauccggugcaacaucugcaucuga

SEQ ID NO: 64137 - RNA, 1701 nt, Artificial Sequence; identical to SEQ ID NO: 64056
  derived and/or modified CDS sequence (opt1) from hemagglutinin__InfluenzaA__AAY18086
